United States Patent Application Publication US 2011/0183924 A1 - sequence listing, part 25

SEQ ID NO: 60094 - DNA, 2339 bp, Homo sapiens
  misc_feature (1)..(1): n is a, c, g, or t
ntagcaagaaacaaaacacaaacaacagaacaagaacacatacgctagtactgagcctggggtacagagaccacagcaagaaccccgtgggcgtggcctgcaccatggcccatgagatgggccacaacctgggcatggaccatgatgagaacgtccagggctgccgctgccaggaacgcttcgaggccggccgctgcatcatggcaggcagcattggctccagtttccccaggatgttcagtgactgcagccaggcctacctggagagctttttggagcggccgcagtcggtgtgcctcgccaacgcccctgacctcagccacctggtgggcggccccgtgtgtgggaacctgtttgtggagcgtggggagcagtgcgactgcggcccccccgaggactgccggaaccgctgctgcaactctaccacctgccagctggctgagggggcccagtgtgcgcacggtacctgctgccaggagtgcaaggtgaagccggctggtgagctgtgccgtcccaagaaggacatgtgtgacctcgaggagttctgtgacggccggcaccctgagtgcccggaagacgccttccaggagaacggcacgccctgctccgggggctactgctacaacggggcctgtcccacactggcccagcagtgccaggccttctgggggccaggtgggcaggctgccgaggagtcctgcttctcctatgacatcctaccaggctgcaaggccagccggtacagggctgacatgtgtggcgttctgcagtgcaagggtgggcagcagcccctggggcgtgccatctgcatcgtggatgtgtgccacgcgctcaccacagaggatggcactgcgtatgaaccagtgcccgagggcacccggtgtggaccagagaaggtttgctggaaaggacgttgccaggacttacacgtttacagatccagcaactgctctgcccagtgccacaaccatggggtgtgcaaccacaagcaggagtgccactgccacgcgggctgggccccgccccactgcgcgaagctgctgactgaggtgcacgcagcgtccgggagcctccccgtcctcgtggtggtggttctggtgctcctggcagttgtgctggtcaccctggcaggcatcatcgtctaccgcaaagcccggagccgcatcctgagcaggaacgtggctcccaagaccacaatggggcgctccaaccccctgttccaccaggctgccagccgcgtgccggccaagggcggggctccagccccatccaggggcccccaagagctggtccccaccacccacccgggccagcccgcccgacacccggcctcctcggtggctctgaagaggccgccccctgctcctccggtcactgtgtccagcccacccttcccagttcctgtctacacccggcaggcaccaaagcaggtcatcaagccaacgttcgcacccccagtgcccccagtcaaacccggggctggtgcggccaaccctggtccagctgagggtgctgttggcccaaaggttgccctgaagccccccatccagaggaagcaaggagccggagctcccacagcaccctaggggggcacctgcgcctgtgtggaaatttggagaagttgcggcagagaagccatgcgttccagccttccacggtccagctagtgccgctcagccctagaccctgactttgcaggctcagctgctgttctaacctcagtaatgcatctacctgagaggctcctgctgtccacgccctcagccaattccttctccccgccttggccacgtgtagccccagctgtctgcaggcaccaggctgggatgagctgtgtgcttgcgggtgcgtgtgtgtgtacgtgtctccaggtggccgctggtctcccgctgtgttcaggaggccacatatacagcccctcccagccacacctgcccctgctctggggcctgctgagccggctgccctgggcacccggttccaggcagcacagacgtggggcatccccagaaagactccatcccaggaccaggttcccctgcgtgctcttcgagagggtgtcagtgagcagactgcaccccaagctcccgactccaggtcccctgatcttggggcctgtttcccatgggattcaagagggacagccccagctttgtgtgtgtttaagcttaggaatcgcctttatggaaagggctatgtgggagagtcagctatcttgtctggttttcttgagacctcagatgtgtgttcagcagggctgaaagcttttattctttaataatgagaaatgtatattttactaataaattattgaccgagttctgtagattcttgttaga

SEQ ID NO: 60095 - DNA, 188 bp, Homo sapiens
attcccaacccctccccatgacagactgatcacacctccttcctatactacttctgttctttgtaaatacttagtattttccaagggagtgggagagaagaaatgctaggttcatgaagggtctctaggttaaactttctttcttttttttttcttaaaacaacacacttattatcttacaaatctgt

SEQ ID NO: 60096 - DNA, 241 bp, Homo sapiens
ttttgccatgttgcccagctggtcttgaactcctaggctcaagcaatccacctgcctcaacctgccccgatacagatttttaaaatgtaggtgattaataactcacttgtagctctggagctgttcaacagaagttgcaactcaagaacgctatttagtaattaataagaaaagtttggggaaacaaagttctacattgtgctctgctgatctttttctttgaaatcttactgcagatgct

SEQ ID NO: 60097 - DNA, 448 bp, Homo sapiens
tgatcatagctcactgcagcctcagcctcctgagctcaagtaatcctaccacttcagcctcctgagtagctcggactacaggcccaaatcatttatttatttattttgtagagatagggtcttgtcacgttgtccaggctggtcttgaactcctggcctcaagcaatcttcccacctcagcctcccaaagtgctgagactacaggtgtgagccatgattgccagtccacgtcttagtttttaatctcccctgcatggctgagggcagaggccagccagggagcatctgaggagacccaaatttgcatcccaccatgggccagttagtagttgtgtgacctctggtgatgggcatcacttttgctgaggcctgctctgagggtgactgtgtggcctaaaggatagagggcacagagttcccactccagaagcgacacagcacatccctg

SEQ ID NO: 60098 - DNA, 851 bp, Homo sapiens
ggctccagagctcagagccacccacagccgcagccatgctgtgcctcctgctcaccctgggcgtggccctggtctgtggtgtcccggccatggacatcccccagaccaagcaggacctggagctcccaaagttggcagggacctggcactccatggccatggcgaccaacaacatctccctcatggcgacactgaaggcccctctgagggtccacatcacctcactgttgcccacccccgaggacaacctggagatcgttctgcacagatgggagaacaacagctgtgttgagaagaaggtccttggagagaagactgagaatccaaagaagttcaagatcaactatacggtggcgaacgaggccacgctgctcgatactgactacgacaatttcctgtttctctgcctacaggacaccaccacccccatccagagcatgatgtgccagtacctggccagagtcctggtggaggacgatgagatcatgcagggattcatcagggctttcaggcccctgcccaggcacctatggtacttgctggacttgaaacagatggaagagccgtgccgtttctaggtgagctcctgcctggtcctgcctcctgggtgacctgtaaacccaacagctcacctccgcctccaggaagaccagactcccacccttccacacctccagagcagtgggacttcctcctgccctttcaaagaataaccacagctcagaagacgatgacgtggtcatctgtgtcgccatccccttcctgctgcacacctgcaccacggccatggggaggctgctccctgggggcagagtctctggcagaggttattaataaacccttggagcatg

SEQ ID NO: 60099 - DNA, 252 bp, Homo sapiens
gctcaaagaccctgaactctcatttgttgcactccaaagctcaaacaacgtcttcatctgacctcaacatgacatcatcactggagctcaatcaagcagccctgagtttacaattacccttctgtaaacctcaaacaacatcttcaagcctagatgtttgctggagatcactttcattgaagtctcatcaaagagtctcaagttcatcattatttcgcctccaaaatcaagaaataccttccataaacatca

SEQ ID NO: 60100 - DNA, 164 bp, Homo sapiens
cattcaagggacccctctctccagatgcccctctggcttcttccttttgcagttaatttccttggatttgtggaggttttccacttttaaaacttcagctgggggccagcatggaggcgctcccttccgctctctgacccctgacccctgtttttgttccaggc

SEQ ID NO: 60101 - DNA, 525 bp, Homo sapiens
cttgctgaaagattatatgatacagtagaactaaggtggggcctgagaaattgcatttataacaagctctcaggtgatgccaatgccgctcaaccatataaccatagtttgagtagtaaagttatatattctgtctgttctatcatattttaaaaattttggtctcagtataattatgcctacccacattctcatcccttaattccttctgtcattttctgtatacagttatgtttttttttatcatttttattttttcacttgtcctcagtcacttttaatgagataatgcatgtgaaggtgcttagcacacataaatattagctacaaattccttccatgttttctgtttttctactctttcttaatttatgaaagattgtttactttctccctttatattcctcttttaaaattccatttatggctggatgtggtggctcatgcctgtaatcctagaattttgggaggctgaggcaggcaaatcacttgaggccaggagtttgagaccagcctggccaacat

SEQ ID NO: 60102 - DNA, 507 bp, Homo sapiens
cggcaaactcaggaggtgggcaggttagcaaagggaagcctggtcccacgtgaaccagggcacctctgcactcgcttgctttatatctcgggctctcacagaagacttcatttgaagagaggattgattctgtagtgaagagaagaaaagtttggaggccatgggcctaggtctgtgctctcattttctaggaaagggacctgatgtctagggggttggggagggtagggaacggctctgcagagacctcattgtcagtgacagacagccaccactaccagacctgttgttcccatttcgctttttgttttttacttcaaaaaagatacttattctgggtggcataccactgtttgattgattgattgatttagagatagggtcttgctatgttgcccaggcccagtcgcaaactcttgggctcaagctatcctcccatctcagcctcctgattagctgggacaataggcatataccactgcaactggcttttttctatattttatt

SEQ ID NO: 60103 - DNA, 594 bp, Homo sapiens
  misc_feature (258)..(258): n is a, c, g, or t
ttatttcaggagtggatgttatgacagaggaatgtaggaaggaaggacatcaggctctgaacatccatccatgtaaaacattgaataagactagctgttaaacagggctttttccctagaaaggtgtcataattttgactccatcaaattcttctaacagcaagtactcatttgggcccattttacagaagaaggaaaactcttgagtggctcaatcttggctctccacaacctctgcctcctggattcaagcgattntattccccagcataccaagaagctgggattacagttttgaagatgaagaaaaaccgaagctataaggactgagataaaatgcccaaggacatatagcttgaaaaaggcatggctagaatgtgcactcagtatgacctcagcacccaagctttttaccaatatatgctgcaattttaggctcatcaactgcacacagtgaattgtggtgctacttcgtttaagcctgcattttccttcagagcctacacctccctttcagctgttttcaccttcactgttccaaaaaaagcagactttgaaaacttaagaaatgacattaaaaaaaatcaaaatcga

SEQ ID NO: 60104 - DNA, 562 bp, Homo sapiens
agaccttgaagtatcagggttcgagccccgagaggagatccaaggggaccccctcctccatctgactgaggaacggactccccacttccaccaacccaactcgtcatggctgctcggaaatctcatattcaactcaaaaaaggaggcgaaactcctctcaacgcctgcattttaagcagcggctcctcggctcttgtgcgctgttcaggcgctcgcagatcgtccctgctcttccctccaccctgcagtgagctcctggcagctgggccggacgcagcttcccatgagcagaggatcgacctgggagcctggtgggtgatctccgcccagaccaagcatgagaaccccaagtccagtgggacaggccacagaccagcgactgctgcccatgcctgtcctggggactccagacagtgccgagggaaaggagaaatcattcattcagccattcattcgttgacccaggcaattattcattcattcattcaacagatattgactgagtcctccctttgaggcaggcactgttttatgcactgaaatacaactatttatacaacag

SEQ ID NO: 60105 - DNA, 297 bp, Homo sapiens
ctcttttctttataaattacccagtctcaggtagttctttatagcagcacaagaacagactaatacagttcctttgaagaaaagactgagaacatgattacaacaaatatgccattgtattacagtgtttttgctgctacagaccttaccgttttttcagccaatatatttcagatgtaaaaattggatcaggtcctgatattggtaaaagaatcatgatttttgaattttgataactgtttttaaactcctgctacttcatttttgtcttttttgggaggttacagatgttaagta

SEQ ID NO: 60106 - DNA, 232 bp, Homo sapiens
accaccccatctgctggtggtgctcatacttctccgggatacctcccctccagtctcctccacccctacagggtcagcactgctcttaagccttgaagtgtcacatctgcatggcagctgccagcaaaagggagaaaaacctctgtatcccttcaggtgacactagttgctgtatggataaacacctaaatctcacttggctgaacacaataaaagtttatctggtgctcac

SEQ ID NO: 60107 - DNA, 960 bp, Homo sapiens
gctttttaaatgaccccaggcgtgtggagacattgcatgctgtgagggaaataaaaacaataatgcgaaaacaacgttaaggatctactccaagtatggcccacaaaacactcttgagctgcttgctgttgcgcccctgtgcgtttcatccctcctgctctcttcgtcaaccctacagcatgtggggtgtgaaatcacttgagaaactgtttccactggtttgctatgagaatttcatagtttgacccctgaaaatgaagggaattagaattgataggagggatgatttggtgcccaaagtggtgaattggtgccagaaggtcacctgagtaagaaatgcctttgcctggtggctacgtaagttagaaataagtgagctgaaaattaaagtaaaaaaggttaatttctatgagaatatcagttggacagacagcaattagataaggtacaatctaagaagtaaagcaggagagagagtttacttaataactaaatatttacttttatctctttcactcacttgtaaaccaagataagcctgtttgttttctatataagagttaatgctctatgattaattatattcattattccaataatagcaacaatgagctttaaatgaaaatcattgtcattatgtctatttatttcttggttgcaaattgaaaaaatattgaaaatcaaatggacattgtacattatttactaagaatatttcacttactgtggatgatttaaaaaaaaactattctgtttcacttaatgcttcaagtgaattacattttctgcctctcacatttgaatacaaggctgttatcttagggctcccagcactgtggaagaaacatttcatggaagtaactctatttcagctgtaatgtctctttctgctccttttttattgaagaaaaaaaaagaagaaaaagaaaagaaaaagaaataaagcaataataattatat

SEQ ID NO: 60108 - DNA, 302 bp, Homo sapiens
ctctgatgagattgaaagcaaaaaaatgaataaagcataaagttggttcttagaaaaaataaagaaaatgcatagcccagtaactagattaacctagaaaagaagagagaagattcaaataagttcaattagaaatgaaactgtagctcattgagcttgcctgcagctctcagggttcctgtgactttcttcatcgttggagccaggcctacatgccagcaaccatgtcgaagggacctgcagttggtattgatcttggcaccacatactcttgtgtgggtgttttccatcagggaaaagta

SEQ ID NO: 60109 - DNA, 480 bp, Homo sapiens
ggtggagaccagttccaggggcagggatctgggtatgaataaaagggtgtatgatgtgggtgggttgggataggcccaggagccaggattgtgggagatcagattcaggggtagggccttccttggatccctagattgttgatacagttactgccccatgttcatacaacccaataggatcagattatgtatgcacatttgtctataacttgctttcccaaggcagaacatagtgatttaacactaagagtttaggggagcaggagaggactgggtcatagatacacatataggaaaacttaagaatggtacaaagtcagtcaaatattctcccaccacggtctttcagttcttttgctcagaggcaaaaataattttctcctctatctttccagatatagtgtggacatgtatgtgtgtgtatgtgtgtatgccgtagtcatattcatggaataaatgctattacctcccccccaacaa

SEQ ID NO: 60110 - DNA, 719 bp, Homo sapiens
aactgcgaaaggtctttaaatgtcaagaataaagaagtccggacgaactctgctaaggtacaatttgtggtaaattgcctctccacctcccaatcatgtaatttgcacttcccagatggttaaggaccatggttccaccaagctctgtgttcattagaacatggtttcaagctgagatctccacgcaaaggctattcagtttcaattccaaccctgcctcaaattttggaactttgggcaatatttttacccacctcagcttccccttcagagaacaggaaataatctacattgtagagttgtttggagctggaactggtaaccatgctcaccaaagatttaatattagatttaatattatacaaatgctgccctctttctcctgctctcaccacatgactgacatacctgcccccattttgccttctaccatgattgtaagcttcttgaaaccctcaccagaagccaaggagataattggtgccatgcttatatagcctgcagaaccataagccagttaaacctcttttctttataaattacccagcctcagatatttctatgcagtaacacaaaaatgacctaatatagaaaactggtaccaaagaatggggcattgctataaagatacctgaaaaacttaaactactagatatcaagactccttaaaaagctacagcaattaagatagtgtgttattggtataaaaacaggtaagt

SEQ ID NO: 60111 - DNA, 385 bp, Homo sapiens
ggtctgtgctctgacatcagcttttccaagtccttctctgatctccacatctaggaaagcagcttgaggcactctctcctccttctgctttgcttttccgcagagcatttatctgtgttttatcagaatatatatatctgggtgctaattttctatctcctttgttagaattcagtttccactagcacaggttctttgctcagtactttatcctctgctcctagaatagtgctagttacatagtagatacttatttaatatttcttgaataagcaaaagaatactctcttgattatattctagtggttttattttattttattagtttttagagacagggtctcactttgtcacccaggctggagtgcagtggtacaatcatagc

SEQ ID NO: 60112 - DNA, 490 bp, Homo sapiens
cactaaagtacattgtgggccaggagctggctccagaaagagatgttcaaagataaagctgagtttcttcagtacgtattgtgttctctggcattggcagcatctaatcttgacgtggaagacacttggggagcccttgaatggctgtttcagtaacaagcttaatttcactcctcagcactggtgttttacagctgttgcagagtaagaagtgtcaacttcattggacatgaaggagaaatctcaaacagagcgggaagcaattatgtattcaaggtcaggcagagcaagaaacatgcatcagagcccccacctgagagaaccagccattagtcacagcgagtcacagcacaattgtccacgctgcaaaacctgacttaattggaatcaacaaggccagaacaaacttctgaatgtatgccagtctcttttcatgaagggactgtgcagtcagttagattggaacttgaataaatcgtttttttggaaa

SEQ ID NO: 60113 - DNA, 313 bp, Homo sapiens
aattttttttttggtctctccccctgtccagagtgaggttttggtagaagaattcacttctcaaaccctcagattcaataaaatcagaaacctctctattcccttcagagtataggcttttaaaatagaaaagaggctggtggccttcagtctttgtgcttgaggtctggctgcagccctgccctgaggcaatgactcaggctggtgggattgggcaaagggtgaaaagtggaggaaaaacccggtatccgcggtttggctttccatggttttagttactcatggtcaaacgtggcctgaaaatattaaatga

SEQ ID NO: 60114 - DNA, 462 bp, Homo sapiens
cgagactctgtctcaaaaaacaaacaaaaaaaagctcacttgtgcagggccaggttctaggaagcaccagggagctggggatgtgggccttatctttaaagggcctgcagtccacagtgggagcgggggagaccaggtatgtagcaaaacttatacttaaatagaatataagcaaacataaaataatataggacaaatgggtggcatgaacttatcatcaaaaaataccagaactatttcctgaagaggataaatttagagcaatgcttcttaaagcgtggaagtgtggtagcagccgtcctggggagcttatcagaagggccagttctcaggccccatcccagactcctgaatcagaaacactagggtggagtccagccatctgtgtgttaaccagctctctcagtgactctggtgcacactaaagttcgacaccccctgatttcagtggagggaataaca

SEQ ID NO: 60115 - DNA, 429 bp, Homo sapiens
gcacatgcacaaatatgtgtgtacatggatgttcactgcagtggtgttggtaaaagcaaataaacagcccaatgtccatcagtaaagggatggcttaaataaattatgatacagctaaaaaatacaatgaagattaaaacttatgtagatcacatatacacataagatttccatcaaaaaagcagaatatgtgcagcataattgcattttggttcgaaataaaactatatatgtattcatgtgtttatgtatagttaacagttttgaaatatatatatcaaactgttaacaatggttaccactgggcagtaaagaaggggctttcgtgttgaattttatagacttctatgttattttcatttttataaatgtatctaatttgtaatttttaataaaacaaaataaattcaaggacaagtatattagaga

SEQ ID NO: 60116 - DNA, 670 bp, Homo sapiens
cagcatgagagactgctggacttcagtcttcggagcaggcaagaacggggagcttctgtggatttctattcctgtcgcctgtcactgtgaacagtgcccagtactgctggtcagtaaatgtttgctaaaatactgagcaaccaaggaagtgacttcagttgaactctgtacctgttgtgttcacttcctttgcaacatgcgtgactaatggttactccttctcttgaatgcttccagaagagtagcactcaccacctcatgaggaaaggcactgcaactttggtcaatgatatctgttagaaagatcttttcctatatttagaagagtgattctcatacctgagcatgtatgagaatcagtgggtttgaggtgggcccaagaatttccctttctaacaagttcccagaagatgctgatgtggcagcttctagcacagtgcttggaaatccatgagttttcaagaggacaatctaaagtgttcctttgttttcctttacttcccctcattctcaaatcctatggggatgacacagagaaccacaaacaaaacaacacacacacacacacacacacacacacatacacacacagagcacccttgtccctagctttatcctctgggatacacaggacaagctcctccctgttctatgtgcaacttttaaaata

SEQ ID NO: 60117 - DNA, 1642 bp, Homo sapiens
tgcttaaatcgcaggtgcaactgccaaaagaactggcgtaagaggcaacagagccgtctagaagaacaagaaatggaaatagtgactcttggattacagcatggagactatgtcagcagcaatactttaggatccacgtggcagaactggaaacaatgctaccatctgataagggtatttgtaaaaggcagaatgtttgggccatgaagaagtaggggctgaagaggaaggtggaaggagataaaatataatatttagaggcaatattttctacttgcaatcaatttgagtgactcaggtgaaatttagagtcatatttcccgaagcagaagttaaagaaaattttttaaacatttgctttattattgttttcttctggtaaataataaatataacagaagtgttaactattgtattcccatttttttctccttccatctcttctgcggtaattcatcacatagtatcttaaagggaacaaataatgtttcatcctatggaaatgtgaaggatgaattgagctcctggcccttctgatgctttgaaatggaaggattgttccttagagcttctctgcagaatcagtggagattttcagtttcccaccctgcctggctttctctcttggtgactcccttggtgttttggagtattctttctataggggtacctgtgaggggcagaacacgtaagccacagaacatggtgaaaactaagtgtcactaggaaaagtaatgggaaagtaaaccctgcatatatgaaaacttcctggcagcaagttttcatatatagagggacaatgggagacagcatgctgtttttatagaaaagaagttttacataatatagttattgacaagcttttggttttggctaaatacacacacacacacacacgctcatatgtgtttactctgtaagtctaatttgattttatcactctcaaacatattttaaaggaaacttgcttacaggaaggattaaacttgaactacttatcctattctttaaggcactccattgcctggccccaatttactaatcctgtcttatttcccacaaatcctttatactctactcgatgaaacatccttgtgcacacccttgtgcctttgctcgcattaatccttccaagagacttccctcctgttctccattaatgaacgtcctacccagtcttcaactcccgggtcagatcctgtgtcctccataaaaaattttccagacaactccaatctgtccttcttccaagttcctagaggccttaattattcattctagccactaggtgcatagaatttgagatttttgtaataatagaagtagtgtgaaccctagaaattagaaaatcaagctttgggccaggtgcggtggctcatgcctgtaatcccagcactatgggaggccagggagggaggatctccagaggtcaggagttcgagaccagcctggccaacatggtgaaaccccgtctctattaaaaatacaaaaattagctgggcatgatggcaggcacctgtaatcccagctactcgggaggctgaggcaggagaattgcttgaactggggaggcagaggttgcagtgagacaagatcacgtcactgtactccagcctgggtgacagagtgatactccatctca

SEQ ID NO: 60118 - DNA, 1428 bp, Homo sapiens
ccactgcaacctccgtctcctgggttacagagtgagaccctgcctcgaaaaataataataataatagtaatttgagtgactcaggtgaaatttagagtcatatttcccgaagcagaagttaaagaaaattttttaaacatttgctttattattgttttcttctggtaaataataaatataacagaagtgttaactattgtattcccatttttttctccttccatctcttctgcggtaattcatcacatagtatcttaaagggaacaaataatgtttcatcctatggaaatgtgaaggatgaattgagctcctggcccttctgatgctttgaaatggaaggattgttccttagagcttctctgcagaatcagtggagattttcagtttcccaccctgcctggctttctctcttggtgactcccttggtgttttggagtattctttctataggggtacctgtgaggggcagaacacgtaagccacagaacatggtgaaaactaagtgtcactaggaaaagtaatgggaaagtaaaccctgcatatatgaaaacttcctggcagcaagttttcatatatagagggacaatgggagacagcatgctgtttttatagaaaagaagttttacataatatagttattgacaagcttttggttttggctaaatacacacacacacacacacgctcatatgtgtttactctgtaagtctaatttgattttatcactctcaaacatattttaaaggaaacttgcttacaggaaggattaaacttgaactacttatcctattctttaaggcactccattgcctggccccaatttactaatcctgtcttatttcccacaaatcctttatactctactcgatgaaacatccttgtgcacacccttgtgcctttgctcgcattaatccttccaagagacttccctcctgttctccattaatgaacgtcctacccagtcttcaactcccgggtcagatcctgtgtcctccataaaaaattttccagacaactccaatctgtccttcttccaagttcctagaggccttaattattcattctagccactaggtgcatagaatttgagatttttgtaataatagaagtagtgtgaaccctagaaattagaaaatcaagctttgggccaggtgcggtggctcatgcctgtaatcccagcactatgggaggccagggagggaggatctccagaggtcaggagttcgagaccagcctggccaacatggtgaaaccccgtctctattaaaaatacaaaaattagctgggcatgatggcaggcacctgtaatcccagctactcgggaggctgaggcaggagaattgcttgaactggggaggcagaggttgcagtgagacaagatcacgtcactgtactccagcctgggtgacagagtgatactccatctca

SEQ ID NO: 60119 - DNA, 417 bp, Homo sapiens
atcccaggtacctccagcttctcccagatacttttctcactgggccaccgagcccgtctcacttgggcagctacaggtcacctgctggctccaggccccccatgtgcgcctccgcatctgccagccttgaacaagcttactgtggaggtggacgaggccaggctgcaggtatcaggaagctctccttggccctggtggagagggagcaacaggggagcagtggccacagcgagacccatatgagcacctcagcggtggccctgggaggcggggacaagggggcagttgagaacgggtcaaaccttgtttactttaaaactcattagatacgttggataatatggcctgttctatttcttttgcagggagaaaattcctcttataatgcaaatcctgctaagccctgtttgttttctt

SEQ ID NO: 60120 - DNA, 1058 bp, Homo sapiens
cacagtcttgctcccatcagcacgatcatgtgaacccaaaagcatttttcagtgttcttcgcatatatttgtctggctggaaaggcaacccccagctatcagacggtctggtgtatgaagggttctgggaagacccaaaggagtttgcagggggcagtgcaggccaaagcagcgtctttcagtgctttgacgtcctgctgggcatccagcagactgctggtggaggacatgctgctcagttcctccaggacatgagaagatatatgccaccagctcacaggaacttcctgtgctcattagagtcaaatccctcagtccgtgagtttgtcctttcaaaaggtgatgctggcctgcgggaagcttatgacgcctgtgtgaaagctctggtctccctgaggagctaccatctgcaaatcgtgactaagtacatcctgattcctgcaagccagcagccaaaggagaataagacctctgaagacccttcaaaactggaagccaaaggaactggaggcactgatttaatgaatttcctgaagactgtaagaagtacaactgagaaatcccttttgaaggaaggttaatgtaacccaacaagagcacattttatcatagcagagacatctgtatgcattcctgtcattacccattgtaacagagccacaaactaatactatgcaatgttttaccaataatgcaatacaaaagacctcaaaatacctgtgcatttcttgtaggaaaacaacaaaaggtaattatgtgtaattatactagaagttttgtaatctgtatcttatcattggaataaaatgacattcaataaataaaaatgcataagatatattctgtcggctgggcgcggtggctcacgcctgtaatcccagcactttgggaggccgaggcgggcggatcacaaggtcaggagatcgagaccatcttggctaacacggtgaaaccccgtctctactaaaaatacaaaaaattagccgggcgcggtggcgggcacctgtagtcccagctactcgggaggctgaggcaggagaatggcgtgaacctgggag

SEQ ID NO: 60121 - DNA, 883 bp, Homo sapiens
aaatagagtgtccagcccaggaaagaaatgtaaaaatcccaaatttaatttatggattaagacgggggaatttggcagggcacagtggctcacacctgtaatcccagcactttgggaggctgaagtgggcggatcacttgaagtcaggagttcgagaccagcctggccaacatggcgaaaccccgtctctactaaaaatataaaaattagccgggcatggtggtgggcacctgtagtcccagctactcaggaggctgaggcaggagaatggcgtgaacccgggaggcagagcttgcagtgagctgagatcgcgccactgcaccccagcctggacaactgagcgagactccgtctcaaaaaaaaaaaaaaaaaagaaagaaagaaaaccttaaatgtttgtgttttgtttgtttgttttaggtaattcctactgtattcaaggcaatgcaaatgcaagaacgggacactttgctaaaggcgctgttggaaatagcttcttgcttggagaaagcccttcaagtgtttcaccaaatccacggcaagtgttgtgtgcagtgcaatagtctaggctgacaagtcaaatgttccaggtgtagaatagttgaaaaaagggaagcaaaaagcaactatcacttagtatgttttcactttaggtattttatcttactaaaccattccactttctatgtggtaggtttcattatctccattttataagtaaagtcatctaaattcagaaagacagggtaaatgacttcagattccacaggcggtgaagccagagttccaagctgggtctatttaacactaaggaacttccttgcctcccgctaaaaaccttagagaaactttccacatgggagggtggttttaagtcccgaaa

SEQ ID NO: 60122 - DNA, 2372 bp, Homo sapiens
tgagaagggcaaatgctatcattggaaaaactgacaaaagtcccaataggaaaaataaggaagtggagagttactatgtttctaatttttcatgtgcttctatttttttcctacttcagagccattgactaatagttgagtataacacaggttgtgtttccgggctgctgaaacatgacactaatattttcaaagaactgtggaagcctaaaaggaagccaatgagaaataactaaatgagagtttaggactgcagccttcattttcattcaaagatttaaaagtttccataaagtaaaatgttcttctccggccacctgttttcatagttctgtgttttccttcaggcctttctggcttcctatatggcagtaagaaaatgatgtgcttaatgattacaaatttcatatggaatacgaactttcagtttgtacatatgatgcacagagatgcttttgtggttttattggttttcatattacaaacaaagaaactagaaaatgaaaccattccaaaagtggaagtaatttctcactgcccctgtgataaactgtggtcactggctgtggcagcaactattataagatgctctgaaaactcttcagacactgaggggcaccagaggagcagactacaagaatggcacacgctatggaaaactcctggacaatcagtaaagagtaccatattgatgaagaagtgggctttgctctgccaaatccacaggaaaatctacctgatttttataatgactggatgttcattgctaaacatctgcctgatctcatagagtctggccagcttcgagaaagagttgagaagttaaacatgctcagcattgatcatctcacagaccacaagtcacagcgccttgcacgtctagttctgggatgcatcaccatggcatatgtgtggggcaaaggtcatggagatgtccgtaaggtcttgccaagaaatattgctgttccttactgccaactctccaagaaactggaactgcctcctattttggtttatgcagactgtgtcttggcaaactggaagaaaaaggatcctaataagcccctgacttatgagtccattgcttcatggctgctttcataaggcccctgacttatgagaacatggacgttttgttctcatttcgtgatggagactgcagtaaaggattcttcctggtctctctattggtggaaatagcagctgcttctgcaatcaaagtaattcctactgtattcaaggcaatgcaaatgcaagaacgggacactttgctaaaggcgctgttggaaatagcttcttgcttggagaaagcccttcaagtgtttcaccaaatccacgatcatgtgaacccaaaagcatttttcagtgttcttcgcatatatttgtctggctggaaaggcaacccccagctatcagacggtctggtgtatgaagggttctgggaagacccaaaggagtttgcagggggcagtgcaggccaaagcagcgtctttcagtgctttgacgtcctgctgggcatccagcagactgctggtggaggacatgctgctcagttcctccaggacatgagaagatatatgccaccagctcacaggaacttcctgtgctcattagagtcaaatccctcagtccgtgagtttgtcctttcaaaaggtgatgctggcctgcgggaagcttatgacgcctgtgtgaaagctctggtctccctgaggagctaccatctgcaaatcgtgactaagtacatcctgattcctgcaagccagcagccaaaggagaataagacctctgaagacccttcaaaactggaagccaaaggaactggaggcactgatttaatgaatttcctgaagactgtaagaagtacaactgagaaatcccttttgaaggaaggttaatgtaacccaacaagagcacattttatcatagcagagacatctgtatgcattcctgtcattacccattgtaacagagccacaaactaatactatgcaatgttttaccaataatgcaatacaaaagacctcaaaatacctgtgcatttcttgtaggaaaacaacaaaaggtaattatgtgtaattatactagaagttttgtaatctgtatcttatcattggaataaaatgacattcaataaataaaaatgcataagatatattctgtcggctgggcgcggtggctcacgcctgtaatcccagcactttgggaggccgaggcgggcggatcacaaggtcaggagatcgagaccatcttggctaacacggtgaaaccccgtctctactaaaaatacaaaaaattagccgggcgcggtggcgggcacctgtagtcccagctactcgggaggctgaggcaggagaatggcgtgaacctgggag

SEQ ID NO: 60123 - DNA, 1437 bp, Homo sapiens
tgagaagggcaaatgctatcattggaaaaactgacaaaagtcccaataggaaaaataaggaagtggagagttactatgtttctaatttttcatgtgcttctatttttttcctacttcagagccattgactaatagttgagtataacacaggttgtgtttccgggctgctgaaacatgacactaatattttcaaagaactgtggaagcctaaaaggaagccaatgagaaataactaaatgagagtttaggactgcagccttcattttcattcaaagatttaaaagtttccataaagtaaaatgttcttctccggccacctgttttcatagttctgtgttttccttcaggcctttctggcttcctatatggcagtaagaaaatgatgtgcttaatgattacaaatttcatatggaatacgaactttcagtttgtacatatgatgcacagagatgcttttgtggttttattggttttcatattacaaacaaagaaactagaaaatgaaaccattccaaaagtggaagtaatttctcactgcccctgtgataaactgtggtcactggctgtggcagcaactattataagatgctctgaaaactcttcagacactgaggggcaccagaggagcagactacaagaatggcacacgctatggaaaactcctggacaatcagtaaagagtaccatattgatgaagaagtgggctttgctctgccaaatccacaggaaaatctacctgatttttataatgactggatgttcattgctaaacatctgcctgatctcatagagtctggccagcttcgagaaagagttgagaagttaaacatgctcagcattgatcatctcacagaccacaagtcacagcgccttgcacgtctagttctgggatgcatcaccatggcatatgtgtggggcaaaggtcatggagatgtccgtaaggtcttgccaagaaatattgctgttccttactgccaactctccaagaaactggaactgcctcctattttggtttatgcagactgtgtcttggcaaactggaagaaaaaggatcctaataagcccctgacttatgagaacatggacgttttgttctcatttcgtgatggagactgcagtaaaggattcttcctggtctctctattggtggaaatagcagctgcttctgcaatcaaagtacgtctatcctcacttcaaaatttatatgtcaatttacgtaagcagagcaatcacttcggagcctaaactatactaagcatgagttaactttatccttaacaagtacaacatgggatcatttaattgggggtaaaggatcaattatttatttttgtgtattacctaaaatataaaatctcagagccatatacttaaaatccaacttgaaacctctgtaggagataaaaattttcaataaaatctggctttggaactata

SEQ ID NO: 60124 - DNA, 2328 bp, Homo sapiens
tgagaagggcaaatgctatcattggaaaaactgacaaaagtcccaataggaaaaataaggaagtggagagttactatgtttctaatttttcatgtgcttctatttttttcctacttcagagccattgactaatagttgagtataacacaggttgtgtttccgggctgctgaaacatgacactaatattttcaaagaactgtggaagcctaaaaggaagccaatgagaaataactaaatgagagtttaggactgcagccttcattttcattcaaagatttaaaagtttccataaagtaaaatgttcttctccggccacctgttttcatagttctgtgttttccttcaggcctttctggcttcctatatggcagtaagaaaatgatgtgcttaatgattacaaatttcatatggaatacgaactttcagtttgtacatatgatgcacagagatgcttttgtggttttattggttttcatattacaaacaaagaaactagaaaatgaaaccattccaaaagtggaagtaatttctcactgcccctgtgataaactgtggtcactggctgtggcagcaactattataagatgctctgaaaactcttcagacactgaggggcaccagaggagcagactacaagaatggcacacgctatggaaaactcctggacaatcagtaaagagtaccatattgatgaagaagtgggctttgctctgccaaatccacaggaaaatctacctgatttttataatgactggatgttcattgctaaacatctgcctgatctcatagagtctggccagcttcgagaaagagttgagaagttaaacatgctcagcattgatcatctcacagaccacaagtcacagcgccttgcacgtctagttctgggatgcatcaccatggcatatgtgtggggcaaaggtcatggagatgtccgtaaggtcttgccaagaaatattgctgttccttactgccaactctccaagaaactggaactgcctcctattttggtttatgcagactgtgtcttggcaaactggaagaaaaaggatcctaataagcccctgacttatgagaacatggacgttttgttctcatttcgtgatggagactgcagtaaaggattcttcctggtctctctattggtggaaatagcagctgcttctgcaatcaaagtaattcctactgtattcaaggcaatgcaaatgcaagaacgggacactttgctaaaggcgctgttggaaatagcttcttgcttggagaaagcccttcaagtgtttcaccaaatccacgatcatgtgaacccaaaagcatttttcagtgttcttcgcatatatttgtctggctggaaaggcaacccccagctatcagacggtctggtgtatgaagggttctgggaagacccaaaggagtttgcagggggcagtgcaggccaaagcagcgtctttcagtgctttgacgtcctgctgggcatccagcagactgctggtggaggacatgctgctcagttcctccaggacatgagaagatatatgccaccagctcacaggaacttcctgtgctcattagagtcaaatccctcagtccgtgagtttgtcctttcaaaaggtgatgctggcctgcgggaagcttatgacgcctgtgtgaaagctctggtctccctgaggagctaccatctgcaaatcgtgactaagtacatcctgattcctgcaagccagcagccaaaggagaataagacctctgaagacccttcaaaactggaagccaaaggaactggaggcactgatttaatgaatttcctgaagactgtaagaagtacaactgagaaatcccttttgaaggaaggttaatgtaacccaacaagagcacattttatcatagcagagacatctgtatgcattcctgtcattacccattgtaacagagccacaaactaatactatgcaatgttttaccaataatgcaatacaaaagacctcaaaatacctgtgcatttcttgtaggaaaacaacaaaaggtaattatgtgtaattatactagaagttttgtaatctgtatcttatcattggaataaaatgacattcaataaataaaaatgcataagatatattctgtcggctgggcgcggtggctcacgcctgtaatcccagcactttgggaggccgaggcgggcggatcacaaggtcaggagatcgagaccatcttggctaacacggtgaaaccccgtctctactaaaaatacaaaaaattagccgggcgcggtggcgggcacctgtagtcccagctactcgggaggctgaggcaggagaatggcgtgaacctgggag

SEQ ID NO: 60125 - DNA, 1683 bp, Homo sapiens
tgagaagggcaaatgctatcattggaaaaactgacaaaagtcccaataggaaaaataaggaagtggagagttactatgtttctaatttttcatgtgcttctatttttttcctacttcagagccattgactaatagttgagtataacacaggttgtgtttccgggctgctgaaacatgacactaatattttcaaagaactgtggaagcctaaaaggaagccaatgagaaataactaaatgagagtttaggactgcagccttcattttcattcaaagatttaaaagtttccataaagtaaaatgttcttctccggccacctgttttcatagttctgtgttttccttcaggcctttctggcttcctatatggcagtaagaaaatgatgtgcttaatgattacaaatttcatatggaatacgaactttcagtttgtacatatgatgcacagagatgcttttgtggttttattggttttcatattacaaacaaagaaactagaaaatgaaaccattccaaaagtggaagtaatttctcactgcccctgtgataaactgtggtcactggctgtggcagcaactattataagatgctctgaaaactcttcagacactgaggggcaccagaggagcagactacaagaatggcacacgctatggaaaactcctggacaatcagtaaagagtaccatattgatgaagaagtgggctttgctctgccaaatccacaggaaaatctacctgatttttataatgactggatgttcattgctaaacatctgcctgatctcatagagtctggccagcttcgagaaagagttgagaagttaaacatgctcagcattgatcatctcacagaccacaagtcacagcgccttgcacgtctagttctgggatgcatcaccatggcatatgtgtggggcaaaggtcatggagatgtccgtaaggtcttgccaagaaatattgctgttccttactgccaactctccaagaaactggaactgcctcctattttggtttatgcagactgtgtcttggcaaactggaagaaaaaggatcctaataagcccctgacttatgagtccattgcttcatggctgctttcataaggcccctgacttatgagaacatggacgttttgttctcatttcgtgatggagactgcagtaaaggattcttcctggtctctctattggtggaaatagcagctgcttctgcaatcaaagtaattcctactgtattcaaggcaatgcaaatgcaagaacgggacactttgctaaaggcgctgttggaaatagcttcttgcttggagaaagcccttcaagtgtttcaccaaatccacggcaagtgttgtgtgcagtgcaatagtctaggctgacaagtcaaatgttccaggtgtagaatagttgaaaaaagggaagcaaaaagcaactatcacttagtatgttttcactttaggtattttatcttactaaaccattccactttctatgtggtaggtttcattatctccattttataagtaaagtcatctaaattcagaaagacagggtaaatgacttcagattccacaggcggtgaagccagagttccaagctgggtctatttaacactaaggaacttccttgcctcccgctaaaaaccttagagaaactttccacatgggagggtggttttaagtcccgaaa

SEQ ID NO: 60126 - DNA, 1195 bp, Homo sapiens
tgagaagggcaaatgctatcattggaaaaactgacaaaagtcccaataggaaaaataaggaagtggagagttactatgtttctaatttttcatgtgcttctatttttttcctacttcagagccattgactaatagttgagtataacacaggttgtgtttccgggctgctgaaacatgacactaatattttcaaagaactgtggaagcctaaaaggaagccaatgagaaataactaaatgagagtttaggactgcagccttcattttcattcaaagatttaaaagtttccataaagtaaaatgttcttctccggccacctgttttcatagttctgtgttttccttcaggcctttctggcttcctatatggcagtaagaaaatgatgtgcttaatgattacaaatttcatatggaatacgaactttcagtttgtacatatgatgcacagagatgcttttgtggttttattggttttcatattacaaacaaagaaactagaaaatgaaaccattccaaaagtggaagtaatttctcactgcccctgtgataaactgtggtcactggctgtggcagcaactattataagatgctctgaaaactcttcagacactgaggggcaccagaggagcagactacaagaatggcacacgctatggaaaactcctggacaatcagtaaagagtaccatattgatgaagaagtgggctttgctctgccaaatccacaggaaaatctacctgatttttataatgactggatgttcattgctaaacatctgcctgatctcatagagtctggccagcttcgagaaagagttgagaagttaaacatgctcagcattgatcatctcacagaccacaagtcacagcgccttgcacgtctagttctgggatgcatcaccatggcatatgtgtggggcaaaggtcatggagatgtccgtaaggtctacctggccaggtagacctaacccaaaattgcttaacaataccctaaatccattttgagttcagagcagaaatccgtgttccttccaatctgctcagataaccaggaaatgctgtacctgctgggtctgcacgtatagctcccgacacaactgctactccagccggcatgagtcacccaagcaggcatagcaacggagtactagtcaaaccacggatacagcggctcagcagattgcactcacgcacacc

SEQ ID NO: 60127 - DNA, 553 bp, Homo sapiens
ggcagctctggctacaagggaaaacacaggggaatccatccatccatccgtccatccagccatccacccacccacgcacccactcactcattctaggtgctgggaatatatgtggcagtggccgggacacatgaagttcctaaaatctcatggagcacatgttgtggggaagtgggaagtgaggatagccacgaggctggcacagagtgtacgatgttgagggtggcagccccacgaggagaggtgaggcaggcagatctgctgtggcgtgaatggagacataggagcaaaggctcaaatgggtggaggaaggagccaagttgctgtcccagcacagggaaaggccagggacagacccagagggggcagtacttgagaaaaggcaagagggaaaggtggctaaagtgggatcgaggagagagggagagtgaaaagggggctctcgagggaactgtgagcctctggagagtctacagaaggagagtaatgtgaactgatgttttcaaaggctcaactggctgggcatctttggatatgcaatagcccaggcctg

SEQ ID NO: 60128 - DNA, 187 bp, Homo sapiens
gaaccgcctctgtttccagagcaactggtcaaaacctctccaaatattgagcagttttgaaaactggattaggaaccactaatgaaaaagaacagactcagggacaagtgtttggcgggaatgtgtgaagaggtaactaatgagtgtcactgaattccactattaaacagatgaaacaaagcctttc

SEQ ID NO: 60129 - DNA, 448 bp, Homo sapiens
aaaaattagccaggcgtggtggcgcgtgcctgtaatcccagctactcaggaggctgaggcaggagaatcgcttaaacccggaaggcggaggttgcagtgagccgagattgcgccgttgcactctagcctgggcgacagagcgagactgtctcaaaaaaaactaaacaaaacaaaaaaagttattagattaaaagcctcttaactatgtgtttatgaaaactccacgatgatgggatatatagagattacatttttcagtttttataaaacttaactagaagttgtgtaaattcatttgagaatagaggggaaggattcttgaaagcagttaatgtaagtaaatgagccagataaaaatgattttaaagttaccattggtgttatttttccctcattattgcctgagtaatctctggttttctggacattaaaataataatagctaata

SEQ ID NO: 60130 - DNA, 309 bp, Homo sapiens
ggagcagatgccaatccctgcccctctgctctctcttaggagcctggctggacttggacctggtgggtcggggcatcatctgtcaaatgctgctgcagaggctttgcccgcatctgcacctccgctgatgtcacctggccagagtgcaggagctgggctgataggctgtcaaggcaacagatgattctcagagactatgaaagatcaagccatgctgtgtatctactttatcactaatggccttttggaaacagtcatttcattttcagtcatactttctttaaatttaataaaactattgcaaggaaa

SEQ ID NO: 60131 - DNA, 332 bp, Homo sapiens
gtgaaatggatggaaattcaataaatacaagaggagcactttactctggctgaaagattacactctgaaacgatacagtgaaggtactgaaaaatgaacattttttataatagctttggtactgtaaaaaaaaaacctacagattaaaaaaatgaggagactgagactggttttctcaatgaagaactgctattacaaatatgaacctcaagttcaagataaaagtgtgtagggttggtgggccttaaatttctcctttctgtaaggaattggctgtagcagggcaatttgttccttgtataacactgcagacataaggcgaatgcttctcc

SEQ ID NO: 60132 - DNA, 495 bp, Homo sapiens
ccgctgcagtgccgagcttccagggacgtgaagccggaaagccaggcgcccttcttgactgcgcctaggtggaactggccctccagcagcttgaacgtagcctcttttcacactggtagttcctgaacctcttgtgaaatgaaagatgttcctcattccaagctgaggacggagaaaagccgtaaagctgacactggtcttaagaccctcatttgagagatgccttccctgtacctggaggaaagaaacatctttatctctgaagacacagggccacagagaagagtctgaacaaacaggctttaccaatttcccccagttgttaccgttagatcagacctttgtccagtcatatccttccacaagttgtccactcatcaaccctaagcataaaaatgcacaagtttccttgtttgtttgggtcttcatttccaagggctcctatgtcatgttaaacttttaaataaatttgcatgcttttctcttgtgaaaaaa

SEQ ID NO: 60133 - DNA, 486 bp, Homo sapiens
cccgcgggttgtggtcggagcgctggcgggggcgggatcgtgacgttaagggcggtgcccagtcagcgaggagctagaatgacttgtcagccacctttgagcaagaacttgcctggagtccaaatgtatggctattgaaggatagtaagcagacagcactaaaagtcatccattcgttatggatttagtcttaagaccctcatttgagagatgccttccctgtacctggaggaaagaaacatctttatctctgaagacacagggccacagagaagagtctgaacaaacaggctttaccaatttcccccagttgttaccgttagatcagacctttgtccagtcatatccttccacaagttgtccactcatcaaccctaagcataaaaatgcacaagtttccttgtttgtttgggtcttcatttccaagggctcctatgtcatgttaaacttttaaataaatttgcatgcttttctcttgtgaaaaaa

SEQ ID NO: 60134 - DNA, 369 bp, Homo sapiens
cccgcgggttgtggtcggagcgctggcgggggcgggatcgtgacgttaagggcggtgcccagtcagcgaggtcttaagaccctcatttgagagatgccttccctgtacctggaggaaagaaacatctttatctctgaagacacagggccacagagaagagtctgaacaaacaggctttaccaatttcccccagttgttaccgttagatcagacctttgtccagtcatatccttccacaagttgtccactcatcaaccctaagcataaaaatgcacaagtttccttgtttgtttgggtcttcatttccaagggctcctatgtcatgttaaacttttaaataaatttgcatgcttttctcttgtgaaaaaa

SEQ ID NO: 60135 - DNA, 534 bp, Homo sapiens
ggactgtgagttaaactggcatcaggcttcggaaggcctcactgattacagcttttacagggtttgggggaacaatacggagaccttggtgtccaaggggaaagaggccaccctgaccaagcccatggtgggtccagaggatgcaggcagctaccgctgcgagctgggctctgtgaattccagcccagccacgatcatcaattttcacgtcacagtgttgcccaaaatgatcaaggaggaaaaaccttctccaaatatcgtaaccccgggggaggcgaccacggagtcgtccataagcctccagcctctgcagcccgagaaaatgctggcaagccgccttctggggctgctgatctgcggctccctagcactgataaccggccttacctttgcgatatttcgtcgaaggaaggtgatcgatttcatcaaatcctcactgtttggccttggcagtggagttgccgagcaaacccaggtcccaaaagaaaaggccacagattcgaggcaacaataaagatttatcttgttgtctaa

SEQ ID NO: 60136 - DNA, 288 bp, Homo sapiens
gaagatggaaatagaccaccatacaaaacaaaaaagacagaagagaatattagcactctgttgcaaaggagaataggtatgctcaactggtaagtagaatgcaaatattccaatatctgaaaaaaatcccaaatccaaaatacttctggttccatgcatttttgctaagggatactcaacaggtattttaaaagatcaaaatacagatcagagaatatggatactgaagattatgagcaaacgagaataagaaaacatgttggaggacttttaaaaatgtgtaaagga

SEQ ID NO: 60137 - DNA, 434 bp, Homo sapiens
aacttgagagctaatgggaacgtttatatcaacgtttagcaggagataatcctatcttctctttcaaactttagttttgtgccataaaaattgtattttttcctgagattaatttggccttatttcttagttcaagtagttttattattactacgtcgtagagtttatctgtggattagccatccgtatcttggattgacacattcaaaggagaagaactgcaaagctttcattaaaactcagtgtgtttcttgatagtatttctcacctgagagaccttgtgcaaagaaaactctctggtgttaaacattcttattacagatattttctctatatccttgacctgtgaatgtttaccttttaaaaaatatatgtatttattttatattgcattccagcctgggcaacagcagcaaaactcggtctccaaaaaa

SEQ ID NO: 60138 - DNA, 620 bp, Homo sapiens
agaatatagtgtattgttattaacaaggagtgcaaggagaaagactgggacacttggagcattccttgtttccatagccttattctgcatcttcaaaacatgttacttattagcacctattttttggtgcctatgggtgtccgccaaaatggaaaaaggcaagaattgattttttattggcacatgtgatccctcacatccatctatccctgttgccctcaatgcctgccatcacatgaactctggatggttcacacagctttgacttttaaagattacttcttcaacactgttgggagttactgtgcctaaaaattagagcttgtagaatgaattaaaatgcttattcagcttttttactgaagaccacctaaagacagagggtagttctgagctttctcagaaaaagtcagtctgtaaagagtaaaataagtaaatatttcttctaatgtccagacattgctgtataaccacagggataaacaaaaatcagagaatcatggcattattaagtgaaaaaaaaaggtgctagtgactatctccaaacaaatggagatgtaagaactgcccaacaaataattcaaaatctctattttaaagaaggtcagcacactgcaaaa

SEQ ID NO: 60139 - DNA, 499 bp, Homo sapiens
atttttagctgaattcatctctttggctggattttgtgaatcgggcagccattagaaccaaaacagttctgaggagctcccaggctgcaatgtggtgcgaaatgttttatggacagaaaatggaaatgaggtgcagaaattggaggctaagaataaacttgaagacaaagagtagattttggccagacactgatgctaaagtcaccccgatgctgtctttgcttctaagatgaaatttcagtctttattcaagatcaagtgcaactgtctctttgaggaaagtcctttgaccgccatttctccccttcagaaggcaaacacctgggggagaagatctgcttaaggacctggtaactgacaaagaatggaatgggagcgagaaccgcctagccatcccttctccttgcacagtcatgaaacaaaagttgaaaaggagcctggttttacttgaccagtcataaattaccataaaataaaatgagatattaggaacctttga

SEQ ID NO: 60140 - DNA, 242 bp, Homo sapiens
ttaaaacattctgatctagatatggacagaaaatggaaatgaggtgcagaaattggaggctaagaataaacttgaagacaaagagtagattttggccagacactgatgctaaagtcaccccgatgctgtctttgcttctaaggtataaattaccttattttaagcaactttttcaccttttcaactctatccctttcctcagcctctttcatatgtgaaataaaatattcacttactactga

SEQ ID NO: 60141 - DNA, 266 bp, Homo sapiens
aattgaaaaggcaataaggatttctacttctagtaatgacaggctaagctatttgaatcaactttccattcaaaagaactaaacatgctgaataagatattttttaaaaaatccttaaaagaacctaagaactgagatgatatcaaggaactagtaggataaaatctaagagaaggaatttctacttccagctttgatgagataacaggaatagaatttaccctccagccttaaacaactaaaaattgaataaaatatatgaaaat

SEQ ID NO: 60142 - DNA, 419 bp, Homo sapiens
gctacaatcataaagtttgtaagtgatctgctttatagaaatttaaatagagggtatccagggttagatgtggcataacatcatctcatcagcctctgacagacgtttgcccaggagagaacatggtggtgggaatcgatcagcaccttgggcaccatgggagtatggcccaagctggaacagaaccaggaatgcatgtggggggtggggtggggtaaagcatcaaggctcatgacttctgagcagagtctacaaacaggtcacatagaggcaggaagatccttagccatggagtcaggagacctgagtctgcccatgcccatgtgtgacttggataaatcccttgccaaccctggacttccagctcccacctgaatggtgaggggagggaggatgagctctctaagggcctcctgctc

SEQ ID NO: 60143 - DNA, 325 bp, Homo sapiens
ctgcaggggtccagccaggagatgggggcaacttggacagggacgatcctgggaagggcaggaggaggagtgagacctggcctgccctctccctagaggctcatcagctccctggagacagacacgccctggttcctttccctatgcctggagcctgggtaccagctattgaaaactgcttttctccttgttcattcaaacatattcacacataaaggttgtcattcctttttgtcactatttgacaaaaattggatcataccgtatacaattctctgctatttgttttgctcacctaacaataaatacactgtgaaaaatacct

SEQ ID NO: 60144 - DNA, 110 bp, Homo sapiens
atattattcagtcatgaaaaggaacgaaatactgatacatactacaatgtggatgaaccttgaaaaaaattatgtaagtgaaagaaaccagacgtaatagtctatattgt

SEQ ID NO: 60145 - DNA, 355 bp, Homo sapiens
gactctggctccaaaggagctccaggtactcttgcaaatggaaaggaaaccaacgggcctgcaacgtattaagctaggagagtggttggcagtgatggtggagaggtgggcagggtcccaatcgtggaggccccatggccatggaggggtctagatttcattccaagtccagtggggagcccctgaaggcttacggcaagggggtggggtgccatctgttccctgtggctgccatggaggaagtgggcacaaggaagggagagacaagtggaaaggctgcagtggaagctccaggtgacgcaggggtgaccagcgccactgctgcggcaggggggatggagaatcaggggctgac

SEQ ID NO: 60146 - DNA, 1031 bp, Homo sapiens
tcagatctgatgctaacggatggctaatgatggaggagcaacttcacttattttatgtacagaaaggaagatggttggtatctgtgcattaaaaatccaccaggataatctgaaagaaagatgggattcagcgtcttctgattattgaactgaccaagagttgactcaagctaccatgtgactcatgagttataaatttttttactattttattttttttcaggtatcctaagagaactgccaccattgaattgcatgggtagggggctgatttgcagctgagcaattttttcactgtggatgtaaattatggtgacacctgccaagacaaatacctggatataatgggaaaaagaatgctgctatacttgcccaatatttcagagcttgatttgcttcttcaaatatacaggctgcgaatgtggagaaatatttataagaaaagtttttacacagcttgcatgaccccaaaggagtgatacagaggccacataacactaatgattatcttttgaagctctccagggtcacctcatggcacaatcagactgagctgtacttaaggatcgaatatccctgattgactgttacatggcatacacaaaattttatgtgcacatggcatattcaaattgtcctgaaaccaaggatatataatgtcaacagtacatggctggtcccattgtgctaaaattttaaagctagtctcaggtgaccatgtccagaaaaaattacatccctggagactagtcattataattaaagataacttattaatcaaatagggacactccatagcagggaggtaattttttattatgcaaacaaatatttatcacatatttactatgtacttggcgttgcagaagatgttggggtggcaaagccattgttacagaagctgtgatgtccctcccacatcctcaggccaaccaccaagctcgtgacattcattggatctttccaggatattggctactgctggaagtcagcttggtatggtaataaaaaaatttaaaaggattggatgt

SEQ ID NO: 60147 - DNA, 3139 bp, Homo sapiens
cttggcacgaggactttatggagtcctgaagatacacagccaccactcctaaaggcaaagaaagaaaacacgaatgtaggtcagggatagagtggaaccctggtcatcggggtttttagcctcatcgtgggaaaggtggtaaaggaggatgatggcatctccatccctagaggccaagaattgaaatatcattgtcaaggattagaaacaattcagcaaagaggccacaaaaagggcctgctgactcccagaagacctctttaaaccccaggggaggcaaatacttgctgatggagtctgggccgtttccatattttaaagaagacctgcctctggggcaaatgtcagcacagagaggactgggaggagaatggaggcaagaaaagggcatattttgactccctctgtgcctcttcccagttcatggaaggatgtgttcagcttacccacccacagtgaccagtgtggtggagccgctgacatctcaaggatctatttgggaaggtgagaagagtactcattccatctgggggtgttgttccagccacatcagcctacctggtgggatgtgggggtgtctgccaccctgtcccccctctgctgatgtccctcccctcaggctgtccaggtgccacctgacacaggctgctgtgcaaagacaggcggggaagcccaaacctcactcccagggaggccctcagccgccagagtccaggttctccagaggctacgatttgaggaggttgagggggaagacaggagggaaagaaaagtcctacaactgtcaggaatggggcacctttccctgtccctaagcaaagctccctcttcccactgccctccccagccccagctccctgtcctccccaacacctagtgagaaagacggtgcgtggaagggagtcccatgggcagatgcttacacgacctctttgtgaagcctcttctgggtttaacttcattcatcaatttattcttatgtcaaagcaatgaaacttttctttctggagccagataccaatacaacaggtgaacgggtttctgccacatctctacattgacgggggatgcttgaacaacccccctcactacacagacacacaccgttaaggcacaagggctggggttgagctctagatgagggactttcctgctcctgcaagggtgagcactgtatacacagacaaggagggtgcagtagagtgactcccttggatggaagtagtaccatcagaacctactattattatgacataaattctatttacatacattgagagaatactacaatcaacactttttcctgggatgactttaagaggtttgagccacagcacctgaagtggcaaagatccatggtctttgtagggtattagagaactcttccagtcacctctgaaagcactctagatcttgcagctgagtggatgaagtgtaacaaatctgttgcacgctgagaggagtcagaattagcatttttcatgaaagttccccacgtctctactaagaatgaggaagaaaagactaagactaggtaattacacagaggcttgaaatgttacatcaccagagccaagtcctctcccttcagatcagttactggctgctacacagggacacccccaccttttcagggcatcccatgcactccacttctcaggatctaaggaatttgactttgtagggatcccagaaagggcactgtgccacttcccctggtgtgaatcagacatacattgtacattcatttctaaaattcactcatgcacctcaaaccaaggtcattatccaaaaaaaaaaaaaaaagagctctgggtggaagagtttgtaagttttaagagagggtcatttctatgtgaggaaatgcagaaatggacagaatgattcttattcactgtttgggtctggagaattcccattgtggaaatcttagagatctcaagtttattaccaagggaataaggaaaaaaaggtgagcaggcaccaggccaagcagtggctcccttgccaaggaacctgaggctgcaggtttcagggacccccttgaagaaacctctcctggccattggccagagaaaagagaagtctctcctgtagagtcacaagagaagcaaaagagggtgggtcactgggtcctggacatagcccccaaccccaagacttcccaatatggagaaactacaccaatgtttaaaaggggaaaaggaaagaacttgtacatcaagggaagatgatttgtaaacacacagtcctgtgcagaaagatccccttcaggaggtgtctccagcatcccaaagctgtgcgcaccttctcttttcctgcctcaggccacctatgcatccagctgcagcccatccccacacctgaaatccatctcttgaatcccagccaggttatataccaccccattgccatgtcctgtcctggccagaatgcatgctgttcccccaagcctcgtgggagtgaggccatgggaaacagagatgagcatgtctggacaagtctgtgatggtagtggatgagaataacccatggcaaaacacgcacattcattaagaaatagggcgacagattccccgttggtgaagcactgaaaggtctattactctcataatattgctgttttattttaatccaccagagctaccatgcaaaactttcctcctgtgaaacgctccagataaagctcctctaatctccccttccctcatgtcctccagctcaaacccaccttcatcccccaaaccaatctgtatcatgcctgttatcagagaggcacagaaagatgggcagtgcctccgttgtcaccattccccacacccctacacacccccacaccctcccctccaggctccacgacttcacagtcttactgttgtaaatatcattgtacagtttgtaatcctcaaataatcccattgtcagaggcctcgcctgatgggccttctcaccctcgagaaaggccagggaatctagaaggggcaacccttcaaggagagcttcagggtcatctctgtgtgagacactattgtatattcctgtaagattgcatttttatctaaggaatgatgttatttaaaaaacaaacaaaaaacacaaaaaataagaattgcaaataaatttcttaacaatgtctaca

SEQ ID NO: 60148 - DNA, 471 bp, Homo sapiens
gtggtcacagcaggcctccgagagagcccagcaactctcatctcctccctcctttctcctgcctccctcctttttttcttccttgcattctctcatgtaccagaattgggcagaacaggttgggttatgctgcagtaaccaaaagtccctggctgcagttgcttaacagagtaaagatttggccaggtgcggtggctcacacttaaaatcccagcactttgcgaggttgaggtggaagtatcactggaggccacgagtttgagaccagcccgggcaacacagtgtgagacccttgtctctacaaaaagttaagaaattagctgggtgtggtggtgcacctgtaatctcataatcccagttacttgggaggctgaggcaggaggataacttaagcatgggaggtcgaggcttctgaactgagctatggtcgtacctctgcacttcagcctcggcgacacaaaacctgtctca

SEQ ID NO: 60149 - DNA, 321 bp, Homo sapiens
tggggtcttcatagggcagatctccaccatgtcatgcagagatgcagtgctgtcttctgatcaggaattatgctcttccacggcactctggctcattccacagtcaataatgttaaatggagtgaaaatgtaggtcagtggagctaacttggaagtctccaggacaactcttcctccaaatccattggaaaacatgaagcaacaggcagaaatgccaaggatttgactgctaaataccagataagtaagctgctcccccaaaaagtcttcagcatactaagcaagtcgtttactggaagaaatttaaaccttttttaaagc

SEQ ID NO: 60150 - DNA, 347 bp, Homo sapiens
tctaatttccaaccttctgatgcatttccacgatagctaaatctcttgcatcactaatggacaaataataccgctggcctgcgctggggttttggaaagaggttttcctagaatttgatgtgaattcagctactctcttgaaggatatgtttgcttggtacaggaaagatttcccttggcccagccagaaaagtcctgtctgatgagattcagcctaacttccctgcaggaggatgtgctctgtttctttctggggcaactgggatgccagctccctggcagaagttcagagttcagaggccccaaagcccctaactgaattaagtaaagaacctgggctagtgcag

SEQ ID NO: 60151 - DNA, 349 bp, Homo sapiens
catagcccccagtcatcttgacctttaaagttagatactgtgaacatttatggcaaaatgttgatggtgattgaaactgggtgaagggtgctgtagatctgttgtatgtctctacttttgtgcagagaattctgtggaaatgctcacaatacactttgaaaatagaagaaagatccctttaaagtttgagttattcctaaagattttcagcttggtacatgctgccatgcctttcctagatttcctgtggtagatgatttggaagtgttttattttaatcaggtagtgtattttgactcatgagttttaattttagcatatcaaaagtatttttagaagttttaaaata

SEQ ID NO: 60152 - DNA, 885 bp, Homo sapiens
tgaaatgaattgaggtaaaataaccgtttcaggtccatcccttacatggcaaagtaaaaagctggagtcagtacacagtgttggggtgggggcagcgtttgggggcgacgagttttgtgcaccgcgctggagtaccctgcacataaggtccgctcatgggcttctcagtacggactcgccggcgggaacaattaattgagcaaagcgcccctttctgggctggagcaaggttcgcggctgcagatatctcaagctgaaggcaagagcccaggcgaggcgcaggcaggccacgtggctgttccctgctgagactcgcagctttggtcttggaaacctcagggtgtggagctgcttgggccgactgaagggttcagctttttgggagaagtgagggcgagtgttatttctccagcgaggtgtaaacaagactgtgctttcatgggagggacaaattgcagagttgatcccttaccatttttacagaaatactcagaaagtgactacagcttgtcaactggcctgtttagtgagccgctgccttactgtaaaattgtctgaaaatcagattcgacttgacctccacttaatttcagtagcactctagcagttctcaaaacagtcacccctgcacccttgcgtttgcatcttccgctacaggattttatctcttggaagcgcttagagaatgcggcagaaattctgccccactctccaccaagtgttctttttgtaaatctgaatttacagtattctgcaattcttatttagaacgtggctgcagaaatctcgaaaccttttccacttcagctatttttttaaagataaatcttatttttgttttgttctttttttctcttttctcaaaaataaataaagagatcgaat

SEQ ID NO: 60153 - DNA, 415 bp, Homo sapiens
gatagatagatagatagacaccatggaatactactcagtcataatggcatttgcagcaacctagatggaattggagaccattattctaagtgaagtaactcaggaatggaaaaccaaagatcatatgttctcgttcataagtgggagctaagctatgagaatgcaaaagcataggaatgatacaatggactttggtgactcaggggaaagtgtgggagtggggtgagggatcaaagacggcacattgggtagagtggacactgctcgggtgatgggtgcaccaaaatctcagaaatcaccactaaagaacttatccatgtaaccaaacaccacctgctcaccaatagttattgaaataaaataaataaaccatacctgattgagggcacctgctttaaatcatcttcccaaacat

SEQ ID NO: 60154 - DNA, 351 bp, Homo sapiens
tccatttcatttcccctggaaacattttatattagatttgacaacttggttataatagagcataaagtacatcttaagtaggagatcatggccattatataaaaaataaattataaaatgcagtaccgattaaagggagaaacagcaaataaataaaagcataactaatgtacttttagtgttagctaggaatcattcatacacacactactacattgcttatctaaactgtattacattaatacaggcattgtgctaattacaggaatcatatcattacaaccttataatagagatgctaaatattattacaattttacagacaggaaactggggcataataaattaagt

SEQ ID NO: 60155 - DNA, 372 bp, Homo sapiens
cccatccctgtttaggtgctttgtcctccttgaggagcctccaatgctgctgctcctatacatgtcacaatttcagacccagcatgctaggaactgctgccagcgcctggttaagccaatactaaatggggccaaacaggtgaacagacattctgtctttctccaaacctctgaaaaagattctgcaactcatctcacagtaatttgttccctaatttactcttaggaaattgtcgttaaagtctgattaggttaagtccaattccctgtaattagatcctcagtgaagaaaaatctacccatcaccacaatttattttcttttctatagctccagcatcagtattgtaccattattttggcagctctggag

SEQ ID NO: 60156 - DNA, 415 bp, Homo sapiens
cctcccaggctcaagtaatcagcctctcgggtagctgagactatagtcacgttccaccatgcttggctaatttttttttatttattttttgtagaggtgggttctccctatgttgcccagggtagtctccaactctgggctcaagtgatcctccttaaaaaagtgttctttttttttgttttttgatttcaagatgcattttaattatttacataaattaattggttatctattttcttgaagtgtatttcaaagtcctacaaaacttaattgttgacctccttaaaatgtagttgagtatacttaaatttcctttgccaatctgaagtaaaactttaaattcaaaccctcaaagcaggtctttgcccttcctctaggaggttgggtcacggaattctgttttacgtcccttcat

SEQ ID NO: 60157 - DNA, 395 bp, Homo sapiens
gagagtctcagggctggcaacattcaccacaaactgactgaaggacccttgggccttgaatgaacatcagtgctagtacttgctgtgggcctagggccatgggggccatgggaacagactcctctgcttgcagaaaggggaaggaagagtgggaaggaatttggcttgcagcttggatgccagctcagctgaagtagaatagagcgctagatggattcctaaggtttccaactccaggccctagatcccaaatggcatctctgaatctgggaccaggagaaacttgctgctttgaaaggaaaaacacaagcctagctggattcactagctgctgactgtagagccttgagtgaacacacgcagtagccagacagtagttaacatgggccttgagc

SEQ ID NO: 60158 - DNA, 315 bp, Homo sapiens
gtctcttcatgcccaagagcacatcagagaaatggagagtgctcctgaatccgaaagggtcacacagacaagagtgaagaatgtctcaataaataccagtgtggaagaatgatcttgaggaccacatccttcactctctctccttcccccctccctttctgcacatcttgcatctcagaagccccctcccggaaactagatacaactccaggggaaggtgaggttgaaatccacaagttcactgagataaagtttctgacaatgcaaagaaagggaggcttgaaatcaaaattagtttctatttcttacataaat

SEQ ID NO: 60159 - DNA, 1871 bp, Homo sapiens
ccgtccccggcggccccatgccccgatgccccgcgggggccatggacgaggggcccgtggacctgcgcacccggcccaaggccgccggactcccgggcgccgcgctgccgctccgcaagcgcccgctgcgcgcgccctccccggagcccgccgctccccgcggcgctgcgggccttgtcgtccccctggaccctctgcgcggcggctgcgacctgccggcggtccccgggcccccccacggcctggcccggccggaggcgctttactaccccggagccttactgcctttgtaccccactcgggccatgggctccccgtttcctctggtgaacctgcctacacccctataccccatgatgtgccccatggaacaccccctttctgctgacatcgccatggccacccgtgcagatgaggacggagacacgcctctccatattgctgtggtgcagggtaacctgccagctgtgcaccggctggtcaacctcttccagcaggggggccgggagctcgacatctacaacaacctacggcagacaccgctccacctggctgtgatcaccacattaccgtctgtggtccggctcctggtgacagctggtgccagccccatggcgctggaccgccatggccagacggccgctcacctggcgtgcgagcaccgcagcccgacctgcctgcgagccctgctggacagcgcagctccgggcacgttggacctggaggcccgcaattatgacgggctcaccgccctgcacgtggcagtgaacaccgagtgccaagaaaccgtgcagctcttgctagagcgcggtgccgacatcgacgcagtggacattaagagcggccgctccccgctcatccacgccgtggaaaacaacagccttagcatggtgcagctgctgctgcagcacggcgccaacgtgaacgcgcaaatgtactccggcagctccgccctgcactcagcgtccggccgcgggctcctcccgctggtgcgcacgctggtccgcagcggcgctgacagcagcctcaagaactgccacaacgacacgccgctcatggtggcgcgcagccgcagggtgagccggggcagctgtggacatgccccttgcacacgtgtgtccgcgggctggttgcaggtcatcgacatcctgagggggaaggccacccggcctgcttccacctcccagccagacccctcccctgaccggagcgccaacacctcccccgagagcagcagccgcctcagctccaatggtcttctctccgcatcaccatcctcctcaccctcccagtctccccccagggacccccctggattccccatggctcctcccaatttcttccttccttccccatctccacccgcttcctgccctttgctggggtctccgaggccctggccggccggtgcccccctccccagctccaggaggcagctgagggggatgggggggcagatcttggactcatgaggaggggcccccctgcccagaggggtcaacccttctggaaactgtgaagatctgacttcgcccccccccccccccatcttcgggaccaggatttgcacagaagcacatgcacctacccatacaccccctcttctgagcgtccctgttcccccatctcgctccctcccaggactctgaccccagcattctcaggcaccagtccctgtccggaatgccacccacatcttccatttccatgtcccctcccagagctggtggacccagggaacagccactcccctccactctctaccagataactgaggaggggagaggtgggccgtaacgggcacggatcacgatgtaaattattaagcattttggttggatttcttttgtaataaactatttttgtaccat

SEQ ID NO: 60160 - DNA, 1228 bp, Homo sapiens
ccgtccccggcggccccatgccccgatgccccgcgggggccatggacgaggggcccgtggacctgcgcacccggcccaaggccgccggactcccgggcgccgcgctgccgctccgcaagcgcccgctgcgcgcgccctccccggagcccgccgctccccgcggcgctgcgggccttgtcgtccccctggaccctctgcgcggcggctgcgacctgccggcggtccccgggcccccccacggcctggcccggccggaggcgctttactaccccggagccttactgcctttgtaccccactcgggccatgggctccccgtttcctctggtgaacctgcctacacccctataccccatgatgtgccccatggaacaccccctttctgctgacatcgccatggccacccgtgcagatgaggacggagacacgcctctccatattgctgtggtgcagggtaacctgccagctgtgcaccggctggtcaacctcttccagcaggggggccgggagctcgacatctacaacaacctacggcagacaccgctccacctggctgtgatcaccacattaccgtctgtggtccggctcctggtgacagctggtgccagccccatggcgctggaccgccatggccagacggccgctcacctggcgtgcgagcaccgcagcccgacctgcctgcgagccctgctggacagcgcagctccgggcacgttggacctggaggcccgcaattatgacgggctcaccgccctgcacgtggcagtgaacaccgagtgccaagaaaccgtgcagctcttgctagagcgcggtgccgacatcgacgcagtggacattaagagcggccgctccccgctcatccacgccgtggaaaacaacagccttagcatggtgcagctgctgctgcagcacggcgccaacgtgaacgcgcaaatgtactccggcagctccgccctgcactcagcgtccggccgcgggctcctcccgctggtgcgcacgctggtccgcagcggcgctgacagcagcctcaagaactgccacaacgacacgccgctcatggtggcgcgcagccgcagggtgagccggggcagctgtggacatgccccttgcacacgtgtgtccgcgggctggttgcaggcgagtgtgccagagcgcagaggagtgagggtgtctgtgccgttgcgtggaggggagtgggtgagcctctgaaagcgcgggtgtgagttcca

SEQ ID NO: 60161 - DNA, 518 bp, Homo sapiens
cggccgctccccgctcatccacgccgtggaaaacaacagccttagcatggtgcagctgctgctgcaggtgcgtacagcccccctgagcctcgcgcccaccctatcctctgaccccaacccggctctggcctcagcccctagctctgaccccgccttccacttctggctccggctcctgctccgcgtccagctctgatcctttaaggcctagttttctcgaccctcgggctccacgcccctggctacgaacttgtcccattcctcctctgccacctcaacggcctaggccccgccctgcgatggcctggctgaccccgccttccagctaggccctgtccacgcattgtccttcccccctccagctcccccgactccttggggcgcgggcctcggtgtccagctccggttaattcatcgccgccaacgcagtcccgcttggcctgcccttggctctcgctcctaccttcctgtgaccccaccccgatccggtgccgccccacgtgccggccacccacccg

SEQ ID NO: 60162 - DNA, 1811 bp, Homo sapiens
ccgtccccggcggccccatgccccgatgccccgcgggggccatggacgaggggcccgtggacctgcgcacccggcccaaggccgccggactcccgggcgccgcgctgccgctccgcaagcgcccgctgcgcgcgccctccccggagcccgccgctccccgcggcgctgcgggccttgtcgtccccctggaccctctgcgcggcggctgcgacctgccggcggtccccgggcccccccacggcctggcccggccggaggcgctttactaccccggagccttactgcctttgtaccccactcgggccatgggctccccgtttcctctggtgaacctgcctacacccctataccccatgatgtgccccatggaacaccccctttctgctgacatcgccatggccacccgtgcagatgaggacggagacacgcctctccatattgctgtggtgcagggtaacctgccagctgtgcaccggctggtcaacctcttccagcaggggggccgggagctcgacatctacaacaacctacggcagacaccgctccacctggctgtgatcaccacattaccgtctgtggtccggctcctggtgacagctggtgccagccccatggcgctggaccgccatggccagacggccgctcacctggcgtgcgagcaccgcagcccgacctgcctgcgagccctgctggacagcgcagctccgggcacgttggacctggaggcccgcaattatgacgggctcaccgccctgcacgtggcagtgaacaccgagtgccaagaaaccgtgcagctcttgctagagcgcggtgccgacatcgacgcagtggacattaagagcggccgctccccgctcatccacgccgtggaaaacaacagccttagcatggtgcagctgctgctgcagcacggcgccaacgtgaacgcgcaaatgtactccggcagctccgccctgcactcagcgtccggccgcgggctcctcccgctggtgcgcacgctggtccgcagcggcgctgacagcagcctcaagaactgccacaacgacacgccgctcatggtggcgcgcagccgcagggtcatcgacatcctgagggggaaggccacccggcctgcttccacctcccagccagacccctcccctgaccggagcgccaacacctcccccgagagcagcagccgcctcagctccaatggtcttctctccgcatcaccatcctcctcaccctcccagtctccccccagggacccccctggattccccatggctcctcccaatttcttccttccttccccatctccacccgcttcctgccctttgctggggtctccgaggccctggccggccggtgcccccctccccagctccaggaggcagctgagggggatgggggggcagatcttggactcatgaggaggggcccccctgcccagaggggtcaacccttctggaaactgtgaagatctgacttcgcccccccccccccccatcttcgggaccaggatttgcacagaagcacatgcacctacccatacaccccctcttctgagcgtccctgttcccccatctcgctccctcccaggactctgaccccagcattctcaggcaccagtccctgtccggaatgccacccacatcttccatttccatgtcccctcccagagctggtggacccagggaacagccactcccctccactctctaccagataactgaggaggggagaggtgggccgtaacgggcacggatcacgatgtaaattattaagcattttggttggatttcttttgtaataaactatttttgtaccat

SEQ ID NO: 60163 - DNA, 495 bp, Homo sapiens
taaacaaatctcagattttcaaatcaaacttactgtataattttcagattattgttaaagcagttctgttgtccaaaaaaaatttggggtttaaggaagtatctccagaagtaaagagaatcactatatctgggaagaatctggctttatgttagagcttgctactttctggaatgttcagggagaaacaagaatttttgttcagtacaaaggaaagtacaagagagaccctcacagataatctctctgagacagtaacttcaaagagataacaatacattatcctgggagattcctggaactagggattagccctgctggcttctagccagggctgccatacatgagctcacccaggctccttggccatgagacagagttcttctaaatggtctctagaaggtcctttccagtactaggactataggaggagcatgtggcttttaataaagtgatgttgaaatgtgcctcatgattggcatgtgaaaagctaaa

SEQ ID NO: 60164 - DNA, 439 bp, Homo sapiens
gtgcattgttgagactgtaactcctttacttgaaccccactcacaggaggggttgcctctcatacatgaagccaggactcgtgtgaaactgtgaaactcatttctgtacattcccaagtgtgtgattgggaaatatacctttgcccagaacctgagtgatctgactgtttcctaggcccagcccacacataaaattgtgacatatacctgggccacccacctaagtaacgtgaaactccttcctgggccctgcctgccaagggcatttttacatttcactgtgaccagcatccacccaggtgctgtgactcccctgcctggtacctgcctacaaagagcattgtgacttatttctgggttcattatgtaggtgatgtgacttcattctactgccttggctctgtgcttagagtgcattgtgacatttagctgggtactg

SEQ ID NO: 60165 - DNA, 445 bp, Homo sapiens
tcacagttaatacactttgggtttcatattacactcccagtgcctttaagcacttatggtgagcataatacttattattttccacctcagttctagtgtcagagccagcacatatacaaacaaacaaacaaacgaaacctaactgtatgtatgtagtctaatggccgctcaaatatctgaaagggcagatatggatttgaagtctcacacataaggaaacatttattgagtgcttctggtggccaacattttacataggttatttcattttatcctcataagcaccctctgagatagttacagaaagagccagacttagtgaacaaatgaagttgagttttacagtgctattaactagctaaggtcatacaaatagtaactggagctaagatttgaaacccctgtccatctcattgcaagttcatattattttcattaatgatgc

SEQ ID NO: 60166 - DNA, 469 bp, Homo sapiens
ttggaaaagacctttcaatttattatggagctctggatcttcctttaggaaatgtgtaggaggagttggggtggttttagtctccatccttccctgtgggtttcacttttttccaacgaccctattttcataaagagggagctgctgcctaggatggattagaagtcatgctcatgaatagggaaagggctctcctcccttgtgcaccgttgtgaggctagtcctggagaagagtctgcctgagcctgtgacccagagcagttctcaaaggaaacagttccttggggcattgtttatggtcatgagagttggaggcaacctgggtatatccatccctgaggaaatggataaagtgtgatggaggcgcaccatgcagcaatgaactagaggtatgtacaggaacacagaccttagaaatgtaacatgaagcaaaaagtcaaaggaagatcctaagccgggttttacagcc

SEQ ID NO: 60167 - DNA, 427 bp, Homo sapiens
  misc_feature (37)..(37): n is a, c, g, or t
  misc_feature (41)..(41): n is a, c, g, or t
  misc_feature (57)..(58): n is a, c, g, or t
  misc_feature (65)..(65): n is a, c, g, or t
  misc_feature (71)..(71): n is a, c, g, or t
atggaaaaaaccatgcccttggaaaataggggccccnaaangatggataatccattnngccatgncatttnatccaatgataaataatggcccccctcatttattaaagccccccaatatggatcagatatagttccagagtccctttttttgtttttttttggttgttgttgttgttttgttttgttttgttttgttttttttgagactccgcctcaaaactaaactaaactaaactaacaagaaggatcttggcaacaagaaaaacaaggacagttcagaattcgagttgtcttaagaaatagaaaagctggccgagtgtagtagctcacacctgtaaccctaacctttgggaggccaaggtggatggatcacctgagctcagaagttcgataccagcctaggcaacatggcaaaaccccgtctt

SEQ ID NO: 60168 - DNA, 360 bp, Homo sapiens
gaagtgatttccaatttagaaaataggatttaaaaaaattatatttagtgagttataaccagaattacataagacagatatggaaattttataaacaaaatgcaaaatattctaatgtttcaatgttctacatgaacatatagggaagcatagacaatagccaaaaatatgttctgcattcatatactagttcaagtccgagtctggctactttctaggtagtgtgctttttgtcaaattataaagatatattccatttgttttttgaaaacgagtgagatgcttaaatagagtacaattatctcattcaaaatgtatgttgtttcctctcgagaattgtgaaggttctgagatttgatt

SEQ ID NO: 60169 - DNA, 531 bp, Homo sapiens
attaaaatcttgtcttatgaccctgacttttacactcaccatagtacatttaagccaatgaaactttaaagaagatggctcatttgcagacataaattggttctactgcctgcaactatttaggttttatgtccagtatggtaatttcaaggacagcaactgagaaaaatggaaagcatatctcttcatccagaagataaaaagaacagaccattaaaaaagaaaggtgaagagtcttttattgttaagctgtagatttttaacccaaactttatgtgagccccctgggaaaatgtgaaataccacattcttcatgtgtatagatactgtcgattgtcctcgttttataacattattgtctctctgacaggtgttatttgattcagatcagatcttgttaaaatgtatttcagagataatggtaagaaaatttttaaggaactttaggaaatattcaatccttgagatgataagccttagaagtgaacaaacagcaaacaaataaataaaaacatattttgtaactggatt

SEQ ID NO: 60170 - DNA, 298 bp, Homo sapiens
atttctaaaatgctctcaaatactaatattatacattctcccatttatcctcaaaaaacccatgagactggtgatgtaattactgtgttcatttcacagctgtggcagtcagtctaaagaccaagtgatttgctcaaagtcatggaacacttaaatggcagagctaaggcttaaacccagaatttaaaaattttttttagcttcttgttttttccattataccagtttggcccttcattttattcatgggttaaattaaattatggtaacaaagggcccctggtcactttggacattt

SEQ ID NO: 60171 - DNA, 189 bp, Homo sapiens
ctctcatacaaccctatacaataagcaccatactcatcaccactccacaggcaagggacataagctcagaaaggttaaatgatctgcccactttctaaatctcacaactagcaagccctgggggcagaatttacacccatttctgtctgagttcaaagttcacgcccaaaattgctataccatacagat

SEQ ID NO: 60172 - DNA, 233 bp, Homo sapiens
ttcccatcaacattttctcctggattatttttggcatatagaaaggaaattgttttttcatgttgatcttttttgcctctattctattatttttacctctcatttttgagtcatattttatcagttactacttctaaaactggaccaaatagtagtattgatgacaagtatttttgtctttttcttgtcattatgggaatgcttctggtgtttccctcttgaattctggatcc

SEQ ID NO: 60173 - DNA, 288 bp, Homo sapiens
gaaggagggagggaggtaagggaggaagggagggaaggaggaagaaggaaggaaggaaggaaggaaggagaaagaaagagaaagaagagaaagaaaaaaggagaaaaatgaaagattaacaaaacaagcaagtgaccaaagcaagcagggcagccagacctgatcaaattaactcctcagttttggtgacagtgactattcactgcttcccaatctccagccctcccttccttcttagtagcagaatcctagaaatgtgtctagctagaaaactattgtattagttag

SEQ ID NO: 60174 - DNA, 194 bp, Homo sapiens
ggaaggaacaattgataagaaccggggacatcagggagagagagtatttgagctgggcttgattccatcgggtagtatctggaaaaaaaaaaaaaatcccagatgaaagaatgtacaaagacatgagcatgcagggcacactttggaaaatgggagaagtctgacaggcctgggagaatgaagacaagttagca

SEQ ID NO: 60175 - DNA, 1168 bp, Homo sapiens
agcgggcgtcgtaagagaatgccaagcccggggagaaggcgttccgggcctcaactttggcgtcgtgagattcttgtgaggcgtctgcctggaagccggcagcaattttgcttctttaaagagaaaaagaaggctagggactcagattcctggattctgagatccagaccagctcctcccagacctctccagaagaagccatgggaacccctcgtatccagcatttgctgatcctcctggtcctaggagcctccctcctgacctcgggcctagagctgtattgtcaaaagggtctgtccatgactgtggaagcagatccagccaatatgtttaactggaccacagaggaagtggagacttgtgacaaaggggcactttgccaggaaaccatactaataattaaagcagggactgagacagccattttggccacgaagggctgcatcccggaaggggaggaggccataacaattgtccagcactcttcacctcccggcctgatcgtgacctcctacagtaactactgtgaggattccttctgtaatgacaaagacagcctgtctcagttttgggagttcagtgagaccacagcttccactgtgtcaacaaccctccattgtccaacctgtgtggctttggggacctgtttcagtgctccttctcttccctgtcccaatggtacaactcgatgctatcaaggaaaacttgagatcactggaggtggcattgagtcgtctgtggaggtcaaaggctgtacagccatgattggctgcaggctgatgtctggaatcttagcagtaggacccatgtttgtgagggaagcgtgcccacatcagctgctcactcaacctcgaaagactgaaaatggggccacctgtcttcccattcctgtttgggggttacagctactgctgccattgctgctgccatcatttattcacttttcctaagaaggcacttctgggcctgggtctgaggacatcttttttgactgggagccttcttactgttgaggttcaacaagctgaggagtagatgggaatttgagggagaatacagagatactatgaacgtatttgacatttttaatacaatttctgctataatttttgtatgcagtaggcgttactaataaacatttctgctgtgatttgtgtatgtttcaaca

SEQ ID NO: 60176 - DNA, 1253 bp, Homo sapiens
ataaagtacaaagttatttatggtcttcacacaaacaatccatacatgtggacaataattccacagcatcttccttccttcagaagcagaagtggaatcaatacaatgttataggatttactgcaaatcctgatttctactttggcgtcgtgagattcttgtgaggcgtctgcctggaagccggcagcaattttgcttctttaaagagaaaaagaaggctagggactcagattcctggattctgagatccagaccagctcctcccagacctctccagaagaagccatgggaacccctcgtatccagcatttgctgatcctcctggtcctaggagcctccctcctgacctcgggcctagagctgtattgtcaaaagggtctgtccatgactgtggaagcagatccagccaatatgtttaactggaccacagaggaagtggagacttgtgacaaaggggcactttgccaggaaaccatactaataattaaagcagggactgagacagccattttggccacgaagggctgcatcccggaaggggaggaggccataacaattgtccagcactcttcacctcccggcctgatcgtgacctcctacagtaactactgtgaggattccttctgtaatgacaaagacagcctgtctcagttttgggagttcagtgagaccacagcttccactgtgtcaacaaccctccattgtccaacctgtgtggctttggggacctgtttcagtgctccttctcttccctgtcccaatggtacaactcgatgctatcaaggaaaacttgagatcactggaggtggcattgagtcgtctgtggaggtcaaaggctgtacagccatgattggctgcaggctgatgtctggaatcttagcagtaggacccatgtttgtgagggaagcgtgcccacatcagctgctcactcaacctcgaaagactgaaaatggggccacctgtcttcccattcctgtttgggggttacagctactgctgccattgctgctgccatcatttattcacttttcctaagaaggcacttctgggcctgggtctgaggacatcttttttgactgggagccttcttactgttgaggttcaacaagctgaggagtagatgggaatttgagggagaatacagagatactatgaacgtatttgacatttttaatacaatttctgctataatttttgtatgcagtaggcgttactaataaacatttctgctgtgatttgtgtatgtttcaaca

SEQ ID NO: 60177 - DNA, 1082 bp, Homo sapiens
agcgggcgtcgtaagagaatgccaagcccggggagaaggcgttccgggcctcaactttggcgtcgtgagattcttatccagaccagctcctcccagacctctccagaagaagccatgggaacccctcgtatccagcatttgctgatcctcctggtcctaggagcctccctcctgacctcgggcctagagctgtattgtcaaaagggtctgtccatgactgtggaagcagatccagccaatatgtttaactggaccacagaggaagtggagacttgtgacaaaggggcactttgccaggaaaccatactaataattaaagcagggactgagacagccattttggccacgaagggctgcatcccggaaggggaggaggccataacaattgtccagcactcttcacctcccggcctgatcgtgacctcctacagtaactactgtgaggattccttctgtaatgacaaagacagcctgtctcagttttgggagttcagtgagaccacagcttccactgtgtcaacaaccctccattgtccaacctgtgtggctttggggacctgtttcagtgctccttctcttccctgtcccaatggtacaactcgatgctatcaaggaaaacttgagatcactggaggtggcattgagtcgtctgtggaggtcaaaggctgtacagccatgattggctgcaggctgatgtctggaatcttagcagtaggacccatgtttgtgagggaagcgtgcccacatcagctgctcactcaacctcgaaagactgaaaatggggccacctgtcttcccattcctgtttgggggttacagctactgctgccattgctgctgccatcatttattcacttttcctaagaaggcacttctgggcctgggtctgaggacatcttttttgactgggagccttcttactgttgaggttcaacaagctgaggagtagatgggaatttgagggagaatacagagatactatgaacgtatttgacatttttaatacaatttctgctataatttttgtatgcagtaggcgttactaataaacatttctgctgtgatttgtgtatgtttcaaca

SEQ ID NO: 60178 - DNA, 1260 bp, Homo sapiens
cgcgatctcggctcaccgcaagccccgcctcccggattcacgccattctcctgcctcagcctcctgagtagctgggactacaggcacctgctaccacacccggctaatttttttatatttttagtagagatggggtttcaccgtgttagccaggatggtcttgatctcctgacctcgtgatctgccctcctcggcctcccaaagtgctgggattacaggcgtgagcaaccgcgcccagccgagattgccccgtttttttcccactgtccaggaatcgatttaatttttacagttgtttactttctcacatttttactaagtccagaatatcatcaaactcacaaaaccactggtcaaaaaaacccaaatggccactaattaggcaatacagcacctgcctcaaatttgggttcatatagatttttttcctccctttttgtggagaacatagtcttgctgtgttgcccaggctagtcttgaactcctggactcaagcaatcctcccgcctctgcctccctaaattctgggattacaggcgtgagctgctgtgcccagctcatccagattcttgctggttctctttctcagcctaaatgtcttgtttgcgtggagaaattatcaaatgaagcaggagtgccaaacaagcctcataggctcttcaccctacaacatctatgttaggtagaaaagtatgtggatttttaaaaatcatctggtataaagagtttttaagaactatcttcatcatcttagtatcagattgtgcttgagaagttaggtacaatgtaatgtgattcattgctaaaaacaaaatgcctcccacaattgcagactcactcattttaccaaactatggaatttgtcaacaccttttcttgggaccaaggaagcaaagtcagtggataccgtgtcctgtagacatgtcacttgtgataaggcacggacaacatgaactggcaaaaacattggcatttggtcaaatgcttatgagctaaggatagaagggaaaaaatagttgtgtgaatgattttacctcttagttcttacgaaggatggttatcgggctggaaaaatgtttattggactgatgctttggagcctctcaatgaatgtaataaaaaaaatgtgtagtgagcacaaatgtatggatttgcagcacaatccaactttgaaaatgtgaaaataagtgagttagtgatatgtttggttggtgttaatttgagtcctaaataaaatcgagaactggtaaaagaaggtca

SEQ ID NO: 60179 - DNA, 746 bp, Homo sapiens
ggtaatcccagaatttagggaggcgtgagctgctgtgcccagctcatccagattcttgctggttctctttctcagcctaaatgtcttgtttgcgtggagaaattatcaaatgaagcaggagtgccaaacaagcctcataggctcttcaccctacaacatctatgttaggtagaaaagtatgtggatttttaaaaatcatctggtataaagagtttttaagaactatcttcatcatcttagtatcagattgtgcttgagaagttaggtacaatgtaatgtgattcattgctaaaaacaaaatgcctcccacaattgcagactcactcattttaccaaactatggaatttgtcaacaccttttcttgggaccaaggaagcaaagtcagtggataccgtgtcctgtagacatgtcacttgtgataaggcacggacaacatgaactggcaaaaacattggcatttggtcaaatgcttatgagctaaggatagaagggaaaaaatagttgtgtgaatgattttacctcttagttcttacgaaggatggttatcgggctggaaaaatgtttattggactgatgctttggagcctctcaatgaatgtaataaaaaaaatgtgtagtgagcacaaatgtatggatttgcagcacaatccaactttgaaaatgtgaaaataagtgagttagtgatatgtttggttggtgttaatttgagtcctaaataaaatcgagaactggtaaaagaaggtca

SEQ ID NO: 60180 - DNA, 344 bp, Homo sapiens
ctggctgttgtgcataggacctacaagtgggctggggttggtggttcacgcctgtaagcccaacactttgggaggctgaggtgggaggatcctttgagcccaggagtttgagaccagcttgggcaacatagtgagaccctgtctctaccaaaaaaaaaaaaaaaaaaaaaagacagatggagaaggatgggggtgtacactgtaggaaggagagcgatatttaatcagtaaccacttcctagggtattttaacatgccatcactaaatccccatgcacctccttccccagctccacgaccacgctgcactccagcctgggtgacagagcaaaaaaactccgtct

SEQ ID NO: 60181 - DNA, 2001 bp, Homo sapiens
aatcccacctacttgggaggttgaggcaggagaatcacttgaacccgggagtcagaggttgcagtgagccgggatcgtgccactgcactccagcctgggcaacagagcaagactctgcctcacaaaaaaattaataataataatgataataggccgggtgtggtggctcacacctgtaatcctagcattctgggaggacaaggcaagaggatcacttgagctcaggggcatgagctgtcacacccagtcaacatttttatcagtaattacaggtatggacttacagctccaaaaaattaaaaagaatgcagagaacagaaaataatagagctaaattttttttttaatttacaagccacgtatggtggctcacacctgtaatcccagcactttgggagggtgaggtggaagggccatttgaagcgaggagtttgagattagcctgggcagggagaccctgtctctacaaaaaaatttaaaaattagtgggctgtggcggcacgtgcctatagtcccagctacttaggaaactgaggtgggaggattggttgaggcttcaatgagccataattgcaccactgcactgcagcctgggcaacactctcaaaaagaaaatttacagaataagccaattcctggtagagagaagtattaagtttccatagagtttgaattaatatattttccttttattgccaggttgggtatctacagccattggttgctgttcaggtcagctttgctcctaacaacactgggaaagaagtaacagttgagtgcaagattgatggatcagccaacctaaaaagtcaggatgatcgtgacaagtttttgggacgagttatgttcaaaatcacagcacgtgcatagtatgagtaggatatctccacagagtaaatgttgtgttgtctgtcttcattttgtaacagctggaccttccattctagaattatgagaccaccttggagaaaggtgtgtggtacatgacattgggttacatcataacgtgcttccagatcatagtgttcagtgtcctctgaagtaactgcctgttgcctctgctgccctttgaaccagtgtacagtcgccagatagggaccggtgaacacctgattccaaacatgtaggatgggggtcttgtcctctttttatgtggtttaattgccaagtgtctaaagcttaatatgccgtgctatgtaaatattttatggatataacaactgtcatattttgatgtcaacagagttttagggataaaatggtacccggccaacatcaagtgactttatagctgcaagaaatgtggtatgtggagaagttctgtatgtgaggaaggaaaaaaagaaaataaaagtgtgtttgaaaaatattatcttgggttctttgtaaaatttattttttacatgctgaattagcctcgatctttttgattaagagcacaaacttttttttgtaaaacatgtaaaaaaaaaaactgggattaatttttagtgttggaactgcctcttattttaggctgtagataaaatagcatttttaggttagccagtgtgactatgcacctaattttttatgagattaaattcataagacttaatttgtacaatagtttgtgaaatatcttgttactgcttttatttagcagactgtggactgtaataaagtatataaattgtgaaatataaaaacttggaacttattcaaagcttcaaagcaaacaacagttttgtgtaagcattctttcccctccagtattaggtgtattcttggtaggattatttgtgataatttgggctacttggctgagaaagttgtgcttcccatatgatctgtgttgcttcttgttttttcttaaggctgttgtttattgttacttttctccttttttaaaaaaaaaaaaaggcagccgggcgcagtggctcacgcctgtagtcccagcactttgggaggccgaggcgggcggatcacaaggtcaagagatcgagaccatcctggccaaca

SEQ ID NO: 60182 - DNA, 955 bp, Homo sapiens
agaggaccaccctccataatgtgtgccatgtcctcctgacactctgagaactcaacatttcttttgaggcactcatgccagaatgcacaacctatatttaatcatgaaaaaccaccaaactccaactaatgaacataaaataagccataaaaggcccgtacttatttttgaagaaaacaaagacagtagtacagttaacaaaggaagttaacatatagtgctcttatgaatctgtagactttgttgaaaatccatcaattgttccagtaatactctttatagtgaaagacaagtgttttcctgatcccagatgtcacactgttaacacgtttagcaacctataatcaggaatatttcctcagtctgtttcatggctttgtactcttcaaaaataagtacgggccttttatggctgattttatgttcattagttggagtttggtggtttttcatgattaaatataggttgtgcattttggcatgagtgcctcaaaagaaatgttgagttctcagagtgtcaggagggacatggtatcatttcattccgttaatggtgatactgccttgattccttggttaaggtggtatgagcgaggtttctacaatatactttttttcctctgtcatcaataagtatcatgtggggagaaaattaaaaagctcgttactgcctggcactgtggctcacgcctgtaatcccagcactttgggaggctgagacaggcggatcacctgaggtggagagttcgagaccagcctgaccaacatggtgaaacgctgtctctactaaaaatacaaaaattagctgaccgtggtggcacactcctgtaatcccagctacccaggaggctgaggcaggagaatcacttgaaccaggaaggcagaggttgcagtgagccgagattgcaccattgcactccagcctggcaacagaatgcaatgtctcaaaaaaaaa

SEQ ID NO: 60183 - DNA, 1530 bp, Homo sapiens
agcggaagcggccgcccggcgcggcgcggcggagtcggctcgagtactccccgtaacgaggaggtgttctcggccgtcccacccttcactgccgtctccgggctgcgccgccggagccgggacgcgcctccgcagccctcgccgcctccatccccgcggccgcagctcctctcgccgtccgcgcgcacaccatgacgaagaacgagaagaagtccctcaaccagagcctggccgagtggaagctcttcatctacaacccgaccaccggagaattcctggggcgcaccgccaagagctggggtttgatcttgctcttctacctagttttttatgggttcctggctgcactcttctcattcacgatgtgggttatgcttcagactctcaacgatgaggttccaaaataccgtgaccagattcctagcccaggactcatggtttttccaaaaccagtgaccgcattggaatatacattcagtaggtctgatccaacttcgtatgcagggtacattgaagaccttaagaagtttctaaaaccatatactttagaagaacagaagaacctcacagtctgtcctgatggagcactttttgaacagaagggtccagtttatgttgcatgtcagtttcctatttcattacttcaagcatgcagtggtatgaatgatcctgattttggctattctcaaggaaacccttgtattcttgtgaaaatgaacagaataattggattaaagcctgaaggagtgccaaggatagattgtgtttcaaagaatgaagatataccaaatgtagcagtttatcctcataatggaatgatagacttaaaatatttcccatattatgggaaaaaactgcatgttgggtatctacagccattggttgctgttcaggtcagctttgctcctaacaacactgggaaagaagtaacagttgagtgcaagattgatggatcagccaacctaaaaagtcaggatgatcgtgacaagtttttgggacgagttatgttcaaaatcacagcacgtgcatagtatgagtaggatatctccacagagtaaatgttgtgttgtctgtcttcattttgtaacagctggaccttccattctagaattatgagaccaccttggagaaaggtgtgtggtacatgacattgggttacatcataacgtgcttccagatcatagtgttcagtgtcctctgaagtaactgcctgttgcctctgctgccctttgaaccagtgtacagtcgccagatagggaccggtgaacacctgattccaaacatgtaggatgggggtcttgtcctctttttatgtggtttaattgccaagtgtctaaagcttaatatgccgtgctatgtaaatattttatggatataacaactgtcatattttgatgtcaacagagttttagggataaaatggtacccggccaacatcaagtgactttatagctgcaagaaatgtggtatgtggagaagttctgtatgtgaggaaggaaaaaaagaaaataaaagtgtgtttgaaaaata

SEQ ID NO: 60184 - DNA, 2162 bp, Homo sapiens
agcggaagcggccgcccggcgcggcgcggcggagtcggctcgagtactccccgtaacgaggaggtgttctcggccgtcccacccttcactgccgtctccgggctgcgccgccggagccgggacgcgcctccgcagccctcgccgcctccatccccgcggccgcagctcctctcgccgtccgcgcgcacaccatgacgaagaacgagaagaagtccctcaaccagagcctggccgagtggaagctcttcatctacaacccgaccaccggagaattcctggggcgcaccgccaagagctggggtttgatcttgctcttctacctagttttttatgggttcctggctgcactcttctcattcacgatgtgggttatgcttcagactctcaacgatgaggttccaaaataccgtgaccagattcctagcccaggactcatggtttttccaaaaccagtgaccgcattggaatatacattcagtaggtctgatccaacttcgtatgcagggtacattgaagaccttaagaagtttctaaaaccatatactttagaagaacagaagaacctcacagtctgtcctgatggagcactttttgaacagaagggtccagtttatgttgcatgtcagtttcctatttcattacttcaagcatgcagtggtatgaatgatcctgattttggctattctcaaggaaacccttgtattcttgtgaaaatgaacagaataattggattaaagcctgaaggagtgccaaggatagattgtgtttcaaagaatgaagatataccaaatgtagcagtttatcctcataatggaatgatagacttaaaatatttcccatattatgggaaaaaactgcatgttgggtatctacagccattggttgctgttcaggtcagctttgctcctaacaacactgggaaagaagtaacagttgagtgcaagattgatggatcagccaacctaaaaagtcaggatgatcgtgacaagtttttgggacgagttatgttcaaaatcacagcacgtgcatagtatgagtaggatatctccacagagtaaatgttgtgttgtctgtcttcattttgtaacagctggaccttccattctagaattatgagaccaccttggagaaaggtgtgtggtacatgacattgggttacatcataacgtgcttccagatcatagtgttcagtgtcctctgaagtaactgcctgttgcctctgctgccctttgaaccagtgtacagtcgccagatagggaccggtgaacacctgattccaaacatgtaggatgggggtcttgtcctctttttatgtggtttaattgccaagtgtctaaagcttaatatgccgtgctatgtaaatattttatggatataacaactgtcatattttgatgtcaacagagttttagggataaaatggtacccggccaacatcaagtgactttatagctgcaagaaatgtggtatgtggagaagttctgtatgtgaggaaggaaaaaaagaaaataaaagtgtgtttgaaaaatattatcttgggttctttgtaaaatttattttttacatgctgaattagcctcgatctttttgattaagagcacaaacttttttttgtaaaacatgtaaaaaaaaaaactgggattaatttttagtgttggaactgcctcttattttaggctgtagataaaatagcatttttaggttagccagtgtgactatgcacctaattttttatgagattaaattcataagacttaatttgtacaatagtttgtgaaatatcttgttactgcttttatttagcagactgtggactgtaataaagtatataaattgtgaaatataaaaacttggaacttattcaaagcttcaaagcaaacaacagttttgtgtaagcattctttcccctccagtattaggtgtattcttggtaggattatttgtgataatttgggctacttggctgagaaagttgtgcttcccatatgatctgtgttgcttcttgttttttcttaaggctgttgtttattgttacttttctccttttttaaaaaaaaaaaaaggcagccgggcgcagtggctcacgcctgtagtcccagcactttgggaggccgaggcgggcggatcacaaggtcaagagatcgagaccatcctggccaaca

SEQ ID NO: 60185 - DNA, 2189 bp, Homo sapiens
agcggaagcggccgcccggcgcggcgcggcggagtcggctcgagtactccccgtaacgaggaggtgttctcggccgtcccacccttcactgccgtctccgggctgcgccgccggagccgggacgcgcctccgcagccctcgccgcctccatccccgcggccgcagctcctctcgccgtccgcgcgcacaccatgacgaagaacgagaagaagtccctcaaccagagcctggccgagtggaagctcttcatctacaacccgaccaccggagaattcctggggcgcaccgccaagagctggggtttgatcttgctcttctacctagttttttatgggttcctggctgcactcttctcattcacgatgtgggttatgcttcagactctcaacgatgaggttccaaaataccgtgaccagattcctagcccaggactcatggtttttccaaaaccagtgaccgcattggaatatacattcagtaggtctgatccaacttcgtatgcagggtacattgaagaccttaagaagtttctaaaaccatatactttagaagaacagaagaacctcacagtctgtcctgatggagcactttttgaacagaagggtccagtttatgttgcatgtcagtttcctatttcattacttcaagcatgcagtggtatgaatgatcctgattttggctattctcaaggaaacccttgtattcttgtgaaaatgaacagaataattggattaaagcctgaaggagtgccaaggatagattgtgtttcaaagaatgaagatataccaaatgtagcagtttatcctcataatggaatgatagacttaaaatatttcccatattatgggaaaaaactgcatgtaagtattgagaagttcttatgtggtgattactcttttgggaagctggagcatgtgttgacgtaccacttgtctggggtaggtagacgccagccctgtttaatttgtgggtcatctattcaggttttgttttattttaatggtgatggtaaatggagttcccacatttacaattcagaacacagaacccaagcagatacgttaaagttagatgattatttctaaaatatcattttctttttcattatagaggtagtagtaggtgcttatgtagagaaagtagaaaagtacttaaaaagaaaatcaaggccgggtgcggtggcttactcctgtaatcacagcactttgagaggccaaggcgggcgcattacctgaggtcaggagtttgagaccagcctggccaacttggcgaaaccccctctctactaaaaatacaaaaattagctgggcgtggtgacatgtgcgcctatagtcccagctacttaggaaactgaggtgggaggattggttgaggcttcaatgagccataattgcaccactgcactgcagcctgggcaacactctcaaaaagaaaatttacagaataagccaattcctggtagagagaagtattaagtttccatagagtttgaattaatatattttccttttattgccaggttgggtatctacagccattggttgctgttcaggtcagctttgctcctaacaacactgggaaagaagtaacagttgagtgcaagattgatggatcagccaacctaaaaagtcaggatgatcgtgacaagtttttgggacgagttatgttcaaaatcacagcacgtgcatagtatgagtaggatatctccacagagtaaatgttgtgttgtctgtcttcattttgtaacagctggaccttccattctagaattatgagaccaccttggagaaaggtgtgtggtacatgacattgggttacatcataacgtgcttccagatcatagtgttcagtgtcctctgaagtaactgcctgttgcctctgctgccctttgaaccagtgtacagtcgccagatagggaccggtgaacacctgattccaaacatgtaggatgggggtcttgtcctctttttatgtggtttaattgccaagtgtctaaagcttaatatgccgtgctatgtaaatattttatggatataacaactgtcatattttgatgtcaacagagttttagggataaaatggtacccggccaacatcaagtgactttatagctgcaagaaatgtggtatgtggagaagttctgtatgtgaggaaggaaaaaaagaaaataaaagtgtgtttgaaaaata

SEQ ID NO: 60186 - DNA, 1533 bp, Homo sapiens
agcggaagcggccgcccggcgcggcgcggcggagtcggctcgagtactccccgtaacgaggaggtgttctcggccgtcccacccttcactgccgtctccgggctgcgccgccggagccgggacgcgcctccgcagccctcgccgcctccatccccgcggccgcagctcctctcgccgtccgcgcgcacaccatgacgaagaacgagaagaagtccctcaaccagagcctggccgagtggaagctcttcatctacaacccgaccaccggagaattcctggggcgcaccgccaagagctggggtttgatcttgctcttctacctagttttttatgggttcctggctgcactcttctcattcacgatgtgggttatgcttcagactctcaacgatgaggttccaaaataccgtgaccagattcctagcccaggactcatggtttttccaaaaccagtgaccgcattggaatatacattcagtaggtctgatccaacttcgtatgcagggtacattgaagaccttaagaagtttctaaaaccatatactttagaagaacagaagaacctcacagtctgtcctgatggagcactttttgaacagaagggtccagtttatgttgcatgtcagtttcctatttcattacttcaagcatgcagtggtatgaatgatcctgattttggctattctcaaggaaacccttgtattcttgtgaaaatgaacagaataattggattaaagcctgaaggagtgccaaggatagattgtgtttcaaagaatgaagatataccaaatgtagcagtttatcctcataatggaatgatagacttaaaatatttcccatattatgggaaaaaactgcatgttgggtatctacagccattggttgctgttcaggtcagctttgctcctaacaacactgggaaagaagtaacagttgagtgcaagattgatggatcagccaacctaaaaagtcaggatgatcgtgacaagtttttgggacgagttatgttcaaaatcacagcacgtgcatagtatgagtaggatatctccacagagtaaatgttgtgttgtctgtcttcattttgtaacagctggaccttccattctagaattatgagaccaccttggagaaaggtgtgtggtacatgacattgggttacatcataacgtgcttccagatcatagtgttcagtgtcctctgaagtaactgcctgttgcctctgctgccctttgaaccagtgtacagtcgccagatagggaccggtgaacacctgattccaaacatgtaggatgggggtcttgtcctctttttatgtggtttaattgccaagtgtctaaagcttaatatgccgtgctatgtaaatattttatggatataacaactgtcatattttgatgtcaacagagttttagggataaaatggtacccggccaacatcaagtgactttatagctgcaagaaatgtggtatgtggagaagttctgtatgtgaggaaggatccaaagtcatttcattagtgtttttaacttttaa

SEQ ID NO: 60187 - DNA, 1479 bp, Homo sapiens
agcggaagcggccgcccggcgcggcgcggcggagtcggctcgagtactccccgtaacgaggaggtgttctcggccgtcccacccttcactgccgtctccgggctgcgccgccggagccgggacgcgcctccgcagccctcgccgcctccatccccgcggccgcagctcctctcgccgtccgcgcgcacaccatgacgaagaacgagaagaagtccctcaaccagagcctggccgagtggaagctcttcatctacaacccgaccaccggagaattcctggggcgcaccgccaagagctggggtttgatcttgctcttctacctagttttttatgggttcctggctgcactcttctcattcacgatgtgggttatgcttcagactctcaacgatgaggttccaaaataccgtgaccagattcctagcccaggactcatggtttttccaaaaccagtgaccgcattggaatatacattcagtaggtctgatccaacttcgtatgcagggtacattgaagaccttaagaagtttctaaaaccatatactttagaagaacagaagaacctcacagtctgtcctgatggagcactttttgaacagaagggtccagtttatgttgcatgtcagtttcctatttcattacttcaagcatgcagtggtatgaatgatcctgattttggctattctcaaggaaacccttgtattcttgtgaaaatgaacagaataattggattaaagcctgaaggagtgccaaggatagattgtgtttcaaagaatgaagatataccaaatgtagcagtttatcctcataatggaatgatagacttaaaatatttcccatattatgggaaaaaactgcatgttgggtatctacagccattggttgctgttcaggtcagctttgctcctaacaacactgggaaagaagtaacagttgagtgcaagattgatggatcagccaacctaaaaagtcaggatgatcgtgacaagtttttgggacgagttataatgttgtgttgtctgtcttcattttgtaacagctggaccttccattctagaattatgagaccaccttggagaaaggtgtgtggtacatgacattgggttacatcataacgtgcttccagatcatagtgttcagtgtcctctgaagtaactgcctgttgcctctgctgccctttgaaccagtgtacagtcgccagatagggaccggtgaacacctgattccaaacatgtaggatgggggtcttgtcctctttttatgtggtttaattgccaagtgtctaaagcttaatatgccgtgctatgtaaatattttatggatataacaactgtcatattttgatgtcaacagagttttagggataaaatggtacccggccaacatcaagtgactttatagctgcaagaaatgtggtatgtggagaagttctgtatgtgaggaaggaaaaaaagaaaataaaagtgtgtttgaaaaata

SEQ ID NO: 60188 - DNA, 1622 bp, Homo sapiens
agcggaagcggccgcccggcgcggcgcggcggagtcggctcgagtactccccgtaacgaggaggtgttctcggccgtcccacccttcactgccgtctccgggctgcgccgccggagccgggacgcgcctccgcagccctcgccgcctccatccccgcggccgcagctcctctcgccgtccgcgcgcacaccatgacgaagaacgagaagaagtccctcaaccagagcctggccgagtggaagctcttcatctacaacccgaccaccggagaattcctggggcgcaccgccaagagctggggatcgcagtatgtggtagggaagtgatgctgtctgaaggtgacatcctgttctcctctcttctgtcctctccatccttattttggccacctggtttgatcttgctcttctacctagttttttatgggttcctggctgcactcttctcattcacgatgtgggttatgcttcagactctcaacgatgaggttccaaaataccgtgaccagattcctagcccaggactcatggtttttccaaaaccagtgaccgcattggaatatacattcagtaggtctgatccaacttcgtatgcagggtacattgaagaccttaagaagtttctaaaaccatatactttagaagaacagaagaacctcacagtctgtcctgatggagcactttttgaacagaagggtccagtttatgttgcatgtcagtttcctatttcattacttcaagcatgcagtggtatgaatgatcctgattttggctattctcaaggaaacccttgtattcttgtgaaaatgaacagaataattggattaaagcctgaaggagtgccaaggatagattgtgtttcaaagaatgaagatataccaaatgtagcagtttatcctcataatggaatgatagacttaaaatatttcccatattatgggaaaaaactgcatgttgggtatctacagccattggttgctgttcaggtcagctttgctcctaacaacactgggaaagaagtaacagttgagtgcaagattgatggatcagccaacctaaaaagtcaggatgatcgtgacaagtttttgggacgagttatgttcaaaatcacagcacgtgcatagtatgagtaggatatctccacagagtaaatgttgtgttgtctgtcttcattttgtaacagctggaccttccattctagaattatgagaccaccttggagaaaggtgtgtggtacatgacattgggttacatcataacgtgcttccagatcatagtgttcagtgtcctctgaagtaactgcctgttgcctctgctgccctttgaaccagtgtacagtcgccagatagggaccggtgaacacctgattccaaacatgtaggatgggggtcttgtcctctttttatgtggtttaattgccaagtgtctaaagcttaatatgccgtgctatgtaaatattttatggatataacaactgtcatattttgatgtcaacagagttttagggataaaatggtacccggccaacatcaagtgactttatagctgcaagaaatgtggtatgtggagaagttctgtatgtgaggaaggaaaaaaagaaaataaaagtgtgtttgaaaaata

SEQ ID NO: 60189 - DNA, 1462 bp, Homo sapiens
agcggaagcggccgcccggcgcggcgcggcggagtcggctcgagtactccccgtaacgaggaggtgttctcggccgtcccacccttcactgccgtctccgggctgcgccgccggagccgggacgcgcctccgcagccctcgccgcctccatccccgcggccgcagctcctctcgccgtccgcgcgcacaccatgacgaagaacgagaagaagtccctcaaccagagcctggggtttgatcttgctcttctacctagttttttatgggttcctggctgcactcttctcattcacgatgtgggttatgcttcagactctcaacgatgaggttccaaaataccgtgaccagattcctagcccaggactcatggtttttccaaaaccagtgaccgcattggaatatacattcagtaggtctgatccaacttcgtatgcagggtacattgaagaccttaagaagtttctaaaaccatatactttagaagaacagaagaacctcacagtctgtcctgatggagcactttttgaacagaagggtccagtttatgttgcatgtcagtttcctatttcattacttcaagcatgcagtggtatgaatgatcctgattttggctattctcaaggaaacccttgtattcttgtgaaaatgaacagaataattggattaaagcctgaaggagtgccaaggatagattgtgtttcaaagaatgaagatataccaaatgtagcagtttatcctcataatggaatgatagacttaaaatatttcccatattatgggaaaaaactgcatgttgggtatctacagccattggttgctgttcaggtcagctttgctcctaacaacactgggaaagaagtaacagttgagtgcaagattgatggatcagccaacctaaaaagtcaggatgatcgtgacaagtttttgggacgagttatgttcaaaatcacagcacgtgcatagtatgagtaggatatctccacagagtaaatgttgtgttgtctgtcttcattttgtaacagctggaccttccattctagaattatgagaccaccttggagaaaggtgtgtggtacatgacattgggttacatcataacgtgcttccagatcatagtgttcagtgtcctctgaagtaactgcctgttgcctctgctgccctttgaaccagtgtacagtcgccagatagggaccggtgaacacctgattccaaacatgtaggatgggggtcttgtcctctttttatgtggtttaattgccaagtgtctaaagcttaatatgccgtgctatgtaaatattttatggatataacaactgtcatattttgatgtcaacagagttttagggataaaatggtacccggccaacatcaagtgactttatagctgcaagaaatgtggtatgtggagaagttctgtatgtgaggaaggaaaaaaagaaaataaaagtgtgtttgaaaaata

SEQ ID NO: 60190 - DNA, 1194 bp, Homo sapiens
ccacgcgtcgcggacgcgtgggtcgacccacgcgtccgcttcagactctcaacgatgaggttccaaaataccgtgaccagattcctagcccaggactcatggtttttccaaaaccagtgaccgcattggaatatacattcagtaggtctgatccaacttcgtatgcagggtacattgaagaccttaagaagtttctaaaaccatatactttagaagaacagaagaacctcacagtctgtcctgatggagcactttttgaacagaagggtccagtttatgttgcatgtcagtttcctatttcattacttcaagcatgcagtggtatgaatgatcctgattttggctattctcaaggaaacccttgtattcttgtgaaaatgaacagaataattggattaaagcctgaaggagtgccaaggatagattgtgtttcaaagaatgaagatataccaaatgtagcagtttatcctcataatggaatgatagacttaaaatatttcccatattatgggaaaaaactgcatgttgggtatctacagccattggttgctgttcaggtcagctttgctcctaacaacactgggaaagaagtaacagttgagtgcaagattgatggatcagccaacctaaaaagtcaggatgatcgtgacaagtttttgggacgagttatgttcaaaatcacagcacgtgcatagtatgagtaggatatctccacagagtaaatgttgtgttgtctgtcttcattttgtaacagctggaccttccattctagaattatgagaccaccttggagaaaggtgtgtggtacatgacattgggttacatcataacgtgcttccagatcatagtgttcagtgtcctctgaagtaactgcctgttgcctctgctgccctttgaaccagtgtacagtcgccagatagggaccggtgaacacctgattccaaacatgtaggatgggggtcttgtcctctttttatgtggtttaattgccaagtgtctaaagcttaatatgccgtgctatgtaaatattttatggatataacaactgtcatattttgatgtcaacagagttttagggataaaatggtacccggccaacatcaagtgactttatagctgcaagaaatgtggtatgtggagaagttctgtatgtgaggaaggaaaaaaagaaaataaaagtgtgtttgaaaaata

SEQ ID NO: 60191 - DNA, 1143 bp, Homo sapiens
tacctacgttaggtcacaatacggacagattcctagccaggagactcatggtttttccaaaaccagtgaccgcattggaatatacattcagtaggtctgatccaacttcgtatgcagggtacattgaagaccttaagaagtttctaaaaccatatactttagaagaacagaagaacctcacagtctgtcctgatggagcactttttgaacagaagggtccagtttatgttgcatgtcagtttcctatttcattacttcaagcatgcagtggtatgaatgatcctgattttggctattctcaaggaaacccttgtattcttgtgaaaatgaacagaataattggattaaagcctgaaggagtgccaaggatagattgtgtttcaaagaatgaagatataccaaatgtagcagtttatcctcataatggaatgatagacttaaaatatttcccatattatgggaaaaaactgcatgttgggtatctacagccattggttgctgttcaggtcagctttgctcctaacaacactgggaaagaagtaacagttgagtgcaagattgatggatcagccaacctaaaaagtcaggatgatcgtgacaagtttttgggacgagttatgttcaaaatcacagcacgtgcatagtatgagtaggatatctccacagagtaaatgttgtgttgtctgtcttcattttgtaacagctggaccttccattctagaattatgagaccaccttggagaaaggtgtgtggtacatgacattgggttacatcataacgtgcttccagatcatagtgttcagtgtcctctgaagtaactgcctgttgcctctgctgccctttgaaccagtgtacagtcgccagatagggaccggtgaacacctgattccaaacatgtaggatgggggtcttgtcctctttttatgtggtttaattgccaagtgtctaaagcttaatatgccgtgctatgtaaatattttatggatataacaactgtcatattttgatgtcaacagagttttagggataaaatggtacccggccaacatcaagtgactttatagctgcaagaaatgtggtatgtggagaagttctgtatgtgaggaaggaaaaaaagaaaataaaagtgtgtttgaaaaata

SEQ ID NO: 60192 - DNA, 1502 bp, Homo sapiens
agcggaagcggccgcccggcgcggcgcggcggagtcggctcgagtactccccgtaacgaggaggtgttctcggccgtcccacccttcactgccgtctccgggctgcgccgccggagccgggacgcgcctccgcagccctcgccgcctccatccccgcggccgcagctcctctcgccgtccgcgcgcacaccatgacgaagaacgagaagaagtccctcaaccagagcctggccgagtggaagctcttcatctacaacccgaccaccggagaattcctggggcgcaccgccaagagctggggtttgatcttgctcttctacctagttttttatgggttcctggctgcactcttctcattcacgatgtgggttatgcttcagactctcaacgatgaggttccaaaataccgtgaccagattcctagcccagcgcattggaatatacattcagtaggtctgatccaacttcgtatgcagggtacattgaagaccttaagaagtttctaaaaccatatactttagaagaacagaagaacctcacagtctgtcctgatggagcactttttgaacagaagggtccagtttatgttgcatgtcagtttcctatttcattacttcaagcatgcagtggtatgaatgatcctgattttggctattctcaaggaaacccttgtattcttgtgaaaatgaacagaataattggattaaagcctgaaggagtgccaaggatagattgtgtttcaaagaatgaagatataccaaatgtagcagtttatcctcataatggaatgatagacttaaaatatttcccatattatgggaaaaaactgcatgttgggtatctacagccattggttgctgttcaggtcagctttgctcctaacaacactgggaaagaagtaacagttgagtgcaagattgatggatcagccaacctaaaaagtcaggatgatcgtgacaagtttttgggacgagttatgttcaaaatcacagcacgtgcatagtatgagtaggatatctccacagagtaaatgttgtgttgtctgtcttcattttgtaacagctggaccttccattctagaattatgagaccaccttggagaaaggtgtgtggtacatgacattgggttacatcataacgtgcttccagatcatagtgttcagtgtcctctgaagtaactgcctgttgcctctgctgccctttgaaccagtgtacagtcgccagatagggaccggtgaacacctgattccaaacatgtaggatgggggtcttgtcctctttttatgtggtttaattgccaagtgtctaaagcttaatatgccgtgctatgtaaatattttatggatataacaactgtcatattttgatgtcaacagagttttagggataaaatggtacccggccaacatcaagtgactttatagctgcaagaaatgtggtatgtggagaagttctgtatgtgaggaaggaaaaaaagaaaataaaagtgtgtttgaaaaata

SEQ ID NO: 60193 - DNA, 1815 bp, Homo sapiens
agcggaagcggccgcccggcgcggcgcggcggagtcggctcgagtactccccgtaacgaggaggtgttctcggccgtcccacccttcactgccgtctccgggctgcgccgccggagccgggacgcgcctccgcagccctcgccgcctccatccccgcggccgcagctcctctcgccgtccgcgcgcacaccatgacgaagaacgagaagaagtccctcaaccagagcctggccgagtggaagctcttcatctacaacccgaccaccggagaattcctggggcgcaccgccaagagctggggtttgatcttgctcttctacctagttttttatgggttcctggctgcactcttctcattcacgatgtgggttatgcttcagactctcaacgatgaggttccaaaataccgtgaccagattcctagcccaggactcatggtttttccaaaaccagtgaccgcattggaatatacattcagtaggtctgatccaacttcgtatgcagggtacattgaagaccttaagaagtttctaaaaccatatactttagaagaacagaagaacctcacagtctgtcctgatggagcactttttgaacagaagggtccagtttatgttgcatgtcagtttcctatttcattacttcaagcatgcagtggtatgaatgatcctgattttggctattctcaaggaaacccttgtattcttgtgaaaatgaacagaataattggattaaagcctgaaggagtgccaaggatagattgtgtttcaaagaatgaagatataccaaatgtagcagtttatcctcataatggaatgatagacttaaaatatttcccatattatgggaaaaaactgcatgttgggtatctacagccattggttgctgttcaggtcagctttgctcctaacaacactgggaaagaagtaacagttgagtgcaagattgatggatcagccaacctaaaaagtcaggatgatcgtgacaagtttttgggacgagttatgttcaaaatcacagcacgtgcatagtatgagtaggatatctccacagagtaagttttagggataaaatggtacccggccaacatcaagtgactttatagctgcaagaaatgtggtatgtggagaagttctgtatgtgaggaaggaaaaaaagaaaataaaagtgtgtttgaaaaatattatcttgggttctttgtaaaatttattttttacatgctgaattagcctcgatctttttgattaagagcacaaacttttttttgtaaaacatgtaaaaaaaaaaactgggattaatttttagtgttggaactgcctcttattttaggctgtagataaaatagcatttttaggttagccagtgtgactatgcacctaattttttatgagattaaattcataagacttaatttgtacaatagtttgtgaaatatcttgttactgcttttatttagcagactgtggactgtaataaagtatataaattgtgaaatataaaaacttggaacttattcaaagcttcaaagcaaacaacagttttgtgtaagcattctttcccctccagtattaggtgtattcttggtaggattatttgtgataatttgggctacttggctgagaaagttgtgcttcccatatgatctgtgttgcttcttgttttttcttaaggctgttgtttattgttacttttctccttttttaaaaaaaaaaaaaggcagccgggcgcagtggctcacgcctgtagtcccagcactttgggaggccgaggcgggcggatcacaaggtcaagagatcgagaccatcctggccaaca

SEQ ID NO: 60194 - DNA, 1501 bp, Homo sapiens
  misc_feature (1321)..(1321): n is a, c, g, or t
agcggaagcggccgcccggcgcggcgcggcggagtcggctcgagtactccccgtaacgaggaggtgttctcggccgtcccacccttcactgccgtctccgggctgcgccgccggagccgggacgcgcctccgcagccctcgccgcctccatccccgcggccgcagctcctctcgccgtccgcgcgcacaccatgacgaagaacgagaagaagtccctcaaccagagcctggccgagtggaagctcttcatctacaacccgaccaccggagaattcctggggcgcaccgccaagagctggggtttgatcttgctcttctacctagttttttatgggttcctggctgcactcttctcattcacgatgtgggttatgcttcagactctcaacgatgaggttccaaaataccgtgaccagattcctagcccaggactcatggtttttccaaaaccagtgaccgcattggaatatacattcagtaggtctgatccaacttcgtatgcagggtacattgaagaccttaagaagtttctaaaaccatatactttagaagaacagaagaacctcacagtctgtcctgatggagcactttttgaacagaagggtccagtttatgttgcatgtcagtttcctatttcattacttcaagcatgcagtggtatgaatgatcctgattttggctattctcaaggaaacccttgtattcttgtgaaaatgaacagaataattggattaaagcctgaaggagtgccaaggatagattgtgtttcaaagaatgaagatataccaaatgtagcagtttatcctcataatggaatgatagacttaaaatatttcccatattatgggaaaaaactgcatgttgggtatctacagccattggttgctgttcaggtcagctttgctcctaacaacactgggaaagaagtaacgtgtcctctgaagtaactgcctgttgcctctgctgccctttgaaccagtgtacagtcgccagatagggaccggtgaacacctgattccaaacatgtaggatgggggtcttgtcctctttttatgtggtttaattgccaagtgtctaaagcttaatatgccgtgctatgtaaatattttatggatataacaactgtcatattttgatgtcaacagagttttagggataaaatggtacccggccaacatcaagtgactttatagctgcaagaaatgtggtatgtggagaagttctgtatgtgaggaaggaaaaaaagaaaataaaagtgtgtttgaaaaataaaaaaaaaaaaaaaaaaaaaaaaaaacaaaaaaaaaaaaaaaacaaaaanaaaaaaaaaaaaataacccgggggggggcccctttttttttaaaaaaaaaaaaaaccccccgggggtggggggttccccccccccccccccttgggaaaaaaaaaattttttaaatatcaggtcctttccccccccccccccccccggagggccccaaaaaaaaacccccccacccctag

SEQ ID NO: 60195 - DNA, 884 bp, Homo sapiens
ccacgcgtcgcggacgcgtgggtcgacccacgcgtccgctcaaggaaacccttgtattcttgtgaaaatgaacagaataattggattaaagcctgaaggagtgccaaggatagattgtgtttcaaagaatgaagatataccaaatgtagcagtttatcctcataatggaatgatagacttaaaatatttcccatattatgggaaaaaactgcatgttgggtatctacagccattggttgctgttcaggtcagctttgctcctaacaacactgggaaagaagtaacagttgagtgcaagattgatggatcagccaacctaaaaagtcaggatgatcgtgacaagtttttgggacgagttatgttcaaaatcacagcacgtgcatagtatgagtaggatatctccacagagtaaatgttgtgttgtctgtcttcattttgtaacagctggaccttccattctagaattatgagaccaccttggagaaaggtgtgtggtacatgacattgggttacatcataacgtgcttccagatcatagtgttcagtgtcctctgaagtaactgcctgttgcctctgctgccctttgaaccagtgtacagtcgccagatagggaccggtgaacacctgattccaaacatgtaggatgggggtcttgtcctctttttatgtggtttaattgccaagtgtctaaagcttaatatgccgtgctatgtaaatattttatggatataacaactgtcatattttgatgtcaacagagttttagggataaaatggtacccggccaacatcaagtgactttatagctgcaagaaatgtggtatgtggagaagttctgtatgtgaggaaggaaaaaaagaaaataaaagtgtgtttgaaaaata

SEQ ID NO: 60196 - DNA, 1932 bp, Homo sapiens
agcggaagcggccgcccggcgcggcgcggcggagtcggctcgagtactccccgtaacgaggaggtgttctcggccgtcccacccttcactgccgtctccgggctgcgccgccggagccgggacgcgcctccgcagccctcgccgcctccatccccgcggccgcagctcctctcgccgtccgcgcgcacaccatgacgaagaacgagaagaagtccctcaaccagagcctggccgagtggaagctcttcatctacaacccgaccaccggagaattcctggggcgcaccgccaagagctggggtttgatcttgctcttctacctagttttttatgggttcctggctgcactcttctcattcacgatgtgggttatgcttcagactctcaacgatgaggttccaaaataccgtgaccagattcctagcccaggactcatggtttttccaaaaccagtgaccgcattggaatatacattcagtaggtctgatccaacttcgtatgcagggtacattgaagaccttaagaagtttctaaaaccatatactttagaagaacagaagaacctcacagtctgtcctgatggagcactttttgaacagaagggtccagtttatgttgcatgtcagtttcctatttcattacttcaagcatgcagtggtatgaatgatcctgattttggctattctcaaggaaacccttgtattcttgtgaaaatgaacagaataattggattaaagcctgaaggagtgccaaggatagattgtgtttcaaagaatgaagatataccaaatgtagcagtttatcctcataatggaatgatagacttaaaatatttcccatattatgggaaaaaactgcatgtaagtattgagaagttcttatgtggtgattactcttttgggaagctggagcatgtgttgacgtaccacttgtctggggtaggtagacgccagccctgtttaatttgtgggtcatctattcaggttttgttttattttaatggtgatggtaaatggagttcccacatttacaattcagaacacagaacccaagcagatacgttaaagttagatgattatttctaaaatatcattttctttttcattatagaggtagtagtaggtgcttatgtagagaaagtagaaaagtacttaaaaagaaaatcaaggccgggtgcggtggcttactcctgtaatcacagcactttgagaggccaaggcgggcgcattacctgaggtcaggagtttgagaccagcctggccaacttggcgaaaccccctctctactaaaaatacaaaaattagctgggcgtggtgacatgtgcctgtagtcccagctactcgggaggctgaggcaggagaatcgcttgaacccaggaggtggaggttgcagtgagccaagattgtaccaccacactccaggttgggtgacagaatgggattctgtttcccccaccaaaaaaataaatgaaaagaaaatcaaggccaggcgcggtggctcacctgtaatcccagcactttgggaggccgagtcgggcagatcacgaggtcaggagatcaagaccatcctggctaacacggtgaaaccccgtctctactaaaaattacaaaaaattagctgggcgtggtggcaggcacctgtagtcccagctgctcgagagggtgaggcaggagactggcatgaacctgggagtcggaggttacagtgagccgagattgtgccactgcactccagcctgggcaacagagcgagactctgtctcaaaaaagaaaaaaaatcaaaagctcattgcggccgggtgtggtggctcacgcctgcaatcgcagcattttgggaggccgaggcgggcagatcacctgaggtcaggagttctagaccagcctgactagcatagtgaaaccccgtctctgctgaaaatacaaaaattagccg

SEQ ID NO: 60197 - DNA, 799 bp, Homo sapiens
ggtgatttgagacacccccacttatgcaaacacgaccggcggaatgaagatataccaaatgtagcagtttatcctcataatggaatgatagacttaaaatatttcccatattatgggaaaaaactgcatgttgggtatctacagccattggttgctgttcaggtcagctttgctcctaacaacactgggaaagaagtaacagttgagtgcaagattgatggatcagccaacctaaaaagtcaggatgatcgtgacaagtttttgggacgagttatgttcaaaatcacagcacgtgcatagtatgagtaggatatctccacagagtaaatgttgtgttgtctgtcttcattttgtaacagctggaccttccattctagaattatgagaccaccttggagaaaggtgtgtggtacatgacattgggttacatcataacgtgcttccagatcatagtgttcagtgtcctctgaagtaactgcctgttgcctctgctgccctttgaaccagtgtacagtcgccagatagggaccggtgaacacctgattccaaacatgtaggatgggggtcttgtcctctttttatgtggtttaattgccaagtgtctaaagcttaatatgccgtgctatgtaaatattttatggatataacaactgtcatattttgatgtcaacagagttttagggataaaatggtacccggccaacatcaagtgactttatagctgcaagaaatgtggtatgtggagaagttctgtatgtgaggaaggaaaaaaagaaaataaaagtgtgtttgaaaaata

SEQ ID NO: 60198 - DNA, 1369 bp, Homo sapiens
aatcccacctacttgggaggttgaggcaggagaatcacttgaacccgggagtcagaggttgcagtgagccgggatcgtgccactgcactccagcctgggcaacagagcaagactctgcctcacaaaaaaattaataataataatgataataggccgggtgtggtggctcacacctgtaatcctagcattctgggaggacaaggcaagaggatcacttgagctcaggggcatgagctgtcacacccagtcaacatttttatcagtaattacaggtatggacttacagctccaaaaaattaaaaagaatgcagagaacagaaaataatagagctaaattttttttttaatttacaagccacgtatggtggctcacacctgtaatcccagcactttgggagggtgaggtggaagggccatttgaagcgaggagtttgagattagcctgggcagggagaccctgtctctacaaaaaaatttaaaaattagtgggctgtggcggcacgtgcctatagtcccagctacttaggaaactgaggtgggaggattggttgaggcttcaatgagccataattgcaccactgcactgcagcctgggcaacactctcaaaaagaaaatttacagaataagccaattcctggtagagagaagtattaagtttccatagagtttgaattaatatattttccttttattgccaggttgggtatctacagccattggttgctgttcaggtcagctttgctcctaacaacactgggaaagaagtaacagttgagtgcaagattgatggatcagccaacctaaaaagtcaggatgatcgtgacaagtttttgggacgagttatgttcaaaatcacagcacgtgcatagtatgagtaggatatctccacagagtaaatgttgtgttgtctgtcttcattttgtaacagctggaccttccattctagaattatgagaccaccttggagaaaggtgtgtggtacatgacattgggttacatcataacgtgcttccagatcatagtgttcagtgtcctctgaagtaactgcctgttgcctctgctgccctttgaaccagtgtacagtcgccagatagggaccggtgaacacctgattccaaacatgtaggatgggggtcttgtcctctttttatgtggtttaattgccaagtgtctaaagcttaatatgccgtgctatgtaaatattttatggatataacaactgtcatattttgatgtcaacagagttttagggataaaatggtacccggccaacatcaagtgactttatagctgcaagaaatgtggtatgtggagaagttctgtatgtgaggaaggaaaaaaagaaaataaaagtgtgtttgaaaaata

SEQ ID NO: 60199 - DNA, 1491 bp, Homo sapiens
ttcctttaattataaacatagtttttacaaattctttttgtgacctaaagaggatttcttttgttttcaacttcaaatgaagatataccaaatgtagcagtttatcctcataatggaatgatagacttaaaatatttcccatattatgggaaaaaactgcatgtaagtattgagaagttcttatgtggtgattactcttttgggaagctggagcatgtgttgacgtaccacttgtctggggtaggtagacgccagccctgtttaatttgtgggtcatctattcaggttttgttttattttaatggtgatggtaaatggagttcccacatttacaattcagaacacagaacccaagcagatacgttaaagttagatgattatttctaaaatatcattttctttttcattatagaggtagtagtaggtgcttatgtagagaaagtagaaaagtacttaaaaagaaaatcaaggccgggtgcggtggcttactcctgtaatcacagcactttgagaggccaaggcgggcgcattacctgaggtcaggagtttgagaccagcctggccaacttggcgaaaccccctctctactaaaaatacaaaaattagctgggcgtggtgacatgtgcgcctatagtcccagctacttaggaaactgaggtgggaggattggttgaggcttcaatgagccataattgcaccactgcactgcagcctgggcaacactctcaaaaagaaaatttacagaataagccaattcctggtagagagaagtattaagtttccatagagtttgaattaatatattttccttttattgccaggttgggtatctacagccattggttgctgttcaggtcagctttgctcctaacaacactgggaaagaagtaacagttgagtgcaagattgatggatcagccaacctaaaaagtcaggatgatcgtgacaagtttttgggacgagttatgttcaaaatcacagcacgtgcatagtatgagtaggatatctccacagagtaaatgttgtgttgtctgtcttcattttgtaacagctggaccttccattctagaattatgagaccaccttggagaaaggtgtgtggtacatgacattgggttacatcataacgtgcttccagatcatagtgttcagtgtcctctgaagtaactgcctgttgcctctgctgccctttgaaccagtgtacagtcgccagatagggaccggtgaacacctgattccaaacatgtaggatgggggtcttgtcctctttttatgtggtttaattgccaagtgtctaaagcttaatatgccgtgctatgtaaatattttatggatataacaactgtcatattttgatgtcaacagagttttagggataaaatggtacccggccaacatcaagtgactttatagctgcaagaaatgtggtatgtggagaagttctgtatgtgaggaaggaaaaaaagaaaataaaagtgtgtttgaaaaata

SEQ ID NO: 60200 - DNA, 812 bp, Homo sapiens
gagctagcaggttagcatgctcagccccctggccacgtgatgccttgcaccacctcaggactctgttgaaagtacccagcagcaaagaaggttctcaccagatgcagctccttgatcttggccttctcagcctccattaactgttgggtatctacagccattggttgctgttcaggtcagctttgctcctaacaacactgggaaagaagtaacagttgagtgcaagattgatggatcagccaacctaaaaagtcaggatgatcgtgacaagtttttgggacgagttatgttcaaaatcacagcacgtgcatagtatgagtaggatatctccacagagtaaatgttgtgttgtctgtcttcattttgtaacagctggaccttccattctagaattatgagaccaccttggagaaaggtgtgtggtacatgacattgggttacatcataacgtgcttccagatcatagtgttcagtgtcctctgaagtaactgcctgttgcctctgctgccctttgaaccagtgtacagtcgccagatagggaccggtgaacacctgattccaaacatgtaggatgggggtcttgtcctctttttatgtggtttaattgccaagtgtctaaagcttaatatgccgtgctatgtaaatattttatggatataacaactgtcatattttgatgtcaacagagttttagggataaaatggtacccggccaacatcaagtgactttatagctgcaagaaatgtggtatgtggagaagttctgtatgtgaggaaggaaaaaaagaaaataaaagtgtgtttgaaaaata

SEQ ID NO: 60201 - DNA, 838 bp, Homo sapiens
  misc_feature (792)..(792): n is a, c, g, or t
  misc_feature (795)..(795): n is a, c, g, or t
  misc_feature (819)..(819): n is a, c, g, or t
agcggaagcggccgcccggcgcggcgcggcggagtcggctcgagtactccccgtaacgaggaggtgttctcggccgtcccacccttcactgccgtctccgggctgcgccgccggagccgggacgcgcctccgcagccctcgccgcctccatccccgcggccgcagctcctctcgccgtccgcgcgcacaccatgacgaagaacgagaagaagtccctcaaccagagcctggccgagtggaagctcttcatctacaacccgaccaccggagaattcctggggcgcaccgccaagagctggggtttgatcttgctcttctacctagttttttatgggttcctggctgcactcttctcattcacgatgtgggttatgcttcagactctcaacgatgaggttccaaaataccgtgaccagattcctagcccaggactcatggtttttccaaaaccagtgaccgcattggaatatacattcagtaggtctgatccaacttcgtatgcagggtacattgaagaccttaagaagtttctaaaaccatatactttagaagaacagaagaacctcacagtctgtcctgatggagcactttttgaacagaagggtccagtttatgttgcatgtcagtttcctatttcattacttcaagcatgcagtggtatgaatgatcctgattttggctattctcaaggaaacccttgtattcttgtgaaaatgaacagaataattggattaaagcctgaaggagtgccaaggatagattgtgtttcaaagaatgaagatataccaatgnagncagttatcctcagcgaaagcgggncgcgaatttagtaatagta

SEQ ID NO: 60202 - DNA, 531 bp, Homo sapiens
atatgcggatcccccaaacgcagagaggatattatgagtaggatatctccacagagtaaatgttgtgttgtctgtcttcattttgtaacagctggaccttccattctagaattatgagaccaccttggagaaaggtgtgtggtacatgacattgggttacatcataacgtgcttccagatcatagtgttcagtgtcctctgaagtaactgcctgttgcctctgctgccctttgaaccagtgtacagtcgccagatagggaccggtgaacacctgattccaaacatgtaggatgggggtcttgtcctctttttatgtggtttaattgccaagtgtctaaagcttaatatgccgtgctatgtaaatattttatggatataacaactgtcatattttgatgtcaacagagttttagggataaaatggtacccggccaacatcaagtgactttatagctgcaagaaatgtggtatgtggagaagttctgtatgtgaggaaggaaaaaaagaaaataaaagtgtgtttgaaaaata

SEQ ID NO: 60203 - DNA, 1907 bp, Homo sapiens
agcggaagcggccgcccggcgcggcgcggcggagtcggctcgagtactccccgtaacgaggaggtgttctcggccgtcccacccttcactgccgtctccgggctgcgccgccggagccgggacgcgcctccgcagccctcgccgcctccatccccgcggccgcagctcctctcgccgtccgcgcgcacaccatgacgaagaacgagaagaagtccctcaaccagagcctggccgagtggaagctcttcatctacaacccgaccaccggagaattcctggggcgcaccgccaagagctggggatcgcagtatgtggtagggaagtgatgctgtctgaaggtgacatcctgttctcctctcttctgtcctctccatccttattttggccacctggtttgatcttgctcttctacctagttttttatgggttcctggctgcactcttctcattcacgatgtgggttatgcttcagactctcaacgatgaggttccaaaataccgtgaccagattcctagcccaggactcatggtttttccaaaaccagtgaccgcattggaatatacattcagtaggtctgatccaacttcgtatgcagggtacattgaagaccttaagaagtttctaaaaccatatactttagaagaacagaagaacctcacagtctgtcctgatggagcactttttgaacagaagggtccagtttatgttgcatgtcagtttcctatttcattacttcaagcatgcagtggtatgaatgatcctgattttggctattctcaaggaaacccttgtattcttgtgaaaatgaacagaataattggattaaagcctgaaggagtgccaaggatagattgtgtttcaaagaatgaagatataccaaatgtagcagtttatcctcataatggaatgatagacttaaaatatttcccatattatgggaaaaaactgcatgttgggtatctacagccattggttgctgttcaggtcagctttgctcctaacaacactgggaaagaagtaacagttgagtgcaagattgatggatcagccaacctaaaaagtcaggatgatcgtgacaagtttttgggacgagttatgttcaaaatcacagcacgtgcatagtatgagtaggatatctccacagagtaagttttagggataaaatggtacccggccaacatcaagtgactttatagctgcaagaaatgtggtatgtggagaagttctgtatgtgaggaaggaaaaaaagaaaataaaagtgtgtttgaaaaatattatcttgggttctttgtaaaatttattttttacatgctgaattagcctcgatctttttgattaagagcacaaacttttttttgtaaaacatgtaaaaaaaaaaactgggattaatttttagtgttggaactgcctcttattttaggctgtagataaaatagcatttttaggttagccagtgtgactatgcacctaattttttatgagattaaattcataagacttaatttgtacaatagtttgtgaaatatcttgttactgcttttatttagcagactgtggactgtaataaagtatataaattgtgaaatataaaaacttggaacttattcaaagcttcaaagcaaacaacagttttgtgtaagcattctttcccctccagtattaggtgtattcttggtaggattatttgtgataatttgggctacttggctgagaaagttgtgcttcccatatgatctgtgttgcttcttgttttttcttaaggctgttgtttattgttacttttctccttttttaaaaaaaaaaaaaggcagccgggcgcagtggctcacgcctgtagtcccagcactttgggaggccgaggcgggcggatcacaaggtcaagagatcgagaccatcctggccaaca

SEQ ID NO: 60204 - DNA, 463 bp, Homo sapiens
agtcctgctgttttcctgggctcactgtttgaccacagagaagtggtctcaactctctgggtcttggtttgcctgtctttaaaatggggcagtaatcccagtaggtggtgactcccacggggcgtgtcctctgaagtaactgcctgttgcctctgctgccctttgaaccagtgtacagtcgccagatagggaccggtgaacacctgattccaaacatgtaggatgggggtcttgtcctctttttatgtggtttaattgccaagtgtctaaagcttaatatgccgtgctatgtaaatattttatggatataacaactgtcatattttgatgtcaacagagttttagggataaaatggtacccggccaacatcaagtgactttatagctgcaagaaatgtggtatgtggagaagttctgtatgtgaggaaggaaaaaaagaaaataaaagtgtgtttgaaaaata

SEQ ID NO: 60205 - DNA, 918 bp, Homo sapiens
  misc_feature (843)..(843): n is a, c, g, or t
  misc_feature (850)..(850): n is a, c, g, or t
  misc_feature (892)..(892): n is a, c, g, or t
  misc_feature (917)..(918): n is a, c, g, or t
agcggaagcggccgcccggcgcggcgcggcggagtcggctcgagtactccccgtaacgaggaggtgttctcggccgtcccacccttcactgccgtctccgggctgcgccgccggagccgggacgcgcctccgcagccctcgccgcctccatccccgcggccgcagctcctctcgccgtccgcgcgcacaccatgacgaagaacgagaagaagtccctcaaccagagcctggccgagtggaagctcttcatctacaacccgaccaccggagaattcctggggcgcaccgccaagagctggggtttgatcttgctcttctacctagttttttatgggttcctggctgcactcttctcattcacgatgtgggttatgcttcagactctcaacgatgaggttccaaaataccgtgaccagattcctagcccaggactcatggtttttccaaaaccagtgaccgcattggaatatacattcagtaggtctgatccaacttcgtatgcagggtacattgaagaccttaagaagtttctaaaacagttgagtgcaagattgatggatcagccaacctaaaaagtcaggatgatcgtgacaagtttttgggacgagttatgttcaaaatcacagcacgtgcatagtatgagtaggatatctccacagagtaaatgttgtgttgtctgtcttcattttgtaacagctggaccttccattctagaattatgagaccaccttggagaaaggtgtgtggtacatgacattgggttacatcataacgtgcttccagatcatagtgttcacaagaattcatagtggttccagttgttccttcttgaaaagttaactngccttgnttggccctcctggcttggcccctttttggaaaccccagttgnttaccaagttccggcccaataattnn

SEQ ID NO: 60206 - DNA, 251 bp, Homo sapiens
gtaagaaataaattcctttctttataaattacccagtttcaagtattgtgttataagcaacagaaaacaaagacagtagtacagttaacaaaggaagttaacatatagtgctcttatgaatctgtagactttgttgaaaatccatcaattgttccagtaatactctttatagtgaaagacaagtgttttcctgatcccagatgtcacactgttaacacgtttagcaacctataatcaggaatatttcctca

SEQ ID NO: 60207 - DNA, 667 bp, Homo sapiens
taattggattaaagcctgaaggagtgccaaggatagattgtgtttcaaaggttagtattcaaaaagtaactcctgttaaatctttgatgtttcttaaaatactttaaaagtctaatgatttagtcatcttttttttcttccctgtcacattttaaagtcctttgtagtgccttagaataaaattccaccaaccgtagtctttctcttccttaatgataattcagaaagacattttccatgtgtatttgattttgcacacattgcctttattttcacatataccgtatttcatcaattctaagattcactttttttctgccagctcagtaacactgaaattgggattacccttgtaattgatggtgtcttaatactgtatcatgacatttttctctttcttaatagttagttggcgtgctagtcatcagtgctatctgagatttaatgaaatatggtgcattttccttaaggtagaagcattatttatctcccctatccctacttacttttttttccagaatactgtgcagttttcatctcataactttcttttgttttctctccatgctgcaaatgccactaagacaaataatgtaaaagatgggtaagagttctgaggagacattaagttctaaatttatcattgtgctaaatattaacatttcaa

SEQ ID NO: 60208 - DNA, 1522 bp, Homo sapiens
ctaggtaggggtcgggtgtgaatcggccgaggcgagtactccccgtaacgaggaggtgttctcggccgtcccacccttcactgccgtctccgggctgcgccgccggagccgggacgcgcctccgcagccctcgccgcctccatccccgcggccgcagctcctctcgccgtccgcgcgcacaccatgacgaagaacgagaagaagtccctcaaccagagcctggccgagtggaagctcttcatctacaacccgaccaccggagaattcctggggcgcaccgccaagagctggggtttgatcttgctcttctacctagttttttatgggttcctggctgcactcttctcattcacgatgtgggttatgcttcagactctcaacgatgaggttccaaaataccgtgaccagattcctagcccaggactcatggtttttccaaaaccagtgaccgcattggaatatacattcagtaggtctgatccaacttcgtatgcagggtacattgaagaccttaagaagtttctaaaaccatatactttagaagaacagaagaacctcacagtctgtcctgatggagcactttttgaacagaagggtccagtttatgttgcatgtcagtttcctatttcattacttcaagcatgcagtggtatgaatgatcctgattttggctattctcaaggaaacccttgtattcttgtgaaaatgaacagaataattggattaaagcctgaaggagtgccaaggatagattgtgtttcaaagaatgaagatataccaaatgtagcagtttatcctcataatggaatgatagacttaaaatatttcccatattatgggaaaaaactgcatgttgggtatctacagccattggttgctgttcaggtcagctttgctcctaacaacactgggaaagaagtaacagttgagtgcaagattgatggatcagccaacctaaaaagtcaggatgatcgtgacaagtttttgggacgagttatgttcaaaatcacagcacgtgcatagtatgagtaggatatctccacagagtaaatgttgtgttgtctgtcttcattttgtaacagctggaccttccattctagaattatgagaccaccttggagaaaggtgtgtggtacatgacattgggttacatcataacgtgcttccagatcatagtgttcagtgtcctctgaagtaactgcctgttgcctctgctgccctttgaaccagtgtacagtcgccagatagggaccggtgaacacctgattccaaacatgtaggatgggggtcttgtcctctttttatgtggtttaattgccaagtgtctaaagcttaatatgccgtgctatgtaaatattttatggatataacaactgtcatattttgatgtcaacagagttttagggataaaatggtacccggccaacatcaagtgactttatagctgcaagaaatgtggtatgtggagaagttctgtatgtgaggaaggaaaaaaagaaaataaaagtgtgtttgaaaaata

SEQ ID NO: 60209 - DNA, 1760 bp, Homo sapiens
  misc_feature (1580)..(1580): n is a, c, g, or t
agcggaagcggccgcccggcgcggcgcggcggagtcggctcgagtactccccgtaacgaggaggtgttctcggccgtcccacccttcactgccgtctccgggctgcgccgccggagccgggacgcgcctccgcagccctcgccgcctccatccccgcggccgcagctcctctcgccgtccgcgcgcacaccatgacgaagaacgagaagaagtccctcaaccagagcctggccgagtggaagctcttcatctacaacccgaccaccggagaattcctggggcgcaccgccaagagctggggtttgatcttgctcttctacctagttttttatgggttcctggctgcactcttctcattcacgatgtgggttatgcttcagactctcaacgatgaggttccaaaataccgtgaccagattcctagcccaggactcatggtttttccaaaaccagtgaccgcattggaatatacattcagtaggtctgatccaacttcgtatgcagggtacattgaagaccttaagaagtttctaaaaccatatactttagaagaacagaagaacctcacagtctgtcctgatggagcactttttgaacagaagggtccagtttatgttgcatgtcagtttcctatttcattacttcaagcatgcagtggtatgaatgatcctgattttggctattctcaaggaaacccttgtattcttgtgaaaatgaacagaataattggattaaagcctgaaggagtgccaaggatagattgtgtttcaaagaatgaagatataccaaatgtagcagtttatcctcataatggaatgatagacttaaaatatttcccatattatgggaaaaaactgcatgttgggtatctacagccattggttgctgttcaggtcagctttgctcctaacaacactgggaaagaagtaacagttgagtgcaagattgatggatcagccaacctaaaaagtcaggatgatcgtgacaagtttttgggacgagttatgttcaaaatcacagcacgtgcatagtatgagtaggatatctccacagagtaaatgttgtgttgtctgtcttcattttgtaacagctggaccttccattctagaattatgagaccaccttggagaaaggtgtgtggtacatgacattgggttacatcataacgtgcttccagatcatagtgttcagtgtcctctgaagtaactgcctgttgcctctgctgccctttgaaccagtgtacagtcgccagatagggaccggtgaacacctgattccaaacatgtaggatgggggtcttgtcctctttttatgtggtttaattgccaagtgtctaaagcttaatatgccgtgctatgtaaatattttatggatataacaactgtcatattttgatgtcaacagagttttagggataaaatggtacccggccaacatcaagtgactttatagctgcaagaaatgtggtatgtggagaagttctgtatgtgaggaaggaaaaaaagaaaataaaagtgtgtttgaaaaataaaaaaaaaaaaaaaaaaaaaaaaaaacaaaaaaaaaaaaaaaacaaaaanaaaaaaaaaaaaataacccgggggggggcccctttttttttaaaaaaaaaaaaaaccccccgggggtggggggttccccccccccccccccttgggaaaaaaaaaattttttaaatatcaggtcctttccccccccccccccccccggagggccccaaaaaaaaacccccccacccctag

SEQ ID NO: 60210 - DNA, 1615 bp, Homo sapiens
agcggaagcggccgcccggcgcggcgcggcggagtcggctcgagtactccccgtaacgaggaggtgttctcggccgtcccacccttcactgccgtctccgggctgcgccgccggagccgggacgcgcctccgcagccctcgccgcctccatccccgcggccgcagctcctctcgccgtccgcgcgcacaccatgacgaagaacgagaagaagtccctcaaccagagcctggccgagtggaagctcttcatctacaacccgaccaccggagaattcctggggcgcaccgccaagagctggggtttgatcttgctcttctacctagttttttatgggttcctggctgcactcttctcattcacgatgtgggttatgcttcagactctcaacgatgaggttccaaaataccgtgaccagattcctagcccaggactcatggtttttccaaaaccagtgaccgcattggaatatacattcagtaggtctgatccaacttcgtatgcagggtacattgaagaccttaagaagtttctaaaaccatatactttagaagaacagaagaacctcacagtctgtcctgatggagcactttttgaacagaagggtccagtttatgttgcatgtcagtttcctatttcattacttcaagcatgcagtggtatgaatgatcctgattttggctattctcaaggaaacccttgtattcttgtgaaaatgaacagaataattggattaaagcctgaaggagtgccaaggatagattgtgtttcaaagttagttggcgtgctagtcatcagtgctatctgagatttaatgaaatatggtgcattttccttaagacaaataatgtaaaagatggaatgaagatataccaaatgtagcagtttatcctcataatggaatgatagacttaaaatatttcccatattatgggaaaaaactgcatgttgggtatctacagccattggttgctgttcaggtcagctttgctcctaacaacactgggaaagaagtaacagttgagtgcaagattgatggatcagccaacctaaaaagtcaggatgatcgtgacaagtttttgggacgagttatgttcaaaatcacagcacgtgcatagtatgagtaggatatctccacagagtaaatgttgtgttgtctgtcttcattttgtaacagctggaccttccattctagaattatgagaccaccttggagaaaggtgtgtggtacatgacattgggttacatcataacgtgcttccagatcatagtgttcagtgtcctctgaagtaactgcctgttgcctctgctgccctttgaaccagtgtacagtcgccagatagggaccggtgaacacctgattccaaacatgtaggatgggggtcttgtcctctttttatgtggtttaattgccaagtgtctaaagcttaatatgccgtgctatgtaaatattttatggatataacaactgtcatattttgatgtcaacagagttttagggataaaatggtacccggccaacatcaagtgactttatagctgcaagaaatgtggtatgtggagaagttctgtatgtgaggaaggaaaaaaagaaaataaaagtgtgtttgaaaaata

SEQ ID NO: 60211 - DNA, 1502 bp, Homo sapiens
ggtcacagagcccagagagcgtcctgtaggaacgtcacagagcccagagaacgcctggggacggtcggggaggcagttcggggaggggacgattaagttccctcagagaggaagccgcgggccgactggagtcgttttcgtgctctccgcacccgcccgccgcgggtagcatcttctcagcgccccggcgcccaggaacgcccaggaaacccagtcctcctcctaagcaacctgcggcgcggggacgcccgccttttgctattattataaaggtttgatcttgctcttctacctagttttttatgggttcctggctgcactcttctcattcacgatgtgggttatgcttcagactctcaacgatgaggttccaaaataccgtgaccagattcctagcccaggactcatggtttttccaaaaccagtgaccgcattggaatatacattcagtaggtctgatccaacttcgtatgcagggtacattgaagaccttaagaagtttctaaaaccatatactttagaagaacagaagaacctcacagtctgtcctgatggagcactttttgaacagaagggtccagtttatgttgcatgtcagtttcctatttcattacttcaagcatgcagtggtatgaatgatcctgattttggctattctcaaggaaacccttgtattcttgtgaaaatgaacagaataattggattaaagcctgaaggagtgccaaggatagattgtgtttcaaagaatgaagatataccaaatgtagcagtttatcctcataatggaatgatagacttaaaatatttcccatattatgggaaaaaactgcatgttgggtatctacagccattggttgctgttcaggtcagctttgctcctaacaacactgggaaagaagtaacagttgagtgcaagattgatggatcagccaacctaaaaagtcaggatgatcgtgacaagtttttgggacgagttatgttcaaaatcacagcacgtgcatagtatgagtaggatatctccacagagtaaatgttgtgttgtctgtcttcattttgtaacagctggaccttccattctagaattatgagaccaccttggagaaaggtgtgtggtacatgacattgggttacatcataacgtgcttccagatcatagtgttcagtgtcctctgaagtaactgcctgttgcctctgctgccctttgaaccagtgtacagtcgccagatagggaccggtgaacacctgattccaaacatgtaggatgggggtcttgtcctctttttatgtggtttaattgccaagtgtctaaagcttaatatgccgtgctatgtaaatattttatggatataacaactgtcatattttgatgtcaacagagttttagggataaaatggtacccggccaacatcaagtgactttatagctgcaagaaatgtggtatgtggagaagttctgtatgtgaggaaggaaaaaaagaaaataaaagtgtgtttgaaaaata

SEQ ID NO: 60212 - DNA, 1355 bp, Homo sapiens
cttgaatttggacagtgaaaaggcccttaaaaggatcgcagtatgtggtagggaagtgatgctgtctgaaggtgacatcctgttctcctctcttctgtcctctccatccttattttggccacctggtttgatcttgctcttctacctagttttttatgggttcctggctgcactcttctcattcacgatgtgggttatgcttcagactctcaacgatgaggttccaaaataccgtgaccagattcctagcccaggactcatggtttttccaaaaccagtgaccgcattggaatatacattcagtaggtctgatccaacttcgtatgcagggtacattgaagaccttaagaagtttctaaaaccatatactttagaagaacagaagaacctcacagtctgtcctgatggagcactttttgaacagaagggtccagtttatgttgcatgtcagtttcctatttcattacttcaagcatgcagtggtatgaatgatcctgattttggctattctcaaggaaacccttgtattcttgtgaaaatgaacagaataattggattaaagcctgaaggagtgccaaggatagattgtgtttcaaagaatgaagatataccaaatgtagcagtttatcctcataatggaatgatagacttaaaatatttcccatattatgggaaaaaactgcatgttgggtatctacagccattggttgctgttcaggtcagctttgctcctaacaacactgggaaagaagtaacagttgagtgcaagattgatggatcagccaacctaaaaagtcaggatgatcgtgacaagtttttgggacgagttatgttcaaaatcacagcacgtgcatagtatgagtaggatatctccacagagtaaatgttgtgttgtctgtcttcattttgtaacagctggaccttccattctagaattatgagaccaccttggagaaaggtgtgtggtacatgacattgggttacatcataacgtgcttccagatcatagtgttcagtgtcctctgaagtaactgcctgttgcctctgctgccctttgaaccagtgtacagtcgccagatagggaccggtgaacacctgattccaaacatgtaggatgggggtcttgtcctctttttatgtggtttaattgccaagtgtctaaagcttaatatgccgtgctatgtaaatattttatggatataacaactgtcatattttgatgtcaacagagttttagggataaaatggtacccggccaacatcaagtgactttatagctgcaagaaatgtggtatgtggagaagttctgtatgtgaggaaggaaaaaaagaaaataaaagtgtgtttgaaaaata

SEQ ID NO: 60213 - DNA, 1321 bp, Homo sapiens
  misc_feature (1259)..(1259): n is a, c, g, or t
agcggaagcggccgcccggcgcggcgcggcggagtcggctcgagtactccccgtaacgaggaggtgttctcggccgtcccacccttcactgccgtctccgggctgcgccgccggagccgggacgcgcctccgcagccctcgccgcctccatccccgcggccgcagctcctctcgccgtccgcgcgcacaccatgacgaagaacgagaagaagtccctcaaccagagcctggccgagtggaagctcttcatctacaacccgaccaccggagaattcctggggcgcaccgccaagagctggggtttgatcttgctcttctacctagttttttatgggttcctggctgcactcttctcattcacgatgtgggttatgcttcagactctcaacgatgaggttccaaaataccgtgaccagattcctagcccaggactcatggtttttccaaaaccagtgaccgcattggaatatacattcagtaggtctgatccaacttcgtatgcagggtacattgaagaccttaagaagtttctaaaaccatatactttagaagaacagaagaacctcacagtctgtcctgatggagcactttttgaacagaagggtccagtttatgttgcatgtcagtttcctatttcattacttcaagcatgcagtggtatgaatgatcctgattttggctattctcaaggaaacccttgtattcttgtgaaaatgaacagaataattggattaaagcctgaaggagtgccaaggatagattgtgtttcaaagaatgaagatataccaaatgtagcagtttatcctcataatggaatgatagacttaaaatatttcccatattatgggaaaaaactgcatgttgggtatctacagccattggttgctgttcaggtcagctttgctcctaacaacactgggaaagaagtaacagttgagtgcaagattgatggatcagccaacctaaaaagtcaggatgatcgtgacaagtttttgggacgagttatgttcaaaatcacagcacgtgcatagtatgagtaggatatctccacagagtaaatgttgtgttgtctgtcttcattttgtaacagctggaccttccattctagaattatgagaccaccttggagaaaggtgtgtggtacatgacattgggttacatcataacgtgcttccagatcatagtgttcagtgtcctctgaagtaactgcctgttgcctctgctgccctttgaaccagtgtacagtcgccacaaggggnttctcagacacaagatataaaagatagccagtgggcttgattcgaacgatttacaaggttaa

SEQ ID NO: 60214 - DNA, 1138 bp, Homo sapiens
tacccctctataaggagagcccagagtcctagcccaggactcatggtttttccaaaaccagtgaccgcattggaatatacattcagtaggtctgatccaacttcgtatgcagggtacattgaagaccttaagaagtttctaaaaccatatactttagaagaacagaagaacctcacagtctgtcctgatggagcactttttgaacagaagggtccagtttatgttgcatgtcagtttcctatttcattacttcaagcatgcagtggtatgaatgatcctgattttggctattctcaaggaaacccttgtattcttgtgaaaatgaacagaataattggattaaagcctgaaggagtgccaaggatagattgtgtttcaaagaatgaagatataccaaatgtagcagtttatcctcataatggaatgatagacttaaaatatttcccatattatgggaaaaaactgcatgttgggtatctacagccattggttgctgttcaggtcagctttgctcctaacaacactgggaaagaagtaacagttgagtgcaagattgatggatcagccaacctaaaaagtcaggatgatcgtgacaagtttttgggacgagttatgttcaaaatcacagcacgtgcatagtatgagtaggatatctccacagagtaaatgttgtgttgtctgtcttcattttgtaacagctggaccttccattctagaattatgagaccaccttggagaaaggtgtgtggtacatgacattgggttacatcataacgtgcttccagatcatagtgttcagtgtcctctgaagtaactgcctgttgcctctgctgccctttgaaccagtgtacagtcgccagatagggaccggtgaacacctgattccaaacatgtaggatgggggtcttgtcctctttttatgtggtttaattgccaagtgtctaaagcttaatatgccgtgctatgtaaatattttatggatataacaactgtcatattttgatgtcaacagagttttagggataaaatggtacccggccaacatcaagtgactttatagctgcaagaaatgtggtatgtggagaagttctgtatgtgaggaaggaaaaaaagaaaataaaagtgtgtttgaaaaata

SEQ ID NO: 60215 - DNA, 1239 bp, Homo sapiens
agcggaagcggccgcccggcgcggcgcggcggagtcggctcgagtactccccgtaacgaggaggtgttctcggccgtcccacccttcactgccgtctccgggctgcgccgccggagccgggacgcgcctccgcagccctcgccgcctccatccccgcggccgcagctcctctcgccgtccgcgcgcacaccatgacgaagaacgagaagaagtccctcaaccagagcctggccgagtggaagctcttcatctacaacccgaccaccggagaattcctggggcgcaccgccaagagctggggtttgatcttgctcttctacctagttttttatgggttcctggctgcactcttctcattcacgatgtgggttatgcttcagactctcaacgatgaggttccaaaataccgtgaccagattcctagcccaggactcatggtttttccaaaaccagtgaccgcattggaatatacattcagtaggtctgatccaacttcgtatgcagggtacattgaagaccttaagaagtttctaaaaccatatactttagaagaacagaagaacctcacagtctgtcctgatggagcactttttgaacagaagggtccagtttatgttgcatgtcagtttcctatttcattacttcaagcatgcagtggtatgaatgatcctgattttggctattctcaaggaaacccttgtattcttgtgaaaatgaacagaataattggattaaagcctgaaggagtgccaaggatagattgtgtttcaaagaatgaagatataccaaatgtagcagtttatcctcataatggaatgatagacttaaaatatttcccatattatgggaaaaaactgcatgttgggtatctacagccattggttgctgttcaggtcagctttgctcctaacaacactgggaaagaagtaacagttgagtgcaagattgatggatcagccaacctaaaaagtcaggatgatcgtgacaagtttttgggacgagttatgttcaaaatcacagcacgtgcatagtatgagtaggatatctccacagagtaaatgttgtgttgtctgtcttcattttgtaacagctggaccttccattctagaattatgagaccaccttggagaaaggtgtgtggtacatgacattgggttacatcataacgtgcttccagatcatagtgttcaaagggcagcagaggcaacaggcagttacttcagaggacactgaacacta

SEQ ID NO: 60216 - DNA, 1343 bp, Homo sapiens
ctcaggactcggtatcgtacaacacttctcagtgtctcatatctagatggaggtcgctattacaaatgaagacgacacacaacatttactctgtggagatattctactcatactatgcacgtgctgtgattttgaacataactcgtcccaaaaacttgtcacgatcatcctgactttttaggttggctgatccatcaatcttgcactcaactgttactcctttcccagtgttgtcaggagcaaagctgacctgaacagcaaccaatggctgtagataccccacatgcagttttttcccataatatgggaaatattttaagtctatcattccattatgaggataaactgctacatttggtatatcttcattctttgaaacacagtctgtcctgatggagcactttttgaacagaagggtccagtttatgttgcatgtcagtttcctatttcattacttcaagcatgcagtggtatgaatgatcctgattttggctattctcaaggaaacccttgtattcttgtgaaaatgaacagaataattggattaaagcctgaaggagtgccaaggatagattgtgtttcaaagaatgaagatataccaaatgtagcagtttatcctcataatggaatgatagacttaaaatatttcccatattatgggaaaaaactgcatgttgggtatctacagccattggttgctgttcaggtcagctttgctcctaacaacactgggaaagaagtaacagttgagtgcaagattgatggatcagccaacctaaaaagtcaggatgatcgtgacaagtttttgggacgagttatgttcaaaatcacagcacgtgcatagtatgagtaggatatctccacagagtaaatgttgtgttgtctgtcttcattttgtaacagctggaccttccattctagaattatgagaccaccttggagaaaggtgtgtggtacatgacattgggttacatcataacgtgcttccagatcatagtgttcagtgtcctctgaagtaactgcctgttgcctctgctgccctttgaaccagtgtacagtcgccagatagggaccggtgaacacctgattccaaacatgtaggatgggggtcttgtcctctttttatgtggtttaattgccaagtgtctaaagcttaatatgccgtgctatgtaaatattttatggatataacaactgtcatattttgatgtcaacagagttttagggataaaatggtacccggccaacatcaagtgactttatagctgcaagaaatgtggtatgtggagaagttctgtatgtgaggaaggaaaaaaagaaaataaaagtgtgtttgaaaaata

SEQ ID NO: 60217 - DNA, 1183 bp, Homo sapiens
agcggaagcggccgcccggcgcggcgcggcggagtcggctcgagtactccccgtaacgaggaggtgttctcggccgtcccacccttcactgccgtctccgggctgcgccgccggagccgggacgcgcctccgcagccctcgccgcctccatccccgcggccgcagctcctctcgccgtccgcgcgcacaccatgacgaagaacgagaagaagtccctcaaccagagcctggccgagtggaagctcttcatctacaacccgaccaccggagaattcctggggcgcaccgccaagagctggggtttgatcttgctcttctacctagttttttatgggttcctggctgcactcttctcattcacgatgtgggttatgcttcagactctcaacgatgaggttccaaaataccgtgaccagattcctagcccaggactcatggtttttccaaaaccagtgaccgcattggaatatacattcagtaggtctgatccaacttcgtatgcagggtacattgaagaccttaagaagtttctaaaaccatatactttagaagaacagaagaacctcacagtctgtcctgatggagcactttttgaacagaagggtccagtttatgttgcatgtcagtttcctatttcattacttcaagcatgcagtggtatgaatgatcctgattttggctattctcaaggaaacccttgtattcttgtgaaaatgaacagaataattggattaaagcctgaaggagtgccaaggatagattgtgtttcaaagaatgaagatataccaaatgtagcagtttatcctcataatggaatgatagacttaaaatatttcccatattatgggaaaaaactgcatgttgggtatctacagccattggttgctgttcaggtcagctttgctcctaacaacactgggaaagaagtaacagttgagtgcaagattgatggatcagccaacctaaaaagtcaggatgatcgtgacaagtttttgggacgagttatgttcaaaatcacagcacgtgcatagtatgagtaggatatctccacagagtaagttttagggataaaatggtacccggccaacatcaagtgactttatagctgcaagaaatgtggtatgtggagaagttctgtatgtgaggaaggaaaaaaagaaaataaaagtgtgtttgaaaaata

SEQ ID NO: 60218 - DNA, 1655 bp, Homo sapiens
  misc_feature (965)..(965): n is a, c, g, or t
  misc_feature (1247)..(1247): n is a, c, g, or t
agcggaagcggccgcccggcgcggcgcggcggagtcggctcgagtactccccgtaacgaggaggtgttctcggccgtcccacccttcactgccgtctccgggctgcgccgccggagccgggacgcgcctccgcagccctcgccgcctccatccccgcggccgcagctcctctcgccgtccgcgcgcacaccatgacgaagaacgagaagaagtccctcaaccagagcctggccgagtggaagctcttcatctacaacccgaccaccggagaattcctggggcgcaccgccaagagctggggtttgatcttgctcttctacctagttttttatgggttcctggctgcactcttctcattcacgatgtgggttatgcttcagactctcaacgatgaggttccaaaataccgtgaccagattcctagcccaggactcatggtttttccaaaaccagtgaccgcattggaatatacattcagtaggtctgatccaacttcgtatgcagggtacattgaagaccttaagaagtttctaaaaccatatactttagaagaacagaagaacctcacagtctgtcctgatggagcactttttgaacagaagggtccagtttatgttgcatgtcagtttcctatttcattacttcaagcatgcagtggtatgaatgatcctgattttggctattctcaaggaaacccttgtattcttgtgaaaatgaacagaataattggattaaagcctgaaggagtgccaaggatagattgtgtttcaaagaatgaagatataccaaatgtagcagtttatcctcataatggaatgatagacttaaaatatttcccatattatgggaaaaaactgcatgttgggtatctacagccattggttgctgttcaggtcagctttgctcctaacaacactgggaaagaagtaaccacatcgccggaaccacccacctaccaagcatangatgaacacagaccagcctcccgcgcccaccccctggccccacccgacccgagggtgcgctatgtcagaccccgcagtacctaacagaccagcacgcgcgaaaagaggcgaacggcccccacaacatcttttcctatgtccaccaggttactaacaaacaaacccagagagggagttcaatgtaaagtcactctactgcatcgttcgtaaactgccattcacgcacgccggcctgtccttcctgattccgccgcgcccaacactgcacaaacaaacaaacgnctgtataaagcaagtgtgtgctgccgcacgatgttcggcgtgttgtgaaacgacgcgaggtaccacgagatgatcttacattcacaaacacacccacccgtgcgccacccccgtcctcactgtagctccccccacccacaagccccaaccatccgaggccgcacgacacagagtccacagacccacgcccccacgcctccacactctctcggtctgctctccacccccacacacgtaggcctaccagtcgatgcgcacaccacataacgtccctgtaagtaacatctcacctagcacacgtccaaatctaaagactacacatgaaacatctaacaaccgccagcgtagcgcagagatgacccacaccattacgacgcctcgccctctgcttcacccgccctccccccg

SEQ ID NO: 60219 - DNA, 1294 bp, Homo sapiens
agcggaagcggccgcccggcgcggcgcggcggagtcggctcgagtactccccgtaacgaggaggtgttctcggccgtcccacccttcactgccgtctccgggctgcgccgccggagccgggacgcgcctccgcagccctcgccgcctccatccccgcggccgcagctcctctcgccgtccgcgcgcacaccatgacgaagaacgagaagaagtccctcaaccagagcctggccgagtggaagctcttcatctacaacccgaccaccggagaattcctggggcgcaccgccaagagctggggtttgatcttgctcttctacctagttttttatgggttcctggctgcactcttctcattcacgatgtgggttatgcttcagactctcaacgatgaggttccaaaataccgtgaccagattcctagcccaggactcatggtttttccaaaaccagtgaccgcattggaatatacattcagtaggtctgatccaacttcgtatgcagggtacattgaagaccttaagaagtttctaaaacaatgaagatataccaaatgtagcagtttatcctcataatggaatgatagacttaaaatatttcccatattatgggaaaaaactgcatgttgggtatctacagccattggttgctgttcaggtcagctttgctcctaacaacactgggaaagaagtaacagttgagtgcaagattgatggatcagccaacctaaaaagtcaggatgatcgtgacaagtttttgggacgagttatgttcaaaatcacagcacgtgcatagtatgagtaggatatctccacagagtaaatgttgtgttgtctgtcttcattttgtaacagctggaccttccattctagaattatgagaccaccttggagaaaggtgtgtggtacatgacattgggttacatcataacgtgcttccagatcatagtgttcagtgtcctctgaagtaactgcctgttgcctctgctgccctttgaaccagtgtacagtcgccagatagggaccggtgaacacctgattccaaacatgtaggatgggggtcttgtcctctttttatgtggtttaattgccaagtgtctaaagcttaatatgccgtgctatgtaaatattttatggatataacaactgtcatattttgatgtcaacagagttttagggataaaatggtacccggccaacatcaagtgactttatagctgcaagaaatgtggtatgtggagaagttctgtatgtgaggaaggaaaaaaagaaaataaaagtgtgtttgaaaaata

SEQ ID NO: 60220 - DNA, 1167 bp, Homo sapiens
  misc_feature (19)..(19): n is a, c, g, or t
ttaggcacgaggcgtaacnaggagtgttctcggccgtcccacccttcactgccgtctccgggctgcgccgccggagccgggacgcgcctccgcagccctcgccgcctccatccccgcggccgcagctcctctcgccgtccgcgcgcacaccatgacgaagaacgagaagaagtccctcaaccagagcctggccgagtggaagctcttcatctacaacccgaccaccggagaattcctggggcgcaccgccaagagctggggtttgatcttgctcttctacctagttttttatgggttcctggctgcactcttctcattcacgatgtgggttatgcttcagactctcaacgatgaggttccaaaataccgtgaccagattcctagcccaggactcatggtttttccaaaaccagtgaccgcattggaatatacattcagtaggtctgatccaacttcgtatgcagggtacattgaagaccttaagaagtttctaaaacgttgggtatctacagccattggttgctgttcaggtcagctttgctcctaacaacactgggaaagaagtaacagttgagtgcaagattgatggatcagccaacctaaaaagtcaggatgatcgtgacaagtttttgggacgagttatgttcaaaatcacagcacgtgcatagtatgagtaggatatctccacagagtaaatgttgtgttgtctgtcttcattttgtaacagctggaccttccattctagaattatgagaccaccttggagaaaggtgtgtggtacatgacattgggttacatcataacgtgcttccagatcatagtgttcagtgtcctctgaagtaactgcctgttgcctctgctgccctttgaaccagtgtacagtcgccagatagggaccggtgaacacctgattccaaacatgtaggatgggggtcttgtcctctttttatgtggtttaattgccaagtgtctaaagcttaatatgccgtgctatgtaaatattttatggatataacaactgtcatattttgatgtcaacagagttttagggataaaatggtacccggccaacatcaagtgactttatagctgcaagaaatgtggtatgtggagaagttctgtatgtgaggaaggaaaaaaagaaaataaaagtgtgtttgaaaaata

SEQ ID NO: 60221 - DNA, 1310 bp, Homo sapiens
agcggaagcggccgcccggcgcggcgcggcggagtcggctcgagtactccccgtaacgaggaggtgttctcggccgtcccacccttcactgccgtctccgggctgcgccgccggagccgggacgcgcctccgcagccctcgccgcctccatccccgcggccgcagctcctctcgccgtccgcgcgcacaccatgacgaagaacgagaagaagtccctcaaccagagcctggccgagtggaagctcttcatctacaacccgaccaccggagaattcctggggcgcaccgccaagagctggggtttgatcttgctcttctacctagttttttatgggttcctggctgcactcttctcattcacgatgtgggttatgcttcagactctcaacgatgaggttccaaaataccgtgaccagattcctagcccaggactcatggtttttccaaaaccagtgaccgcattggaatatacattcagtaggtctgatccaacttcgtatgcagggtacattgaagaccttaagaagtttctaaaaccatatactttagaagaacagaagaacctcacagtctgtcctgatggagcactttttgaacagaagggtccagtttatgttgcatgtcagtttcctatttcattacttcaagcatgcagtggtatgaatgatcctgattttggctattctcaaggaaacccttgtattcttgtgaaaatgaacagaataattggattaaagcctgaaggagtgccaaggatagattgtgtttcaaagttagttggcgtgctagtcatcagtgctatctgagatttaatgaaatatggtgcattttccttaaggtagaagcattatttatctcccctatccctacttacttttttttccagaatactgtgcagttttcatctcataactttcttttgttttctctccatgctgcaaatgccactaagacaaataatgtaaaagatgggtaagagttctgaggagacattaagttctaaatttatcattgtgctaaatattaacatttcaactctgattgtatggcagaaatattttacttagaatgttacattgaaatcacttttaaagttgtgaaaaaaaattctttttactgttaatggacttcttatttgggcagaaacttcttgctcagtggtcttcaaacttgatcactcatcagagtcatgttgccttgttgggttccgttcccatagtttctgactcagtaggtctgagatagggtccaaaatttgcatttttttctttttttttcttttagacggagtctcactctgtcgcctgggc

SEQ ID NO: 60222 - DNA, 291 bp, Homo sapiens
gagtataagtgactttttatgactattttctgatttaaaatataggaaatacattttccttaattggaaaaccaaaatttactttttagagttagtagttacaaacatatttttgacagttggctattaaacatgtttttgtttttgtttttagagacaggatctcatcctgttgcctaggctggagtgcggtggcgtgctcatcgttcactacagcctcaaactcctgggctcaaatgatcttcccacttcagccttcctagtggctggaactacaggtgtgcaccaccc

SEQ ID NO: 60223 - DNA, 1837 bp, Homo sapiens
gctcgtccgcctcgcgcccgggggctccgcgcctggagctgcgccggcggcagccatggacctgggccccggggacgcggcaggagggggaccgctcgcgccccggccccgccgccgccgctccctgcgccgcctgttcagccgcttcctgctggcgctgggcagccgctcacgccccggggactcaccgccccggccccagccgggacactgtgatggcgacggtgaggggggcttcgcctgcgccccgggcccagttccagcggcccccgggagccccggggaggaacgcccgcccggaccccagccccagctccagctccccgccggcgatggggcgcggccgccgggcgctcagggcttgaagaaccacggcaacacctgtttcatgaacgcggtggtgcagtgtctcagcaacaccgacctgctggccgagttcctggcgctggggcgctaccgggcggctccgggccgcgccgaggtcaccgagcagctggcggcgctggtgcgcgcgctctggactcgcgaatacacgccccaactttccgcggagttcaaggtaggcagcgctgcgccgccgaccgccctgtccccctggtttcgcctcttgaaaagtgtgtgcacgatcaggaaagggttttcttggggccttctttaaatgccgttgaccagttcagccccggattaccggctttgttttgagtcgatgtgttacgctgtcgcttgcttatgttttctttgtaaattaattctcctaggtattttgagagggagtggggtgagctggcagattgaagggtaatcagcgtttttggattcaacaagcatttgttgaagtattgaaggcttgtgggccagacagtgttctaatgccagctctagagcttccagtctggaatgatgtggggtagggaatgggatgttgaaggccaaggcctcagaggaaggaggtgatgcttgcgttgagatctgaatgatgagaaggatgcagtcagggcaagctgtaggactaatccaggcaggaggaacagcaagtacaattgccatagacccgaaggagctgagtgctggagacagggaaagaaaagcagtggcgttggagcttaggaggcagatgagtttcgccagatcacgtaagacctaggaggcaacggtaaagagtttggattttattctaagcccagtggaatctgacaacctacaggccaggtaccgtgctgagtgcccagcaaaggcagtgagcgtgctattttggagatagcatccttttgtttaaggcgcattcaatcccctacaatgtatgagcacgggcttgcattttattgtctgcaagatcacggtctacttactcgggttgctgccgggtcgtgaggctttgtaaattgtttgtatcacttcacccgggattaaaacggggtgtttgtttggggtcccagttggattaaagcgttcctgataattgatgcacatggcttgcttcctgcaaaaaaaaaaaaaaaaaaaagaaaaaaaagaaaaaaaaagaagaagaaacccgcagctctgggcagagaactgaagctccctacagactagtgattgttgttcttgggggagggggaaacctgtcagtgttcattccacaagcatcaccgctcttgagtttcagcccgagaaagcagtgtttgccatgtgacccatgagatgccaacccccaccttcctccctcctgcctccattagtgaagcactgttctgcagcagccagtgggtcaaatggttgtcactaaatgtctctttttggtgacatttgctttttaagaaagaggcagtatagtatagtggttaagagcaaggtc

SEQ ID NO: 60224 - DNA, 794 bp, Homo sapiens
gctcgtccgcctcgcgcccgggggctccgcgcctggagctgcgccggcggcagccatggacctgggccccggggacgcggcaggagggggaccgctcgcgccccggccccgccgccgccgctccctgcgccgcctgttcagccgcttcctgctggcgctgggcagccgctcacgccccggggactcaccgccccggccccagccgggacactgtgatggcgacggtgaggggggcttcgcctgcgccccgggcccagttccagcggcccccgggagccccggggaggaacgcccgcccggaccccagccccagctccagctccccgccggcgatggggcgcggccgccgggcgctcagggcttgaagaaccacggcaacacctgtttcatgaacgcggtggtgcagtgtctcagcaacaccgacctgctggccgagttcctggcgctggggcgctaccgggcggctccgggccgcgccgaggtcaccgagcagctggcggcgctggtgcgcgcgctctggactcgcgaatacacgccccaactttccgcggagttcaagaatgcagtttccaagtacggctctcagttccaaggcaattcccagcacgacgccctggaattcctgctctggttgctggatcgtgtacatgaggacctggagggttcatcccgagggccggtgtcggagaagcttccgcctgaagccactaaaacctctgagaactgcctgtcaccatcagctcagcttcctctaggtcaaagctttgtgcaaagccactttcaagcacaatata

SEQ ID NO: 60225 - DNA, 468 bp, Homo sapiens
aatattattttaaaacacaacattacaaaatgagttggtaatattgctagatggatcattaaacataaagacatactgttttgggccctccttgtttttactgataaactaaggcttagagatgctcatttaacgggaaagaacagttaacaaaccaaggaactgagaatggagccaaggtaatttgcttctaaaaccagtacattttttcactattccacactgatagcttctatttagatcataaaccagtgttttcaaaatataaacccagatccaccagtattccctggatgcttttcacaacttacctacaggcccacctcttgacattctgattctgtagttatgagaagagacactagcatctgtgttttaacaacaaaacacccaaaggatctgatgcacatggaactttgagaacactgctgaatacacagcccattcccacgctgctataaggacata

SEQ ID NO: 60226 - DNA, 1446 bp, Homo sapiens
aaccattgtgatggtctagataagtgtacatgcttaggccttctgaagcagcatttgaagctgcagtcctgaaaaccatgcaggccggaagagtagataaagaaatatttatttgagatggcacatgtttcttcagaaactcaagatgtttcccccaaagatgaattaactgcttcagaagcctccactaggtctccattgtgtgaacacaccttccctggggactcagacttacggtcaatgattgaagaacatgcttttcaggttttgtcacaaggatccttgttagaaagtccaagttacacagtttgtgtctctgagccagataaagatgatgattttctttctctgaactttcccaggaaactttggaaaatagtggaaagtgaccaattcaagtctatttcatgggatgagaatggaacttgcatagtgattaatgaagaactcttcaagaaagaaattttggaaacaaaggctccttacagaatatttcaaactgatgctatcaaaagttttgttcgacagctcaacctttatggatttagtaaaattcaacagaattttcaaagatctgcctttctagccacctttctgtcagaagagaaagaatcgtctgtcttaagcaagttaaagttctattataatccaaatttcaagcgtggctatccccaacttttagtaagagtgaagagaagaattggtgttaaaaatgcttcacctatatctactttattcaacgaagatttcaacaagaagcattttagagcaggggctaacatggagaatcataattctgccttagctgctgaagctagtgaagaaagtttattttcagcctctaaaaatttaaatatgcctctaacaagggaatcttctgtcagacagataattgcaaattcatctgtccccattagaagtggtttccctcctccttcaccttcaacctcagttggaccatcagaacaaattgcaacagatcaacatgctattttaaatcagttgaccactattcatatgcactctcatagtacctacatgcaagcaaggggccacattgtgaattttattacaaccacaacttctcaataccacatcatatctcccttacaaaatggttattttgggctgacagtggaaccatctgctgttcccacacgatatcctctggtatcagtcaatgaggctccatatcgtaacatgctaccagcaggcaacccgtggttgcaaatgcctacgatcgctgatagatcagctgcccctcattccaggctagctcttcaaccatcaccactggacaaatatcaccctaattacaactgatctgccattaaaagaggaccagattatgaatgacaacagagactaacatttacattgacaaaaaaccctaaaaatttctgcaattatcttattgaacaataaaattgcatgtttacttctaaa

SEQ ID NO: 60227 - DNA, 1020 bp, Homo sapiens
aaccattgtgatggtctagataagtgtacatgcttaggccttctgaagcagcatttgaagctgcagtcctgaaaaccatgcaggccggaagagtagataaagaaatatttatttgagatggcacatgtttcttcagaaactcaagatgtttcccccaaagatgaattaactgcttcagaagcctccactaggtctccattgtgtgaacacaccttccctggggactcagacttacggtcaatgattgaagaacatgcttttcaggttttgtcacaaggatccttgttagaaagtccaagttacacagtttgtgtctctgagccagataaagatgatgattttctttctctgaactttcccaggaaactttggaaaatagtggaaagtgaccaattcaagtctatttcatgggatgagaatggaacttgcatagtgattaatgaagaactcttcaagaaagaaattttggaaacaaaggctccttacagaatatttcaaactgatgctatcaaaagttttgttcgacagctcaacctttatggatttagtaaaattcaacagaattttcaaagatctgcctttctagccacctttctgtcagaagagaaagaatcgtctgtcttaagcaaggtatttgacatatttgagttaccactttatgtaaagtatatatgtaattttactttgtacatcagtaaatatgttaatacatgcagtaagaccagcttttgaaaattatataaaatattaaggtagaaattttgttttgaaattattgtgttcagcttgagcgttaaccttttagtgttttaagaaattttgctaacaactttgaatcttaccagtgaattccaaataaatgtaccaaagccacttaatgaaatattactattaatatataacatgttttcacttgagggcttaacaacttgagtggtttttcacaataagcacattcttaaaaatagtaaacgatgtttatgagttatttgatgacattaaatttgtgtgatgaaagag

SEQ ID NO: 60228 - DNA, 598 bp, Homo sapiens
aatttcttgccttctcaaatgatagaggggcaaggcaatttttggtagattgagagcaaagaaaatgtgccattaatcgggatagatgcttccccaatagtggttaaatttacgaagaatggatttgagactcatggatttaaaaaggggaagagagaaatagctctattgtgttatttaaaaagggaaagagctctattgtgttatttctgatacagcaccattttgattttttaactttttttagcttgttatggaaagtttcaaatgtacacaaaagtataatgaatatgcctagcttaaaaacgatcacggccaggtgtggtggctcatgcctataatcccagcactttgggaggccgaggcggatggaacgaggttaggagatcgaaaccatcctggaaaaaggtgaaaccccgtctgtactaaaaattaaaaaaaaaaaattagttgggcgtggtggtggatgcacatagtcccagctactcgggagactgaggcaggagaatggcgtgaacctgggaggcagagcttgcagtgagccgagattgcgccactgcactccagcctgggcaacagagcgagactctgtctcaaa

SEQ ID NO: 60229 - DNA, 463 bp, Homo sapiens
ttctgcacttcctagtacatgagccaataaagctcttattttttaagttatttcagattgggtcactatcattcacaataaaagattcctcactaatacagttcacacctcactaattacatgcttctaaatattgcagcaatctgcacaaaggaaatctctttctactactagattatacatttcttgaaggcaggaaagacatgtctagcacaatgtcctgcacatagttcaatatgtgttcaataaatatttacaaaagaagcaaatgagcaaaagaagttattttgtcataaaatcaagacctaaaattaaacaacttgacaagtgaatgagaagatcacaatgaataatacacaagccataatatagctcattttattgcatttcactttattgcacttcacagatactgtggtttgtttttttgttttctttttaacaaattgaaggtttgtgacac

SEQ ID NO: 60230 - DNA, 416 bp, Homo sapiens
caaggtggttttagcttgtcagtaccagcgcagcccgaggtttgaggtggggcaagcaacgctgcaggaagatcctaggcactcaggtcagactggccaagtcaccccgcgccatgcctttgcgcaagttaaagggcggactgatttaacacaagtctttctgatacggtcactgcctccaaactagatttctgaaggtggtagaatcatgtagcgcttgagctgcagatatttaaaacctgagacttgcagggatctcttgtccttgatttctttttcatgtgggacacactagccaaagccagcatctgtcggagacactgccaacgaaggcagcgccacagccaatttgcagagaccgcttgtcctccctaagtgtagtccttgaacaaattctaccaggcaggaagccagcc

SEQ ID NO: 60231 - DNA, 892 bp, Homo sapiens
  misc_feature (697)..(697): n is a, c, g, or t
  misc_feature (701)..(701): n is a, c, g, or t
  misc_feature (716)..(716): n is a, c, g, or t
  misc_feature (749)..(749): n is a, c, g, or t
aggcctgggtagggtgagcggcctccgaagcggagcggggctctgaggagacactttttcttcctccctccttccctcctctcctcctgccttcccttcccctttcctcccctctctcctccttctcccctcggtcagccggagcctgctggggcgagcggttggtattgcaggcgcttactctccggggccgcccggcgagtagctggccggggaaggaggcaggaaccgcgatggcgcctcagaagcacggcggtgggggagggggcggctcggggcccagcgcggggtccgggggaggcggcttcgggggttcggcggcgacggcttcgagcggcaaatccggcggcgggggctgtggaggcggtggcagttactcggcctcctcctcctccgcggcgttaccggtgaagaagtcgaaaatggagcacgtccaggctgaccacgagcttttcctccaggcctttgagagaaaacatttaaagttgatgatatgttatcaaaagtagagaaaatgaaaggagagcaagaatctcatagaaaaagaggaatccagtcgggctcggtggctcacacctataatcccagctacttgggaggctgagacaggagaatcgcttgaactcgggaggtggaggttgcagtgagccgaagattgcgccattacactccaacctgggcgagaagagcgacactncccnatctcaaaaaagaanaagaggagtcctggtcaaatttacagggctaanctcttcataatatgtccttatttccagtcattacttgctccttagtactctcttgccacaatatctttctgtaactgttcccatctgactataaaaatgcctagattgtcaccatcatttaaaaatatatatatatgcccttt

SEQ ID NO: 60232 - DNA, 604 bp, Homo sapiens
ccaaaataattttttgccacccaggaaacctctttatctttaccaaatgtctcatcgaaactccagaacaaacatcaaaaggtacattttatgaatcttatttcaagctgatcaaaccatgttagttttattttaaagtactatttctcaaaattaaaaaaaagaacaaaaataagtactatttctaactaaagatttaatatgaaaactgaagtgagagagtgactggttgaattggttgcacagtggttttcaatagtataatctttgtaagtctcaggttgttattagctttttttttttttcccctaatagaaatgaggctgggtgtggtggctcatgcctgtaatcccagcactttgggaggccaagttgggcggatcacttgaaggcaggagtttgagaccagtttggccaacatggcaaaaccctatctctcctaaaacaaaaattagccgggcgtggtggtgtgtgcctgtaatcccagttacttgcgaggctgaggcaggagaattgcttgagcccgggaggtggaggttgcagtgagccgagattgcgccgttgcacttcagcctgggcaacagagcgagactctacctcaaag

SEQ ID NO: 60233 - DNA, 623 bp, Homo sapiens
  misc_feature (33)..(33): n is a, c, g, or t
tttagctctgataccaactgttcattaaaaacnaagtgtccaaagagcagaagagacaaggtagagccgagctcggctctaccatgtcagtgaagagcttccagccagaagaaaatgaaatcgtgaggatggggaaaagacatttgttgcacaaatgacagtatttgataaaaacaggtaatgttgatgaacaagcgaggctcccacaatgttctggaaatgttttcattctgaagcagaatataattatttatattgattatttcattgcctttgtttctttttattcttacggatgaaaaaacaaatttgcaaacactgaatttttgtctgtttcatagaaaacaataattaaggaactatttgcatagatagctcagttaaacttacttatttggcgaatattttgagtgtctgctcttttccagacactgttctggacattaaggcaacaaaatccctgccttcaccatggagcttaacttttagtggaggaaacagaccaccacccaaaaaatcaactgatgtcacttagtgatgagtgttgtgaagaaaaatagagaataaatggttactgttttagagcgatatcctctgggaggaggtagtactttgagaagaga

SEQ ID NO: 60234 - DNA, 3581 bp, Homo sapiens
aagtgggcggagcgaggccaggtagggtgagcggcctccgaagcggagcggggctctgaggagacactttttttttcctccctccttccctcctctcctcctcccttcccttcccctctcctcccctctctcctccttcccccctcggtccgccggagcctgctggggcgagcggttggtattgcaggcgcttgctctccggggccgcccggcgggtagctggcggggggaggaggcaggaaccgcgatggcgcctcagaagcacggcggtgggggagggggcggctcggggcccagcgcggggtccgggggaggcggcttcgggggttcggcggcggtggcggcggcgacggcttcgggcggcaaatccggcggcgggagctgtggagggggtggcagttactcggcctcctcctcctcctccgcggcggcagcggcgggggctgcggtgttaccggtgaagaagccgaaaatggagcacgtccaggctgaccacgagcttttcctccaggcctttgagaagccaacacagatctatagatttcttcgaactcggaatctcatagcaccaatatttttgcacagaactcttacttacatgtctcatcgaaactccagaacaaacatcaaaaggaaaacatttaaagttgatgatatgttatcaaaagtagagaaaatgaaaggagagcaagaatctcatagcttgtcagctcatttgcagcttacatttttggtttcttccacaaaaatgataagccatcaccaaactcagaaaatgaacaaaattctgttaccctggaagtcctgcttgtgaaagtttgccacaaaaaaagaaaggatgtatgttgtccaataaggcaagttcccacaggtaaaaagcaggtgcctttgaatcctgacctcaatcaaacaaaacctggaaatttcccgtcccttgcagtttccagtaatgaatttgaacctagtaacagccacatggtgaagtcttactcgttgctatttagagtgactcgtccaagaagaagagagtttaatggaatgattaatggagaaaccatgaaaatattggtaattttttttttactagattttatcactggagattaagatggtcattgaaaatgattgtaccagtgttccttcatgatagtcatggtgctgagtcttaaagcaaacagtgaattcacctccacctcaacattttgttgtgcaaattttcaaacataaaggacaatgagaagtattttatagtgaacacttatctacttacctcttagattcaacaatgaatattttattatacttgttgcatatttatccccctacccatccctcttttcttccaacaattgtgaattcatctttgaggtattcattcaacaaacacataggtgctggggatgatttaatttaatcgaagatgattaaagcattcagtcctgtcctccaaagtctcacaacctagtgtagggaaatagacatgaaatatatcattgctgcaaaatgatgagtggcataatacaggtatatgtgaagttcagcagagaaacacgttggaagaaataatctttgactcttgaagtattgtttgaagtttttgggagttaccacgagtgagaaggagtttgcctagcaaagataattctaaacagaaacattagcatttgcaaagatgtggggttaatgttgtgagtgttaaaaagaacatatagtaaaaatgcaaaattggaaacgtggtctgtatattattgcaactttagtgtaattcctacctcatttgggataaatgtagcatgttttatgttaagggaccatatatcgtaacacatttttgttctaatatttgatttatgagaaatgtttgttaaatttagatgtcagtgaagagcttccagccagaagaaaatgaaatcgtgaggatggggaaaagacatttgttgcacaaatgacagtatttgataaaaacagagtttcactcttgttgcccaggctggagtgcagtggcatgatctggactcactgcaacctccacctcccaggtttaagcagttctcctgcctgagcctctcggattacagagatggggtttcaccatcttggccaagctggtcttgaactcctgaccttgtgatccacccacctcggcctcccaaagtgctgggattacaggcgtgagccactgcgtccagccggtaggtgctatttttaacatacccattttataagtgaggaaaatgaggcacgaaaagaaaaaaagattaaaaatagctaaataacctgatcccgactacctggctgatgactggtggaaccaggactcaaacacaggcattctgactctagaatcaatcaatctatctatctatttttttgaaatggagtttcatccttgttgcccaggctggagtgcaatggcgcgatctcagctcactgcaacctctgcctccctggttcaagcgattctcctgcctcagcctcctgagtagctgggattacagggatgcaccaccatgcccggctagttttgtatttttagtagagacggggtttcaccatgttggtcaggctggtctcgaactcctgacctcaggtgatccgcctgcctcggcttcccaaagtgctgggattagaggcgtgagccaccacacctggcctaattttgtatttgtagtagagacacggtttcaccatgttgctcaggctggtcttggaactcctgacctcaggtgatccaccctccttggcctcccaaagtgctgggattacggagtgagccaccgtgcccggcctagaatctatattcttaaccatttgtagccatgatggcacacttctattttatattctagctctagacacatagaaggtttgtcatagttgacattataatttatgtaactattgctgccagcgcctaaatcttccatataagaatttgcaatgatttgattactatttgttaagtaaataaagcatttaaaaagaactattataatcctaaaaaatcccattatggttatgaagacactattcaagcatgaagaacttcctatgtggcaagtttaagcttttccttttgtgttttcatttcagatgtcagtactttgtgtgctcttgaaataggaaatgtacagatccctattgccagacacatcattctctccatccagaaagccaactttgcaaggacaaaaaaaaaaattagtgtgaaacaaaatgtggcttttccaaagacagatgtgattatttatagtcaatgtggcctcaaaatgtcattgattgtgaaatagcaaacatgcgggatcataatatttgggtaggtttctgaagttatttcatatctgagcagtctaaagaagtatggggaggaggggccgggcatagtggctcacacctgtaatcccagcactttgggaggccaaggagggtggatcacctgagtcaggagttccaagaccaccctgagcaacatgggtgaaaccccgtaactacaaaaaaggcaaaaattagctgggtgtggtggtggctcctgtggtcctagctactcaggaggctgaggtgagagggtcacttgaacctgt

SEQ ID NO: 60235 - DNA, 2414 bp, Homo sapiens
aagtgggcggagcgaggccaggtagggtgagcggcctccgaagcggagcggggctctgaggagacactttttttttcctccctccttccctcctctcctcctcccttcccttcccctctcctcccctctctcctccttcccccctcggtccgccggagcctgctggggcgagcggttggtattgcaggcgcttgctctccggggccgcccggcgggtagctggcggggggaggaggcaggaaccgcgatggcgcctcagaagcacggcggtgggggagggggcggctcggggcccagcgcggggtccgggggaggcggcttcgggggttcggcggcggtggcggcggcgacggcttcgggcggcaaatccggcggcgggagctgtggagggggtggcagttactcggcctcctcctcctcctccgcggcggcagcggcgggggctgcggtgttaccggtgaagaagccgaaaatggagcacgtccaggctgaccacgagcttttcctccaggcctttgagaagccaacacagatctatagatttcttcgaactcggaatctcatagcaccaatatttttgcacagaactcttacttacatgtctcatcgaaactccagaacaaacatcaaaaggaaaacatttaaagttgatgatatgttatcaaaagtagagaaaatgaaaggagagcaagaatctcatagcttgtcagctcatttgcagcttacatttttggtttcttccacaaaaatgataagccatcaccaaactcagaaaatgaacaaaattctgttaccctggaagtcctgcttgtgaaagtttgccacaaaaaaagaaaggatgtatgttgtccaataaggcaagttcccacaggtaaaaagcaggtgcctttgaatcctgacctcaatcaaacaaaacctggaaatttcccgtcccttgcagtttccagtaatgaatttgaacctagtaacagccacatggtgaagtcttactcgttgctatttagagtgactcgtccaagaagaagagagtttaatggaatgattaatggagaaaccatgaaaatattggtaattttttttttactagattttatcactggagattaagatggtcattgaaaatgattgtaccagtgttccttcatgatagtcatggtgctgagtcttaaagcaaacagtgaattcacctccacctcaacattttgttgtgcaaattttcaaacataaaggacaatgagaagtattttatagtgaacacttatctacttacctcttagattcaacaatgaatattttattatacttgttgcatatttatccccctacccatccctcttttcttccaacaattgtgaattcatctttgaggtattcattcaacaaacacataggtgctggggatgatttaatttaatcgaagatgattaaagcattcagtcctgtcctccaaagtctcacaacctagtgtagggaaatagacatgaaatatatcattgctgcaaaatgatgagtggcataatacaggtatatgtgaagttcagcagagaaacacgttggaagaaataatctttgactcttgaagtattgtttgaagtttttgggagttaccacgagtgagaaggagtttgcctagcaaagataattctaaacagaaacattagcatttgcaaagatgtggggttaatgttgtgagtgttaaaaagaacatatagtaaaaatgcaaaattggaaacgtggtctgtatattattgcaactttagtgtaattcctacctcatttgggataaatgtagcatgttttatgttaagggaccatatatcgtaacacatttttgttctaatatttgatttatgagaaatgtttgttaaatttagatgtcagtgaagagcttccagccagaagaaaatgaaatcgtgaggatggggaaaagacatttgttgcacaaatgacagtatttgataaaaacaggtaatgttgatgaacaagcgaggctcccacaatgttctggaaatgttttcattctgaagcagaatataattatttatattgattatttcattgcctttgtttctttttattcttacggatgaaaaaacaaatttgcaaacactgaatttttgtctgtttcatagaaaacaataattaaggaactatttgcatagatagctcagttaaacttacttatttggcgaatattttgagtgtctgctcttttccagacactgttctggacattaaggcaacaaaatccctgccttcaccatggagcttaacttttagtggaggaaacagaccaccacccaaaaaatcaactgatgtcacttagtgatgagtgttgtgaagaaaaatagagaataaatggttactgttttagagcgatatcctctgggaggaggtagtactttgagaagaga

SEQ ID NO: 60236 - DNA, 2775 bp, Homo sapiens
aagtgggcggagcgaggccaggtagggtgagcggcctccgaagcggagcggggctctgaggagacactttttttttcctccctccttccctcctctcctcctcccttcccttcccctctcctcccctctctcctccttcccccctcggtccgccggagcctgctggggcgagcggttggtattgcaggcgcttgctctccggggccgcccggcgggtagctggcggggggaggaggcaggaaccgcgatggcgcctcagaagcacggcggtgggggagggggcggctcggggcccagcgcggggtccgggggaggcggcttcgggggttcggcggcggtggcggcggcgacggcttcgggcggcaaatccggcggcgggagctgtggagggggtggcagttactcggcctcctcctcctcctccgcggcggcagcggcgggggctgcggtgttaccggtgaagaagccgaaaatggagcacgtccaggctgaccacgagcttttcctccaggcctttgagaagccaacacagatctatagatttcttcgaactcggaatctcatagcaccaatatttttgcacagaactcttacttacatgtctcatcgaaactccagaacaaacatcaaaaggaaaacatttaaagttgatgatatgttatcaaaagtagagaaaatgaaaggagagcaagaatctcatagcttgtcagctcatttgcagcttacatttttggtttcttccacaaaaatgataagccatcaccaaactcagaaaatgaacaaaattctgttaccctggaagtcctgcttgtgaaagtttgccacaaaaaaagaaaggatgtatgttgtccaataaggcaagttcccacaggtaaaaagcaggtgcctttgaatcctgacctcaatcaaacaaaacctggaaatttcccgtcccttgcagtttccagtaatgaatttgaacctagtaacagccacatggtgaagtcttactcgttgctatttagagtgactcgtccaagaagaagagagtttaatggaatgattaatggagaaaccatgaaaatattgatgtcagtgaagagcttccagccagaagaaaatgaaatcgtgaggatggggaaaagacatttgttgcacaaatgacagtatttgataaaaacagagtttcactcttgttgcccaggctggagtgcagtggcatgatctggactcactgcaacctccacctcccaggtttaagcagttctcctgcctgagcctctcggattacagagatggggtttcaccatcttggccaagctggtcttgaactcctgaccttgtgatccacccacctcggcctcccaaagtgctgggattacaggcgtgagccactgcgtccagccggtaggtgctatttttaacatacccattttataagtgaggaaaatgaggcacgaaaagaaaaaaagattaaaaatagctaaataacctgatcccgactacctggctgatgactggtggaaccaggactcaaacacaggcattctgactctagaatcaatcaatctatctatctatttttttgaaatggagtttcatccttgttgcccaggctggagtgcaatggcgcgatctcagctcactgcaacctctgcctccctggttcaagcgattctcctgcctcagcctcctgagtagctgggattacagggatgcaccaccatgcccggctagttttgtatttttagtagagacggggtttcaccatgttggtcaggctggtctcgaactcctgacctcaggtgatccgcctgcctcggcttcccaaagtgctgggattagaggcgtgagccaccacacctggcctaattttgtatttgtagtagagacacggtttcaccatgttgctcaggctggtcttggaactcctgacctcaggtgatccaccctccttggcctcccaaagtgctgggattacggagtgagccaccgtgcccggcctagaatctatattcttaaccatttgtagccatgatggcacacttctattttatattctagctctagacacatagaaggtttgtcatagttgacattataatttatgtaactattgctgccagcgcctaaatcttccatataagaatttgcaatgatttgattactatttgttaagtaaataaagcatttaaaaagaactattataatcctaaaaaatcccattatggttatgaagacactattcaagcatgaagaacttcctatgtggcaagtttaagcttttccttttgtgttttcatttcagatgtcagtactttgtgtgctcttgaaataggaaatgtacagatccctattgccagacacatcattctctccatccagaaagccaactttgcaaggacaaaaaaaaaaattagtgtgaaacaaaatgtggcttttccaaagacagatgtgattatttatagtcaatgtggcctcaaaatgtcattgattgtgaaatagcaaacatgcgggatcataatatttgggtaggtttctgaagttatttcatatctgagcagtctaaagaagtatggggaggaggggccgggcatagtggctcacacctgtaatcccagcactttgggaggccaaggagggtggatcacctgagtcaggagttccaagaccaccctgagcaacatgggtgaaaccccgtaactacaaaaaaggcaaaaattagctgggtgtggtggtggctcctgtggtcctagctactcaggaggctgaggtgagagggtcacttgaacctgt

SEQ ID NO: 60237 - DNA, 2848 bp, Homo sapiens
aagtgggcggagcgaggccaggtagggtgagcggcctccgaagcggagcggggctctgaggagacactttttttttcctccctccttccctcctctcctcctcccttcccttcccctctcctcccctctctcctccttcccccctcggtccgccggagcctgctggggcgagcggttggtattgcaggcgcttgctctccggggccgcccggcgggtagctggcggggggaggaggcaggaaccgcgatggcgcctcagaagcacggcggtgggggagggggcggctcggggcccagcgcggggtccgggggaggcggcttcgggggttcggcggcggtggcggcggcgacggcttcgggcggcaaatccggcggcgggagctgtggagggggtggcagttactcggcctcctcctcctcctccgcggcggcagcggcgggggctgcggtgttaccggtgaagaagccgaaaatggagcacgtccaggctgaccacgagcttttcctccaggcctttgagaagccaacacagatctatagatttcttcgaactcggaatctcatagcaccaatatttttgcacagaactcttacttacatgtctcatcgaaactccagaacaaacatcaaaaggaaaacatttaaagttgatgatatgttatcaaaagtagagaaaatgaaaggagagcaagaatctcatagcttgtcagctcatttgcagcttacatttttggtttcttccacaaaaatgataagccatcaccaaactcagaaaatgaacaaaattctgttaccctggaagtcctgcttgtgaaagtttgccacaaaaaaagaaaggatgtatgttgtccaataaggcaagttcccacaggtaaaaagcaggtgcctttgaatcctgacctcaatcaaacaaaacctggaaatttcccgtcccttgcagtttccagtaatgaatttgaacctagtaacagccacatggtgaagtcttactcgttgctatttagagtgactcgtccaagaagaagagagtttaatggaatgattaatggagaaaccatgaaaatattggtaattttttttttactagattttatcactggagattaagatggtcattgaaaatgattgtaccagtgttccttcatgatagtcatggtgctgagtcttaaagcaaacagtgaattcacctccacctcaacattttgttgtgcaaattttcaaacataaaggacaatgagaagtattttatagtgaacacttatctacttacctcttagattcaacaatgaatattttattatacttgttgcatatttatccccctacccatccctcttttcttccaacaattgtgaattcatctttgaggtattcattcaacaaacacataggtgctggggatgatttaatttaatcgaagatgattaaagcattcagtcctgtcctccaaagtctcacaacctagtgtagggaaatagacatgaaatatatcattgctgcaaaatgatgagtggcataatacaggtatatgtgaagttcagcagagaaacacgttggaagaaataatctttgactcttgaagtattgtttgaagtttttgggagttaccacgagtgagaaggagtttgcctagcaaagataattctaaacagaaacattagcatttgcaaagatgtggggttaatgttgtgagtgttaaaaagaacatatagtaaaaatgcaaaattggaaacgtggtctgtatattattgcaactttagtgtaattcctacctcatttgggataaatgtagcatgttttatgttaagggaccatatatcgtaacacatttttgttctaatatttgatttatgagaaatgtttgttaaatttagatgtcagtgaagagcttccagccagaagaaaatgaaatcgtgaggatggggaaaagacatttgttgcacaaatgacagtatttgataaaaacagagtttcactcttgttgcccaggctggagtgcagtggcatgatctggactcactgcaacctccacctcccaggtttaagcagttctcctgcctgagcctctcggattacagagatggggtttcaccatcttggccaagctggtcttgaactcctgaccttgtgatccacccacctcggcctcccaaagtgctgggattacaggcgtgagccactgcgtccagccgatgtcagtactttgtgtgctcttgaaataggaaatgtacagatccctattgccagacacatcattctctccatccagaaagccaactttgcaaggacatagatctagaaacatcaaatagcatttcgtgtggtgggaaccaaagttggtgggtctttttcccacactgagccgtgtgtcgatttattgaattacgccgagtatgtggcgcgcttcacaacacttgtgctctttgggacttggcggagaatttctgggaaacctctggtgagcgacccatgaaataccttgggggaaacataagagtccgcgcggactccgtggcacgtacggaataaacacccgccgtatggtatccacgaaggaaattcgtgtcggcggaaggggcctaataaatttctgtagagagctgggctgcgagcattcggtgaccctccgtaaagaagatgccgcacttgtggtgccgcacatcgtatctgtatcccgaataggcgaccaacacagaattctcgggcaaaaagctcgggcacaagaagtcctttctgagcgaaaggggattactccttccacttacaacacggatcacgcccgggagcattcaaacaccttggggcacaatttgggggcacgccttcacacaccagagcacaacaatag

SEQ ID NO: 60238 - DNA, 2638 bp, Homo sapiens
aagtgggcggagcgaggccaggtagggtgagcggcctccgaagcggagcggggctctgaggagacactttttttttcctccctccttccctcctctcctcctcccttcccttcccctctcctcccctctctcctccttcccccctcggtccgccggagcctgctggggcgagcggttggtattgcaggcgcttgctctccggggccgcccggcgggtagctggcggggggaggaggcaggaaccgcgatggcgcctcagaagcacggcggtgggggagggggcggctcggggcccagcgcggggtccgggggaggcggcttcgggggttcggcggcggtggcggcggcgacggcttcgggcggcaaatccggcggcgggagctgtggagggggtggcagttactcggcctcctcctcctcctccgcggcggcagcggcgggggctgcggtgttaccggtgaagaagccgaaaatggagcacgtccaggctgaccacgagcttttcctccaggcctttgagaagccaacacagatctatagatttcttcgaactcggaatctcatagcaccaatatttttgcacagaactcttacttacatgtctcatcgaaactccagaacaaacatcaaaaggaaaacatttaaagttgatgatatgttatcaaaagtagagaaaatgaaaggagagcaagaatctcatagcttgtcagctcatttgcagcttacatttttggtttcttccacaaaaatgataagccatcaccaaactcagaaaatgaacaaaattctgttaccctggaagtcctgcttgtgaaagtttgccacaaaaaaagaaaggatgtatgttgtccaataaggcaagttcccacaggtaaaaagcaggtgcctttgaatcctgacctcaatcaaacaaaacctggaaatttcccgtcccttgcagtttccagtaatgaatttgaacctagtaacagccacatggtgaagtcttactcgttgctatttagagtgactcgtccaagaagaagagagtttaatggaatgattaatggagaaaccatgaaaatattggtaattttttttttactagattttatcactggagattaagatggtcattgaaaatgattgtaccagtgttccttcatgatagtcatggtgctgagtcttaaagcaaacagtgaattcacctccacctcaacattttgttgtgcaaattttcaaacataaaggacaatgagaagtattttatagtgaacacttatctacttacctcttagattcaacaatgaatattttattatacttgttgcatatttatccccctacccatccctcttttcttccaacaattgtgaattcatctttgaggtattcattcaacaaacacataggtgctggggatgatttaatttaatcgaagatgattaaagcattcagtcctgtcctccaaagtctcacaacctagtgtagggaaatagacatgaaatatatcattgctgcaaaatgatgagtggcataatacaggtatatgtgaagttcagcagagaaacacgttggaagaaataatctttgactcttgaagtattgtttgaagtttttgggagttaccacgagtgagaaggagtttgcctagcaaagataattctaaacagaaacattagcatttgcaaagatgtggggttaatgttgtgagtgttaaaaagaacatatagtaaaaatgcaaaattggaaacgtggtctgtatattattgcaactttagtgtaattcctacctcatttgggataaatgtagcatgttttatgttaagggaccatatatcgtaacacatttttgttctaatatttgatttatgagaaatgtttgttaaatttagatgtcagtgaagagcttccagccagaagaaaatgaaatcgtgaggatggggaaaagacatttgttgcacaaatgacagtatttgataaaaacagagtttcactcttgttgcccaggctggagtgcagtggcatgatctggactcactgcaacctccacctcccaggtttaagcagttctcctgcctgagcctctcggattacagagatggggtttcaccatcttggccaagctggtcttgaactcctgaccttgtgatccacccacctcggcctcccaaagtgctgggattacaggcgtgagccactgcgtccagccggtaggtgctatttttaacatacccattttataagtgaggaaaatgaggcacgaaaagaaaaaaagattaaaaatagctaaataacctgatcccgactacctggctgatgactggtggaaccaggactcaaacacaggcattctgactctagaatcaatcaatctatctatctatttttttgaaatggagtttcatccttgttgcagtaagccgagatcacgccacttcactccagcctcggtgaaagagcaaaactctgtctcaaaaaataaataaataaataaaaaaaaaaattaatgacatatctttatatattatttttaataagaaaaatctggagggggggccagattccaggggggccctagtcccaatttctcccttgcggatactgctctgggtactaaatgtcctgattgtaaaaccctgggattgctaaattatgg

SEQ ID NO: 60239 - DNA, 2566 bp, Homo sapiens
aagtgggcggagcgaggccaggtagggtgagcggcctccgaagcggagcggggctctgaggagacactttttttttcctccctccttccctcctctcctcctcccttcccttcccctctcctcccctctctcctccttcccccctcggtccgccggagcctgctggggcgagcggttggtattgcaggcgcttgctctccggggccgcccggcgggtagctggcggggggaggaggcaggaaccgcgatggcgcctcagaagcacggcggtgggggagggggcggctcggggcccagcgcggggtccgggggaggcggcttcgggggttcggcggcggtggcggcggcgacggcttcgggcggcaaatccggcggcgggagctgtggagggggtggcagttactcggcctcctcctcctcctccgcggcggcagcggcgggggctgcggtgttaccggtgaagaagccgaaaatggagcacgtccaggctgaccacgagcttttcctccaggcctttgagaagccaacacagatctatagatttcttcgaactcggaatctcatagcaccaatatttttgcacagaactcttacttacatgtctcatcgaaactccagaacaaacatcaaaaggaaaacatttaaagttgatgatatgttatcaaaagtagagaaaatgaaaggagagcaagaatctcatagcttgtcagctcatttgcagcttacatttttggtttcttccacaaaaatgataagccatcaccaaactcagaaaatgaacaaaattctgttaccctggaagtcctgcttgtgaaagtttgccacaaaaaaagaaaggatgtatgttgtccaataaggcaagttcccacaggtaaaaagcaggtgcctttgaatcctgacctcaatcaaacaaaacctggaaatttcccgtcccttgcagtttccagtaatgaatttgaacctagtaacagccacatggtgaagtcttactcgttgctatttagagtgactcgtccaagaagaagagagtttaatggaatgattaatggagaaaccatgaaaatattggtaattttttttttactagattttatcactggagattaagatggtcattgaaaatgattgtaccagtgttccttcatgatagtcatggtgctgagtcttaaagcaaacagtgaattcacctccacctcaacattttgttgtgcaaattttcaaacataaaggacaatgagaagtattttatagtgaacacttatctacttacctcttagattcaacaatgaatattttattatacttgttgcatatttatccccctacccatccctcttttcttccaacaattgtgaattcatctttgaggtattcattcaacaaacacataggtgctggggatgatttaatttaatcgaagatgattaaagcattcagtcctgtcctccaaagtctcacaacctagtgtagggaaatagacatgaaatatatcattgctgcaaaatgatgagtggcataatacaggtatatgtgaagttcagcagagaaacacgttggaagaaataatctttgactcttgaagtattgtttgaagtttttgggagttaccacgagtgagaaggagtttgcctagcaaagataattctaaacagaaacattagcatttgcaaagatgtggggttaatgttgtgagtgttaaaaagaacatatagtaaaaatgcaaaattggaaacgtggtctgtatattattgcaactttagtgtaattcctacctcatttgggataaatgtagcatgttttatgttaagggaccatatatcgtaacacatttttgttctaatatttgatttatgagaaatgtttgttaaatttagatgtcagtgaagagcttccagccagaagaaaatgaaatcgtgaggatggggaaaagacatttgttgcacaaatgacagtatttgataaaaacagagtttcactcttgttgcccaggctggagtgcagtggcatgatctggactcactgcaacctccacctcccaggtttaagcagttctcctgcctgagcctctcggattacagatgtcagtactttgtgtgctcttgaaataggaaatgtacagatccctattgccagacacatcattctctccatccagaaagccaactttgcaaggacaaaaaaaaaaattagtgtgaaacaaaatgtggcttttccaaagacagatgtgattatttatagtcaatgtggcctcaaaatgtcattgattgtgaaatagcaaacatgcgggatcataatatttgggtaggtttctgaagttatttcatatctgagcagtctaaagaagtatggggaggaggggccgggcatagtggctcacacctgtaatcccagcactttgggaggccaaggagggtggatcacctgagtcaggagttccaagaccaccctgagcaacatgggtgaaaccccgtaactacaaaaaaggcaaaaattagctgggtgtggtggtggctcctgtggtcctagctactcaggaggctgaggtgagagggtcacttgaacctgt

SEQ ID NO: 60240 - DNA, 3180 bp, Homo sapiens
tctaatttttggttggtggcggcggtgctgggccaggggaaggaagggacacggaggccgccctcgccccgccacctcctaccagcttccccccagccccggctccgggagatgtgccgggcggggggcccgggttcgccgagccgcaggagagacacgctgggccgaccccagagcggcgctggacagagccaacacagatctatagatttctttgaactcggaatctcatagcaccaatatttttgcacagaactcttacttacatgtctcatcgaaactccagaacaaacatcaaaagcttgtcagctcatttgcagcttacatttttggtttcttccacaaaaatgataagccatcaccaaactcagaaaatgaacaaaattctgttaccctggaagtcctgcttgtgaaagtttgccacaaaaaaagaaaggatgtatgttgtccaataaggcaagttcccacaggtaaaaagcaggtgcctttgaatcctgacctcaatcaaacaaaacctggaaatttcccgtcccttgcagtttccagtaatgaatttgaacctagtaacagccacatggtgaagtcttactcgttgctatttagagtgactcgtccaagaagaagagagtttaatggaatgattaatggagaaaccatgaaaatattggtaattttttttttactagattttatcactggagattaagatggtcattgaaaatgattgtaccagtgttccttcatgatagtcatggtgctgagtcttaaagcaaacagtgaattcacctccacctcaacattttgttgtgcaaattttcaaacataaaggacaatgagaagtattttatagtgaacacttatctacttacctcttagattcaacaatgaatattttattatacttgttgcatatttatccccctacccatccctcttttcttccaacaattgtgaattcatctttgaggtattcattcaacaaacacataggtgctggggatgatttaatttaatcgaagatgattaaagcattcagtcctgtcctccaaagtctcacaacctagtgtagggaaatagacatgaaatatatcattgctgcaaaatgatgagtggcataatacaggtatatgtgaagttcagcagagaaacacgttggaagaaataatctttgactcttgaagtattgtttgaagtttttgggagttaccacgagtgagaaggagtttgcctagcaaagataattctaaacagaaacattagcatttgcaaagatgtggggttaatgttgtgagtgttaaaaagaacatatagtaaaaatgcaaaattggaaacgtggtctgtatattattgcaactttagtgtaattcctacctcatttgggataaatgtagcatgttttatgttaagggaccatatatcgtaacacatttttgttctaatatttgatttatgagaaatgtttgttaaatttagatgtcagtgaagagcttccagccagaagaaaatgaaatcgtgaggatggggaaaagacatttgttgcacaaatgacagtatttgataaaaacagagtttcactcttgttgcccaggctggagtgcagtggcatgatctggactcactgcaacctccacctcccaggtttaagcagttctcctgcctgagcctctcggattacagagatggggtttcaccatcttggccaagctggtcttgaactcctgaccttgtgatccacccacctcggcctcccaaagtgctgggattacaggcgtgagccactgcgtccagccggtaggtgctatttttaacatacccattttataagtgaggaaaatgaggcacgaaaagaaaaaaagattaaaaatagctaaataacctgatcccgactacctggctgatgactggtggaaccaggactcaaacacaggcattctgactctagaatcaatcaatctatctatctatttttttgaaatggagtttcatccttgttgcccaggctggagtgcaatggcgcgatctcagctcactgcaacctctgcctccctggttcaagcgattctcctgcctcagcctcctgagtagctgggattacagggatgcaccaccatgcccggctagttttgtatttttagtagagacggggtttcaccatgttggtcaggctggtctcgaactcctgacctcaggtgatccgcctgcctcggcttcccaaagtgctgggattagaggcgtgagccaccacacctggcctaattttgtatttgtagtagagacacggtttcaccatgttgctcaggctggtcttggaactcctgacctcaggtgatccaccctccttggcctcccaaagtgctgggattacggagtgagccaccgtgcccggcctagaatctatattcttaaccatttgtagccatgatggcacacttctattttatattctagctctagacacatagaaggtttgtcatagttgacattataatttatgtaactattgctgccagcgcctaaatcttccatataagaatttgcaatgatttgattactatttgttaagtaaataaagcatttaaaaagaactattataatcctaaaaaatcccattatggttatgaagacactattcaagcatgaagaacttcctatgtggcaagtttaagcttttccttttgtgttttcatttcagatgtcagtactttgtgtgctcttgaaataggaaatgtacagatccctattgccagacacatcattctctccatccagaaagccaactttgcaaggacaaaaaaaaaaattagtgtgaaacaaaatgtggcttttccaaagacagatgtgattatttatagtcaatgtggcctcaaaatgtcattgattgtgaaatagcaaacatgcgggatcataatatttgggtaggtttctgaagttatttcatatctgagcagtctaaagaagtatggggaggaggggccgggcatagtggctcacacctgtaatcccagcactttgggaggccaaggagggtggatcacctgagtcaggagttccaagaccaccctgagcaacatgggtgaaaccccgtaactacaaaaaaggcaaaaattagctgggtgtggtggtggctcctgtggtcctagctactcaggaggctgaggtgagagggtcacttgaacctgt

SEQ ID NO: 60241 - DNA, 3234 bp, Homo sapiens
aagtgggcggagcgaggccaggtagggtgagcggcctccgaagcggagcggggctctgaggagacactttttttttcctccctccttccctcctctcctcctcccttcccttcccctctcctcccctctctcctccttcccccctcggtccgccggagcctgctggggcgagcgagccaacacagatctatagatttcttcgaactcggaatctcatagcaccaatatttttgcacagaactcttacttacatgtctcatcgaaactccagaacaaacatcaaaaggaaaacatttaaagttgatgatatgttatcaaaagtagagaaaatgaaaggagagcaagaatctcatagcttgtcagctcatttgcagcttacatttttggtttcttccacaaaaatgataagccatcaccaaactcagaaaatgaacaaaattctgttaccctggaagtcctgcttgtgaaagtttgccacaaaaaaagaaaggatgtatgttgtccaataaggcaagttcccacaggtaaaaagcaggtgcctttgaatcctgacctcaatcaaacaaaacctggaaatttcccgtcccttgcagtttccagtaatgaatttgaacctagtaacagccacatggtgaagtcttactcgttgctatttagagtgactcgtccaagaagaagagagtttaatggaatgattaatggagaaaccatgaaaatattggtaattttttttttactagattttatcactggagattaagatggtcattgaaaatgattgtaccagtgttccttcatgatagtcatggtgctgagtcttaaagcaaacagtgaattcacctccacctcaacattttgttgtgcaaattttcaaacataaaggacaatgagaagtattttatagtgaacacttatctacttacctcttagattcaacaatgaatattttattatacttgttgcatatttatccccctacccatccctcttttcttccaacaattgtgaattcatctttgaggtattcattcaacaaacacataggtgctggggatgatttaatttaatcgaagatgattaaagcattcagtcctgtcctccaaagtctcacaacctagtgtagggaaatagacatgaaatatatcattgctgcaaaatgatgagtggcataatacaggtatatgtgaagttcagcagagaaacacgttggaagaaataatctttgactcttgaagtattgtttgaagtttttgggagttaccacgagtgagaaggagtttgcctagcaaagataattctaaacagaaacattagcatttgcaaagatgtggggttaatgttgtgagtgttaaaaagaacatatagtaaaaatgcaaaattggaaacgtggtctgtatattattgcaactttagtgtaattcctacctcatttgggataaatgtagcatgttttatgttaagggaccatatatcgtaacacatttttgttctaatatttgatttatgagaaatgtttgttaaatttagatgtcagtgaagagcttccagccagaagaaaatgaaatcgtgaggatggggaaaagacatttgttgcacaaatgacagtatttgataaaaacagagtttcactcttgttgcccaggctggagtgcagtggcatgatctggactcactgcaacctccacctcccaggtttaagcagttctcctgcctgagcctctcggattacagagatggggtttcaccatcttggccaagctggtcttgaactcctgaccttgtgatccacccacctcggcctcccaaagtgctgggattacaggcgtgagccactgcgtccagccggtaggtgctatttttaacatacccattttataagtgaggaaaatgaggcacgaaaagaaaaaaagattaaaaatagctaaataacctgatcccgactacctggctgatgactggtggaaccaggactcaaacacaggcattctgactctagaatcaatcaatctatctatctatttttttgaaatggagtttcatccttgttgcccaggctggagtgcaatggcgcgatctcagctcactgcaacctctgcctccctggttcaagcgattctcctgcctcagcctcctgagtagctgggattacagggatgcaccaccatgcccggctagttttgtatttttagtagagacggggtttcaccatgttggtcaggctggtctcgaactcctgacctcaggtgatccgcctgcctcggcttcccaaagtgctgggattagaggcgtgagccaccacacctggcctaattttgtatttgtagtagagacacggtttcaccatgttgctcaggctggtcttggaactcctgacctcaggtgatccaccctccttggcctcccaaagtgctgggattacggagtgagccaccgtgcccggcctagaatctatattcttaaccatttgtagccatgatggcacacttctattttatattctagctctagacacatagaaggtttgtcatagttgacattataatttatgtaactattgctgccagcgcctaaatcttccatataagaatttgcaatgatttgattactatttgttaagtaaataaagcatttaaaaagaactattataatcctaaaaaatcccattatggttatgaagacactattcaagcatgaagaacttcctatgtggcaagtttaagcttttccttttgtgttttcatttcagatgtcagtactttgtgtgctcttgaaataggaaatgtacagatccctattgccagacacatcattctctccatccagaaagccaactttgcaaggacaaaaaaaaaaattagtgtgaaacaaaatgtggcttttccaaagacagatgtgattatttatagtcaatgtggcctcaaaatgtcattgattgtgaaatagcaaacatgcgggatcataatatttgggtaggtttctgaagttatttcatatctgagcagtctaaagaagtatggggaggaggggccgggcatagtggctcacacctgtaatcccagcactttgggaggccaaggagggtggatcacctgagtcaggagttccaagaccaccctgagcaacatgggtgaaaccccgtaactacaaaaaaggcaaaaattagctgggtgtggtggtggctcctgtggtcctagctactcaggaggctgaggtgagagggtcacttgaacctgt

SEQ ID NO: 60242 - DNA, 3817 bp, Homo sapiens
ttgagacggagttttgctctttgttgcccaggctgcagtgcaatgacgcgatctcggctcacggcaacctccgcctcccaggttcaagtgattctcctgcctcagccttcccccaggtagctgggattacaggcatgcgccactatgcctggctatttttgtatttttagtggaggcagggtatctccatgttggtcaggccggtctcgaactcccgacctcaggtgatctgcccacctcagcctcccaaagtgctgggaatacaggcgtgagccaccgcgcctggccggctgactacaaattttttaagtgaccatttaaaaagtgaaattttcatcttgtttggcatcaatcaatagttcttttgttgactccagctacctattacagctgctttttggaagaaaatcggttataaatagtttaaattaagctaagttaaatgagtacaactgcttctcttgagttctgctcggtaacaataactatcttagaaaggcttaagaaaaatattgtaaagaaccttcagtataaaaagcgtagatgaactttgtgaatgtatgccattgattgaataccttttgatcttactgtgcatactaactttcttgatgtaaatatttagtgcgatataaatatttagtgcgtgatttccatagcagatgacaagtttatattgattataacatggtctcggttgatatttttctgacaagtaagtttagatcatgtttggattttgtttcctattacctagagccaacacagatctatagatttctttgaactcggaatctcatagcaccaatatttttgcacagaactcttacttacatgtctcatcgaaactccagaacaaacatcaaaaggaaaacatttaaagttgatgatatgttatcaaaagtagagaaaatgaaaggagagcaagaatctcatagcttgtcagctcatttgcagcttacatttttggtttcttccacaaaaatgataagccatcaccaaactcagaaaatgaacaaaattctgttaccctggaagtcctgcttgtgaaagtttgccacaaaaaaagaaaggatgtatgttgtccaataaggcaagttcccacaggtaaaaagcaggtgcctttgaatcctgacctcaatcaaacaaaacctggaaatttcccgtcccttgcagtttccagtaatgaatttgaacctagtaacagccacatggtgaagtcttactcgttgctatttagagtgactcgtccaagaagaagagagtttaatggaatgattaatggagaaaccatgaaaatattggtaattttttttttactagattttatcactggagattaagatggtcattgaaaatgattgtaccagtgttccttcatgatagtcatggtgctgagtcttaaagcaaacagtgaattcacctccacctcaacattttgttgtgcaaattttcaaacataaaggacaatgagaagtattttatagtgaacacttatctacttacctcttagattcaacaatgaatattttattatacttgttgcatatttatccccctacccatccctcttttcttccaacaattgtgaattcatctttgaggtattcattcaacaaacacataggtgctggggatgatttaatttaatcgaagatgattaaagcattcagtcctgtcctccaaagtctcacaacctagtgtagggaaatagacatgaaatatatcattgctgcaaaatgatgagtggcataatacaggtatatgtgaagttcagcagagaaacacgttggaagaaataatctttgactcttgaagtattgtttgaagtttttgggagttaccacgagtgagaaggagtttgcctagcaaagataattctaaacagaaacattagcatttgcaaagatgtggggttaatgttgtgagtgttaaaaagaacatatagtaaaaatgcaaaattggaaacgtggtctgtatattattgcaactttagtgtaattcctacctcatttgggataaatgtagcatgttttatgttaagggaccatatatcgtaacacatttttgttctaatatttgatttatgagaaatgtttgttaaatttagatgtcagtgaagagcttccagccagaagaaaatgaaatcgtgaggatggggaaaagacatttgttgcacaaatgacagtatttgataaaaacagagtttcactcttgttgcccaggctggagtgcagtggcatgatctggactcactgcaacctccacctcccaggtttaagcagttctcctgcctgagcctctcggattacagagatggggtttcaccatcttggccaagctggtcttgaactcctgaccttgtgatccacccacctcggcctcccaaagtgctgggattacaggcgtgagccactgcgtccagccggtaggtgctatttttaacatacccattttataagtgaggaaaatgaggcacgaaaagaaaaaaagattaaaaatagctaaataacctgatcccgactacctggctgatgactggtggaaccaggactcaaacacaggcattctgactctagaatcaatcaatctatctatctatttttttgaaatggagtttcatccttgttgcccaggctggagtgcaatggcgcgatctcagctcactgcaacctctgcctccctggttcaagcgattctcctgcctcagcctcctgagtagctgggattacagggatgcaccaccatgcccggctagttttgtatttttagtagagacggggtttcaccatgttggtcaggctggtctcgaactcctgacctcaggtgatccgcctgcctcggcttcccaaagtgctgggattagaggcgtgagccaccacacctggcctaattttgtatttgtagtagagacacggtttcaccatgttgctcaggctggtcttggaactcctgacctcaggtgatccaccctccttggcctcccaaagtgctgggattacggagtgagccaccgtgcccggcctagaatctatattcttaaccatttgtagccatgatggcacacttctattttatattctagctctagacacatagaaggtttgtcatagttgacattataatttatgtaactattgctgccagcgcctaaatcttccatataagaatttgcaatgatttgattactatttgttaagtaaataaagcatttaaaaagaactattataatcctaaaaaatcccattatggttatgaagacactattcaagcatgaagaacttcctatgtggcaagtttaagcttttccttttgtgttttcatttcagatgtcagtactttgtgtgctcttgaaataggaaatgtacagatccctattgccagacacatcattctctccatccagaaagccaactttgcaaggacaaaaaaaaaaattagtgtgaaacaaaatgtggcttttccaaagacagatgtgattatttatagtcaatgtggcctcaaaatgtcattgattgtgaaatagcaaacatgcgggatcataatatttgggtaggtttctgaagttatttcatatctgagcagtctaaagaagtatggggaggaggggccgggcatagtggctcacacctgtaatcccagcactttgggaggccaaggagggtggatcacctgagtcaggagttccaagaccaccctgagcaacatgggtgaaaccccgtaactacaaaaaaggcaaaaattagctgggtgtggtggtggctcctgtggtcctagctactcaggaggctgaggtgagagggtcacttgaacctgt

SEQ ID NO: 60243 - DNA, 3837 bp, Homo sapiens
ttgagacggagttttgctctttgttgcccaggctgcagtgcaatgacgcgatctcggctcacggcaacctccgcctcccaggttcaagtgattctcctgcctcagccttcccccaggtagctgggattacaggcatgcgccactatgcctggctatttttgtatttttagtggaggcagggtatctccatgttggtcaggccggtctcgaactcccgacctcaggtgatctgcccacctcagcctcccaaagtgctgggaatacaggcgtgagccaccgcgcctggccggctgactacaaattttttaagtgaccatttaaaaagtgaaattttcatcttgtttggcatcaatcaatagttcttttgttgactccagctacctattacagctgctttttggaagaaaatcggttataaatagtttaaattaagctaagttaaatgagtacaactgcttctcttgagttctgctcggtaacaataactatcttagaaaggcttaagaaaaatattgtaaagaaccttcagtataaaaagcgtagatgaactttgtgaatgtatgccattgattgaataccttttgatcttactgtgcatactaactttcttgatgtaaatatttagtgcgatataaatatttagtgcgtgatttccatagcagatgacaagtttatattgattataacatggtctcggttgatatttttctgacaagtaagtttagatcatgtttggattttgtttcctattacctagagccaacacagatctatagatttctttgaactcggaatctcatagcagtaagtagtcaacaaaattcatcaatattatttctctcttataactgcatctgtattcaattttaacatttttaaaactctttttgtagccaatatttttgcacagaactcttacttacatgtctcatcgaaactccagaacaaacatcaaaagcttgtcagctcatttgcagcttacatttttggtttcttccacaaaaatgataagccatcaccaaactcagaaaatgaacaaaattctgttaccctggaagtcctgcttgtgaaagtttgccacaaaaaaagaaaggatgtatgttgtccaataaggcaagttcccacaggtaaaaagcaggtgcctttgaatcctgacctcaatcaaacaaaacctggaaatttcccgtcccttgcagtttccagtaatgaatttgaacctagtaacagccacatggtgaagtcttactcgttgctatttagagtgactcgtccaagaagaagagagtttaatggaatgattaatggagaaaccatgaaaatattggtaattttttttttactagattttatcactggagattaagatggtcattgaaaatgattgtaccagtgttccttcatgatagtcatggtgctgagtcttaaagcaaacagtgaattcacctccacctcaacattttgttgtgcaaattttcaaacataaaggacaatgagaagtattttatagtgaacacttatctacttacctcttagattcaacaatgaatattttattatacttgttgcatatttatccccctacccatccctcttttcttccaacaattgtgaattcatctttgaggtattcattcaacaaacacataggtgctggggatgatttaatttaatcgaagatgattaaagcattcagtcctgtcctccaaagtctcacaacctagtgtagggaaatagacatgaaatatatcattgctgcaaaatgatgagtggcataatacaggtatatgtgaagttcagcagagaaacacgttggaagaaataatctttgactcttgaagtattgtttgaagtttttgggagttaccacgagtgagaaggagtttgcctagcaaagataattctaaacagaaacattagcatttgcaaagatgtggggttaatgttgtgagtgttaaaaagaacatatagtaaaaatgcaaaattggaaacgtggtctgtatattattgcaactttagtgtaattcctacctcatttgggataaatgtagcatgttttatgttaagggaccatatatcgtaacacatttttgttctaatatttgatttatgagaaatgtttgttaaatttagatgtcagtgaagagcttccagccagaagaaaatgaaatcgtgaggatggggaaaagacatttgttgcacaaatgacagtatttgataaaaacagagtttcactcttgttgcccaggctggagtgcagtggcatgatctggactcactgcaacctccacctcccaggtttaagcagttctcctgcctgagcctctcggattacagagatggggtttcaccatcttggccaagctggtcttgaactcctgaccttgtgatccacccacctcggcctcccaaagtgctgggattacaggcgtgagccactgcgtccagccggtaggtgctatttttaacatacccattttataagtgaggaaaatgaggcacgaaaagaaaaaaagattaaaaatagctaaataacctgatcccgactacctggctgatgactggtggaaccaggactcaaacacaggcattctgactctagaatcaatcaatctatctatctatttttttgaaatggagtttcatccttgttgcccaggctggagtgcaatggcgcgatctcagctcactgcaacctctgcctccctggttcaagcgattctcctgcctcagcctcctgagtagctgggattacagggatgcaccaccatgcccggctagttttgtatttttagtagagacggggtttcaccatgttggtcaggctggtctcgaactcctgacctcaggtgatccgcctgcctcggcttcccaaagtgctgggattagaggcgtgagccaccacacctggcctaattttgtatttgtagtagagacacggtttcaccatgttgctcaggctggtcttggaactcctgacctcaggtgatccaccctccttggcctcccaaagtgctgggattacggagtgagccaccgtgcccggcctagaatctatattcttaaccatttgtagccatgatggcacacttctattttatattctagctctagacacatagaaggtttgtcatagttgacattataatttatgtaactattgctgccagcgcctaaatcttccatataagaatttgcaatgatttgattactatttgttaagtaaataaagcatttaaaaagaactattataatcctaaaaaatcccattatggttatgaagacactattcaagcatgaagaacttcctatgtggcaagtttaagcttttccttttgtgttttcatttcagatgtcagtactttgtgtgctcttgaaataggaaatgtacagatccctattgccagacacatcattctctccatccagaaagccaactttgcaaggacaaaaaaaaaaattagtgtgaaacaaaatgtggcttttccaaagacagatgtgattatttatagtcaatgtggcctcaaaatgtcattgattgtgaaatagcaaacatgcgggatcataatatttgggtaggtttctgaagttatttcatatctgagcagtctaaagaagtatggggaggaggggccgggcatagtggctcacacctgtaatcccagcactttgggaggccaaggagggtggatcacctgagtcaggagttccaagaccaccctgagcaacatgggtgaaaccccgtaactacaaaaaaggcaaaaattagctgggtgtggtggtggctcctgtggtcctagctactcaggaggctgaggtgagagggtcacttgaacctgt

SEQ ID NO: 60244 - DNA, 1644 bp, Homo sapiens
aagtgggcggagcgaggccaggtagggtgagcggcctccgaagcggagcggggctctgaggagacactttttttttcctccctccttccctcctctcctcctcccttcccttcccctctcctcccctctctcctccttcccccctcggtccgccggagcctgctggggcgagcggttggtattgcaggcgcttgctctccggggccgcccggcgggtagctggcggggggaggaggcaggaaccgcgatggcgcctcagaagcacggcggtgggggagggggcggctcggggcccagcgcggggtccgggggaggcggcttcgggggttcggcggcggtggcggcggcgacggcttcgggcggcaaatccggcggcgggagctgtggagggggtggcagttactcggcctcctcctcctcctccgcggcggcagcggcgggggctgcggtgttaccggtgaagaagccgaaaatggagcacgtccaggctgaccacgagcttttcctccaggcctttgagaagccaacacagatctatagatttcttcgaactcggaatctcatagcaccaatatttttgcacagaactcttacttacatgtctcatcgaaactccagaacaaacatcaaaaggaaaacatttaaagttgatgatatgttatcaaaagtagagaaaatgaaaggagagcaagaatctcatagcttgtcagctcatttgcagcttacatttttggtttcttccacaaaaatgataagccatcaccaaactcagaaaatgaacaaaattctgttaccctggaagtcctgcttgtgaaagtttgccacaaaaaaagaaaggatgtatgttgtccaataaggcaagttcccacaggtaaaaagcaggtgcctttgaatcctgacctcaatcaaacaaaacctggaaatttcccgtcccttgcagtttccagtaatgaatttgaacctagtaacagccacatggtgaagtcttactcgttgctatttagagtgactcgtccaagaagaagagagtttaatggaatgattaatggagaaaccatgaaaatattggtaattttttttttactagattttatcactggagattaagatggtcattgaaaatgattgtaccagtgttccttcatgatagtcatggtgctgagtcttaaagcaaacagtgaattcacctccacctcaacattttgttgtgcaaattttcaaacataaaggacaatgagaagtattttatagtgaacacttatctacttacctcttagattcaacaatgaatattttattatacttgttgcatatttatccccctacccatccctcttttcttccaacaattgtgaattcatctttgaggtattcattcaacaaacacataggtgctggggatgatttaatttaatcgaagatgattaaagcattcagtcctgtcctccaaagtctcacaacctagtgtagggaaatagacatgaaatatatcattgctgcaaaatgatgagtggcataatacaggtatatgtgaagttcagcagagaaacacgttggaagaaataatctttgactcttgaagtattgtttgaagtttttgggagttaccacgagtgagaaaccgtcgattcgataagccgtgga

SEQ ID NO: 60245 - DNA, 3137 bp, Homo sapiens
tctaatttttggttggtggcggcggtgctgggccaggggaaggaagggacacggaggccgccctcgccccgccacctcctaccagcttccccccagccccggctccgggagatgtgccgggcggggggcccgggttcgccgagccgcaggagagacacgctgggccgaccccagagcggcgctggacaggaaaacatttaaagttgatgatatgttatcaaaagtagagaaaatgaaaggagagcaagaatctcatagcttgtcagctcatttgcagcttacatttttggtttcttccacaaaaatgataagccatcaccaaactcagaaaatgaacaaaattctgttaccctggaagtcctgcttgtgaaagtttgccacaaaaaaagaaaggatgtatgttgtccaataaggcaagttcccacaggtaaaaagcaggtgcctttgaatcctgacctcaatcaaacaaaacctggaaatttcccgtcccttgcagtttccagtaatgaatttgaacctagtaacagccacatggtgaagtcttactcgttgctatttagagtgactcgtccaagaagaagagagtttaatggaatgattaatggagaaaccatgaaaatattggtaattttttttttactagattttatcactggagattaagatggtcattgaaaatgattgtaccagtgttccttcatgatagtcatggtgctgagtcttaaagcaaacagtgaattcacctccacctcaacattttgttgtgcaaattttcaaacataaaggacaatgagaagtattttatagtgaacacttatctacttacctcttagattcaacaatgaatattttattatacttgttgcatatttatccccctacccatccctcttttcttccaacaattgtgaattcatctttgaggtattcattcaacaaacacataggtgctggggatgatttaatttaatcgaagatgattaaagcattcagtcctgtcctccaaagtctcacaacctagtgtagggaaatagacatgaaatatatcattgctgcaaaatgatgagtggcataatacaggtatatgtgaagttcagcagagaaacacgttggaagaaataatctttgactcttgaagtattgtttgaagtttttgggagttaccacgagtgagaaggagtttgcctagcaaagataattctaaacagaaacattagcatttgcaaagatgtggggttaatgttgtgagtgttaaaaagaacatatagtaaaaatgcaaaattggaaacgtggtctgtatattattgcaactttagtgtaattcctacctcatttgggataaatgtagcatgttttatgttaagggaccatatatcgtaacacatttttgttctaatatttgatttatgagaaatgtttgttaaatttagatgtcagtgaagagcttccagccagaagaaaatgaaatcgtgaggatggggaaaagacatttgttgcacaaatgacagtatttgataaaaacagagtttcactcttgttgcccaggctggagtgcagtggcatgatctggactcactgcaacctccacctcccaggtttaagcagttctcctgcctgagcctctcggattacagagatggggtttcaccatcttggccaagctggtcttgaactcctgaccttgtgatccacccacctcggcctcccaaagtgctgggattacaggcgtgagccactgcgtccagccggtaggtgctatttttaacatacccattttataagtgaggaaaatgaggcacgaaaagaaaaaaagattaaaaatagctaaataacctgatcccgactacctggctgatgactggtggaaccaggactcaaacacaggcattctgactctagaatcaatcaatctatctatctatttttttgaaatggagtttcatccttgttgcccaggctggagtgcaatggcgcgatctcagctcactgcaacctctgcctccctggttcaagcgattctcctgcctcagcctcctgagtagctgggattacagggatgcaccaccatgcccggctagttttgtatttttagtagagacggggtttcaccatgttggtcaggctggtctcgaactcctgacctcaggtgatccgcctgcctcggcttcccaaagtgctgggattagaggcgtgagccaccacacctggcctaattttgtatttgtagtagagacacggtttcaccatgttgctcaggctggtcttggaactcctgacctcaggtgatccaccctccttggcctcccaaagtgctgggattacggagtgagccaccgtgcccggcctagaatctatattcttaaccatttgtagccatgatggcacacttctattttatattctagctctagacacatagaaggtttgtcatagttgacattataatttatgtaactattgctgccagcgcctaaatcttccatataagaatttgcaatgatttgattactatttgttaagtaaataaagcatttaaaaagaactattataatcctaaaaaatcccattatggttatgaagacactattcaagcatgaagaacttcctatgtggcaagtttaagcttttccttttgtgttttcatttcagatgtcagtactttgtgtgctcttgaaataggaaatgtacagatccctattgccagacacatcattctctccatccagaaagccaactttgcaaggacaaaaaaaaaaattagtgtgaaacaaaatgtggcttttccaaagacagatgtgattatttatagtcaatgtggcctcaaaatgtcattgattgtgaaatagcaaacatgcgggatcataatatttgggtaggtttctgaagttatttcatatctgagcagtctaaagaagtatggggaggaggggccgggcatagtggctcacacctgtaatcccagcactttgggaggccaaggagggtggatcacctgagtcaggagttccaagaccaccctgagcaacatgggtgaaaccccgtaactacaaaaaaggcaaaaattagctgggtgtggtggtggctcctgtggtcctagctactcaggaggctgaggtgagagggtcacttgaacctgt

SEQ ID NO: 60246 - DNA, 1266 bp, Homo sapiens
aagtgggcggagcgaggccaggtagggtgagcggcctccgaagcggagcggggctctgaggagacactttttttttcctccctccttccctcctctcctcctcccttcccttcccctctcctcccctctctcctccttcccccctcggtccgccggagcctgctggggcgagcggttggtattgcaggcgcttgctctccggggccgcccggcgggtagctggcggggggaggaggcaggaaccgcgatggcgcctcagaagcacggcggtgggggagggggcggctcggggcccagcgcggggtccgggggaggcggcttcgggggttcggcggcggtggcggcggcgacggcttcgggcggcaaatccggcggcgggagctgtggagggggtggcagttactcggcctcctcctcctcctccgcggcggcagcggcgggggctgcggtgttaccggtgaagaagccgaaaatggagcacgtccaggctgaccacgagcttttcctccaggcctttgagaagccaacacagatctatagatttcttcgaactcggaatctcatagcaccaatatttttgcacagaactcttacttacatgtctcatcgaaactccagaacaaacatcaaaaggaaaacatttaaagttgatgatatgttatcaaaagtagagaaaatgaaaggagagcaagaatctcatagcttgtcagctcatttgcagcttacatttttggtttcttccacaaaaatgataagccatcaccaaactcagaaaatgaacaaaattctgttaccctggaagtcctgcttgtgaaagtttgccacaaaaaaagaaaggatgtatgttgtccaataaggcaagttcccacaggtaaaaagcaggtgcctttgaatcctgacctcaatcaaacaaaacctggaaatttcccgtcccttgcagtttccagtaatgaatttgaacctagtaacagccacatggtgaagtcttactcgttgctatttagagtgactcgtccaagaagaagagagtttaatggaatgattaatggagaaaccatgaaaatattgatgtcagtgaagagcttccagccagaagaaaatgaaatcgtgaggatggggaaaagacatttgttgcacaaatgacagtatttgataaaaggtttcgctcttctcgcccaggttggagtgtaatggcgcaatcttggctcactgcaacctccagcctgggcaacaagagtgaaactctgtttttatcaaatgtcgacg

SEQ ID NO: 60247 - DNA, 1844 bp, Homo sapiens
ttgagacggagttttgctctttgttgcccaggctgcagtgcaatgacgcgatctcggctcacggcaacctccgcctcccaggttcaagtgattctcctgcctcagccttcccccaggtagctgggattacaggcatgcgccactatgcctggctatttttgtatttttagtggaggcagggtatctccatgttggtcaggccggtctcgaactcccgacctcaggtgatctgcccacctcagcctcccaaagtgctgggaatacaggcgtgagccaccgcgcctggccggctgactacaaattttttaagtgaccatttaaaaagtgaaattttcatcttgtttggcatcaatcaatagttcttttgttgactccagctacctattacagctgctttttggaagaaaatcggttataaatagtttaaattaagctaagttaaatgagtacaactgcttctcttgagttctgctcggtaacaataactatcttagaaaggcttaagaaaaatattgtaaagaaccttcagtataaaaagcgtagatgaactttgtgaatgtatgccattgattgaataccttttgatcttactgtgcatactaactttcttgatgtaaatatttagtgcgatataaatatttagtgcgtgatttccatagcagatgacaagtttatattgattataacatggtctcggttgatatttttctgacaagtaagtttagatcatgtttggattttgtttcctattacctagagccaacacagatctatagatttctttgaactcggaatctcatagcaccaatatttttgcacagaactcttacttacatgtctcatcgaaactccagaacaaacatcaaaaggaaaacatttaaagttgatgatatgttatcaaaagtagagaaaatgaaaggagagcaagaatctcatagcttgtcagctcatttgcagcttacatttttggtttcttccacaaaaatgataagccatcaccaaactcagaaaatgaacaaaattctgttaccctggaagtcctgcttgtgaaagtttgccacaaaaaaagaaaggatgtatgttgtccaataaggcaagttcccacaggtaaaaagcaggtgcctttgaatcctgacctcaatcaaacaaaacctggaaatttcccgtcccttgcagtttccagtaatgaatttgaacctagtaacagccacatggtgaagtcttactcgttgctatttagagtgactcgtccaagaagaagagagtttaatggaatgattaatggagaaaccatgaaaatattgatgtcagtgaagagcttccagccagaagaaaatgaaatcgtgaggatggggaaaagacatttgttgcacaaatgacagtatttgataaaaacaggtaatgttgatgaacaagcgaggctcccacaatgttctggaaatgttttcattctgaagcagaatataattatttatattgattatttcattgcctttgtttctttttattcttacggatgaaaaaacaaatttgcaaacactgaatttttgtctgtttcatagaaaacaataattaaggaactatttgcatagatagctcagttaaacttacttatttggcgaatattttgagtgtctgctcttttccagacactgttctggacattaaggcaacaaaatccctgccttcaccatggagcttaacttttagtggaggaaacagaccaccacccaaaaaatcaactgatgtcacttagtgatgagtgttgtgaagaaaaatagagaataaatggttactgttttagagcgatatcctctgggaggaggtagtactttgagaagaga

SEQ ID NO: 60248 - DNA, 2331 bp, Homo sapiens
tctaatttttggttggtggcggcggtgctgggccaggggaaggaagggacacggaggccgccctcgccccgccacctcctaccagcttccccccagccccggctccgggagatgtgccgggcggggggcccgggttcgccgagccgcaggagagacacgctgggccgaccccagagcggcgctggacaggaaaacatttaaagttgatgatatgttatcaaaagtagagaaaatgaaaggagagcaagaatctcatagcttgtcagctcatttgcagcttacatttttggtttcttccacaaaaatgataagccatcaccaaactcagaaaatgaacaaaattctgttaccctggaagtcctgcttgtgaaagtttgccacaaaaaaagaaaggatgtatgttgtccaataaggcaagttcccacaggtaaaaagcaggtgcctttgaatcctgacctcaatcaaacaaaacctggaaatttcccgtcccttgcagtttccagtaatgaatttgaacctagtaacagccacatggtgaagtcttactcgttgctatttagagtgactcgtccaagaagaagagagtttaatggaatgattaatggagaaaccatgaaaatattgatgtcagtgaagagcttccagccagaagaaaatgaaatcgtgaggatggggaaaagacatttgttgcacaaatgacagtatttgataaaaacagagtttcactcttgttgcccaggctggagtgcagtggcatgatctggactcactgcaacctccacctcccaggtttaagcagttctcctgcctgagcctctcggattacagagatggggtttcaccatcttggccaagctggtcttgaactcctgaccttgtgatccacccacctcggcctcccaaagtgctgggattacaggcgtgagccactgcgtccagccggtaggtgctatttttaacatacccattttataagtgaggaaaatgaggcacgaaaagaaaaaaagattaaaaatagctaaataacctgatcccgactacctggctgatgactggtggaaccaggactcaaacacaggcattctgactctagaatcaatcaatctatctatctatttttttgaaatggagtttcatccttgttgcccaggctggagtgcaatggcgcgatctcagctcactgcaacctctgcctccctggttcaagcgattctcctgcctcagcctcctgagtagctgggattacagggatgcaccaccatgcccggctagttttgtatttttagtagagacggggtttcaccatgttggtcaggctggtctcgaactcctgacctcaggtgatccgcctgcctcggcttcccaaagtgctgggattagaggcgtgagccaccacacctggcctaattttgtatttgtagtagagacacggtttcaccatgttgctcaggctggtcttggaactcctgacctcaggtgatccaccctccttggcctcccaaagtgctgggattacggagtgagccaccgtgcccggcctagaatctatattcttaaccatttgtagccatgatggcacacttctattttatattctagctctagacacatagaaggtttgtcatagttgacattataatttatgtaactattgctgccagcgcctaaatcttccatataagaatttgcaatgatttgattactatttgttaagtaaataaagcatttaaaaagaactattataatcctaaaaaatcccattatggttatgaagacactattcaagcatgaagaacttcctatgtggcaagtttaagcttttccttttgtgttttcatttcagatgtcagtactttgtgtgctcttgaaataggaaatgtacagatccctattgccagacacatcattctctccatccagaaagccaactttgcaaggacaaaaaaaaaaattagtgtgaaacaaaatgtggcttttccaaagacagatgtgattatttatagtcaatgtggcctcaaaatgtcattgattgtgaaatagcaaacatgcgggatcataatatttgggtaggtttctgaagttatttcatatctgagcagtctaaagaagtatggggaggaggggccgggcatagtggctcacacctgtaatcccagcactttgggaggccaaggagggtggatcacctgagtcaggagttccaagaccaccctgagcaacatgggtgaaaccccgtaactacaaaaaaggcaaaaattagctgggtgtggtggtggctcctgtggtcctagctactcaggaggctgaggtgagagggtcacttgaacctgt

SEQ ID NO: 60249 - DNA, 1195 bp, Homo sapiens
aaaatgaaaggagagcaagaatctcatagcttgtcagctcatttgcagcttacattttctctacttttgataacatatcatcaactttaaatgttatcaaaagtagagaaaatgaaaggagagcaagaatctcatagcttgtcagctcatttgcagcttacatttttggtttcttccacaaaaatgataagccatcaccaaactcagaaaatgaacaaaattctgttaccctggaagtcctgcttgtgaaagtttgccacaaaaaaagaaaggatgtatgttgtccaataaggcaagttcccacaggtaaaaagcaggtgcctttgaatcctgacctcaatcaaacaaaacctggaaatttcccgtcccttgcagtttccagtaatgaatttgaacctagtaacagccacatggtgaagtcttactcgttgctatttagagtgactcgtccaagaagaagagagtttaatggaatgattaatggagaaaccatgaaaatattgatgtcagtgaagagcttccagccagaagaaaatgaaatcgtgaggatggggaaaagacatttgttgcacaaatgacagtatttgataaaaacagagtttcactcttgttgcccaggctggagtgcagtggcatgatctggactcactgcaacctccacctcccaggtttaagcagttctcctgcctgagcctctcggattacagatgtcagtactttgtgtgctcttgaaataggaaatgtacagatccctattgccagacacatcattctctccatccagaaagccaactttgcaaggacaaaaaaaaaaattagtgtgaaacaaaatgtggcttttccaaagacagatgtgattatttatagtcaatgtggcctcaaaatgtcattgattgtgaaatagcaaacatgcgggatcataatatttgggtaggtttctgaagttatttcatatctgagcagtctaaagaagtatggggaggaggggccgggcatagtggctcacacctgtaatcccagcactttgggaggccaaggagggtggatcacctgagtcaggagttccaagaccaccctgagcaacatgggtgaaaccccgtaactacaaaaaaggcaaaaattagctgggtgtggtggtggctcctgtggtcctagctactcaggaggctgaggtgagagggtcacttgaacctgt

SEQ ID NO: 60250 - DNA, 1481 bp, Homo sapiens
ttgagacggagttttgctctttgttgcccaggctgcagtgcaatgacgcgatctcggctcacggcaacctccgcctcccaggttcaagtgattctcctgcctcagccttcccccaggtagctgggattacaggcatgcgccactatgcctggctatttttgtatttttagtggaggcagggtatctccatgttggtcaggccggtctcgaactcccgacctcaggtgatctgcccacctcagcctcccaaagtgctgggaatacaggcgtgagccaccgcgcctggccggctgactacaaattttttaagtgaccatttaaaaagtgaaattttcatcttgtttggcatcaatcaatagttcttttgttgactccagctacctattacagctgctttttggaagaaaatcggttataaatagtttaaattaagctaagttaaatgagtacaactgcttctcttgagttctgctcggtaacaataactatcttagaaaggcttaagaaaaatattgtaaagaaccttcagtataaaaagcgtagatgaactttgtgaatgtatgccattgattgaataccttttgatcttactgtgcatactaactttcttgatgtaaatatttagtgcgatataaatatttagtgcgtgatttccatagcagatgacaagtttatattgattataacatggtctcggttgatatttttctgacaagtaagtttagatcatgtttggattttgtttcctattacctagagccaacacagatctatagatttctttgaactcggaatctcatagcagtaagtagtcaacaaaattcatcaatattatttctctcttataactgcatctgtattcaattttaacatttttaaaactctttttgtagccaatatttttgcacagaactcttacttacatgtctcatcgaaactccagaacaaacatcaaaaggtacattttatgaatcttatttcaagctgatcaaaccatgttagttttattttaaagtactatttctcaaaattaaaaaaaagaacaaaaataagtactatttctaactaaagatttaatatgaaaactgaagtgagagagtgactggttgaattggttgcacagtggttttcaatagtataatctttgtaagtctcaggttgttattagctttttttttttttcccctaatagaaatgaggctgggtgtggtggctcatgcctgtaatcccagcactttgggaggccaagttgggcggatcacttgaaggcaggagtttgagaccagtttggccaacatggcaaaaccctatctctcctaaaacaaaaattagccgggcgtggtggtgtgtgcctgtaatcccagttacttgcgaggctgaggcaggagaattgcttgagcccgggaggtggaggttgcagtgagccgagattgcgccgttgcacttcagcctgggcaacagagcgagactctacctcaaag

SEQ ID NO: 60251 - DNA, 1379 bp, Homo sapiens
  misc_feature (1184)..(1184): n is a, c, g, or t
  misc_feature (1188)..(1188): n is a, c, g, or t
  misc_feature (1203)..(1203): n is a, c, g, or t
  misc_feature (1236)..(1236): n is a, c, g, or t
ttgagacggagttttgctctttgttgcccaggctgcagtgcaatgacgcgatctcggctcacggcaacctccgcctcccaggttcaagtgattctcctgcctcagccttcccccaggtagctgggattacaggcatgcgccactatgcctggctatttttgtatttttagtggaggcagggtatctccatgttggtcaggccggtctcgaactcccgacctcaggtgatctgcccacctcagcctcccaaagtgctgggaatacaggcgtgagccaccgcgcctggccggctgactacaaattttttaagtgaccatttaaaaagtgaaattttcatcttgtttggcatcaatcaatagttcttttgttgactccagctacctattacagctgctttttggaagaaaatcggttataaatagtttaaattaagctaagttaaatgagtacaactgcttctcttgagttctgctcggtaacaataactatcttagaaaggcttaagaaaaatattgtaaagaaccttcagtataaaaagcgtagatgaactttgtgaatgtatgccattgattgaataccttttgatcttactgtgcatactaactttcttgatgtaaatatttagtgcgatataaatatttagtgcgtgatttccatagcagatgacaagtttatattgattataacatggtctcggttgatatttttctgacaagtaagtttagatcatgtttggattttgtttcctattacctagagccaacacagatctatagatttctttgaactcggaatctcatagcagtaagtagtcaacaaaattcatcaatattatttctctcttataactgcatctgtattcaattttaacatttttaaaactctttttgtagccaatatttttgcacagaactcttacttacatgtctcatcgaaactccagaacaaacatcaaaaggaaaacatttaaagttgatgatatgttatcaaaagtagagaaaatgaaaggagagcaagaatctcatagaaaaagaggaatccagtcgggctcggtggctcacacctataatcccagctacttgggaggctgagacaggagaatcgcttgaactcgggaggtggaggttgcagtgagccgaagattgcgccattacactccaacctgggcgagaagagcgacactncccnatctcaaaaaagaanaagaggagtcctggtcaaatttacagggctaanctcttcataatatgtccttatttccagtcattacttgctccttagtactctcttgccacaatatctttctgtaactgttcccatctgactataaaaatgcctagattgtcaccatcatttaaaaatatatatatatgcccttt

SEQ ID NO: 60252 - DNA, 735 bp, Homo sapiens
aaaagaaacttgacagtgttacaaaattacctcctgtgaaatagcaagactattttttatggaataaacaagaaagaatcttgttctaccgaattcttgactcaccaacacaattttttttttttttttggagacagagtttcactcttgttgcccaggctggagtgcagtggcatgatctggactcactgcaacctccacctcccaggtttaagcagttctcctgcctgagcctctcggattacagatgtcagtactttgtgtgctcttgaaataggaaatgtacagatccctattgccagacacatcattctctccatccagaaagccaactttgcaaggacaaaaaaaaaaattagtgtgaaacaaaatgtggcttttccaaagacagatgtgattatttatagtcaatgtggcctcaaaatgtcattgattgtgaaatagcaaacatgcgggatcataatatttgggtaggtttctgaagttatttcatatctgagcagtctaaagaagtatggggaggaggggccgggcatagtggctcacacctgtaatcccagcactttgggaggccaaggagggtggatcacctgagtcaggagttccaagaccaccctgagcaacatgggtgaaaccccgtaactacaaaaaaggcaaaaattagctgggtgtggtggtggctcctgtggtcctagctactcaggaggctgaggtgagagggtcacttgaacctgt

SEQ ID NO: 60253 - DNA, 743 bp, Homo sapiens
tcagaatatgatcattggtagataaaaccagttttgtttttgtttttttaaggatgatgatcctttctgttaaacaacatattttaactatatggatttactgtttcataatgtagttgttgaccatgggattattagtcatttttttaatttctaatggtcctattagtcattgtcatgttaaaatagaacatttaagagatttgataaaagtacatgagtttaacattttagcctggtttttttgttgttgctaaaaagccttaccagagagatttagcatgcttttaattctaaatttctaatatacaactgtttcagatcactgttagctaaatattagatgtactgtatcataatttcattatgttggagaaaacctcaattgctttaatatttggaatataggtatttcaaatgtttatttttgcttcacagttttcagaactatggttagaattttaacattccatttggtgatcatggcctatctcctgtgtttcctatagctgtgattagaatttttattataattcttattgcttatatacaaataaatataaattaataatctttacctttgcaggatgtatgttgtccaataaggcaagttcccacaggtaaaaagcaggtgcctttgaatcctgacctcaatcaaacaaaacctggaaatttcccgtcccttgcagtttccagtaatgaatttgaacctagtaacagccacatggtgaagtcttactcgt

SEQ ID NO: 60254 - DNA, 1608 bp, Homo sapiens
aagtgggcggagcgaggccaggtagggtgagcggcctccgaagcggagcggggctctgaggagacactttttttttcctccctccttccctcctctcctcctcccttcccttcccctctcctcccctctctcctccttcccccctcggtccgccggagcctgctggggcgagcggttggtattgcaggcgcttgctctccggggccgcccggcgggtagctggcggggggaggaggcaggaaccgcgatggcgcctcagaagcacggcggtgggggagggggcggctcggggcccagcgcggggtccgggggaggcggcttcgggggttcggcggcggtggcggcggcgacggcttcgggcggcaaatccggcggcgggagctgtggagggggtggcagttactcggcctcctcctcctcctccgcggcggcagcggcgggggctgcggtgttaccggtgaagaagccgaaaatggagcacgtccaggctgaccacgagcttttcctccaggcctttgagaagccaacacagatctatagatttcttcgaactcggaatctcatagcaccaatatttttgcacagaactcttacttacatgtctcatcgaaactccagaacaaacatcaaaaggaaaacatttaaagttgatgatatgttatcaaaagtagagaaaatgaaaggagagcaagaatctcatagcttgtcagctcatttgcagcttacatttttggtttcttccacaaaaatgataagccatcaccaaactcagaaaatgaacaaaattctgttaccctggaagtcctgcttgtgaaagtttgccacaaaaaaagaaaggatgtatgttgtccaataaggcaagttcccacaggtaaaaagcaggtgcctttgaatcctgacctcaatcaaacaaaacctggaaatttcccgtcccttgcagtttccagtaatgaatttgaacctagtaacagccacatggtgaagtcttactcgttgctatttagagtgactcgtccaagaagaagagagtttaatggaatgattaatggagaaaccatgaaaatattgatgtcagtgaagagcttccagccagaagaaaatgaaatcgtgaggatggggaaaagacatttgttgcacaaatgacagtatttgataaaaacaggtaatgttgatgaacaagcgaggctcccacaatgttctggaaatgttttcattctgaagcagaatataattatttatattgattatttcattgcctttgtttctttttattcttacggatgaaaaaacaaatttgcaaacactgaatttttgtctgtttcatagaaaacaataattaaggaactatttgcatagatagctcagttaaacttacttatttggcgaatattttgagtgtctgctcttttccagacactgttctggacattaaggcaacaaaatccctgccttcaccatggagcttaacttttagtggaggaaacagaccaccacccaaaaaatcaactgatgtcacttagtgatgagtgttgtgaagaaaaatagagaataaatggttactgttttagagcgatatcctctgggaggaggtagtactttgagaagaga

SEQ ID NO: 60255 - DNA, 2401 bp, Homo sapiens
aagtgggcggagcgaggccaggtagggtgagcggcctccgaagcggagcggggctctgaggagacactttttttttcctccctccttccctcctctcctcctcccttcccttcccctctcctcccctctctcctccttcccccctcggtccgccggagcctgctggggcgagcggttggtattgcaggcgcttgctctccggggccgcccggcgggtagctggcggggggaggaggcaggaaccgcgatggcgcctcagaagcacggcggtgggggagggggcggctcggggcccagcgcggggtccgggggaggcggcttcgggggttcggcggcggtggcggcggcgacggcttcgggcggcaaatccggcggcgggagctgtggagggggtggcagttactcggcctcctcctcctcctccgcggcggcagcggcgggggctgcggtgttaccggtgaagaagccgaaaatggagcacgtccaggctgaccacgagcttttcctccaggcctttgagaagccaacacagatctatagatttcttcgaactcggaatctcatagcaccaatatttttgcacagaactcttacttacatgtctcatcgaaactccagaacaaacatcaaaaggaaaacatttaaagttgatgatatgttatcaaaagtagagaaaatgaaaggagagcaagaatctcatagcttgtcagctcatttgcagcttacatttttggtttcttccacaaaaatgataagccatcaccaaactcagaaaatgaacaaaattctgttaccctggaagtcctgcttgtgaaagtttgccacaaaaaaagaaaggatgtatgttgtccaataaggcaagttcccacaggtaaaaagcaggtgcctttgaatcctgacctcaatcaaacaaaacctggaaatttcccgtcccttgcagtttccagtaatgaatttgaacctagtaacagcctgggcaacagaatgagactttgtctcaaaaaaaaaaaaagaaaagaaaagaaaagaaagaaagaaaccttaaaaaaaatcagaaaatcttagaagcaaggaaagagcaggaatgttcacataggaagtgagggagacctggaaggagggggttgctagcagacctgggcatctaatgagagtgagccactgcgtccagccgatgtcagtactttgtgtgctcttgaaataggaaatgtacagatccctattgccagacacatcattctctccatccagaaagccaactttgcaaggacaaaaaaaaaaaattagtgtgaaacaaaatgtggcttttccaaagacagatgtgattatttatagtcaatgtggcctcaaaatgtcattgattgtgaaatagcaaacatgcaggatcataatatttgggtaggtttctgaagttatttcatatctgagcagtctaaagtgctgggattagaggcgtgagccaccacacctggcctaattttgtatttgtagtagagacacggtttcaccatgttgctcaggctggtcttggaactcctgacctcaggtgatccaccctccttggcctcccaaagtgctgggattacggagtgagccaccgtgcccggcctagaatctatattcttaaccatttgtagccatgatggcacacttctattttatattctagctctagacacatagaaggtttgtcatagttgacattataatttatgtaactattgctgccagcgcctaaatcttccatataagaatttgcaatgatttgattactatttgttaagtaaataaagcatttaaaaagaactattataatcctaaaaaatcccattatggttatgaagacactattcaagcatgaagaacttcctatgtggcaagtttaagcttttccttttgtgttttcatttcagatgtcagtactttgtgtgctcttgaaataggaaatgtacagatccctattgccagacacatcattctctccatccagaaagccaactttgcaaggacaaaaaaaaaaattagtgtgaaacaaaatgtggcttttccaaagacagatgtgattatttatagtcaatgtggcctcaaaatgtcattgattgtgaaatagcaaacatgcgggatcataatatttgggtaggtttctgaagttatttcatatctgagcagtctaaagaagtatggggaggaggggccgggcatagtggctcacacctgtaatcccagcactttgggaggccaaggagggtggatcacctgagtcaggagttccaagaccaccctgagcaacatgggtgaaaccccgtaactacaaaaaaggcaaaaattagctgggtgtggtggtggctcctgtggtcctagctactcaggaggctgaggtgagagggtcacttgaacctgt

SEQ ID NO: 60256 - DNA, 3681 bp, Homo sapiens
aggcctgggtagggtgagcggcctccgaagcggagcggggctctgaggagacactttttcttcctccctccttccctcctctcctcctgccttcccttcccctttcctcccctctctcctccttctcccctcggtcagccggagcctgctggggcgagcggttggtattgcaggcgcttactctccggggccgcccggcgagtagctggccggggaaggaggcaggaaccgcgatggcgcctcagaagcacggcggtgggggagggggcggctcggggcccagcgcggggtccgggggaggcggcttcgggggttcggcggcgacggcttcgagcggcaaatccggcggcgggggctgtggaggcggtggcagttactcggcctcctcctcctccgcggcgttaccggtgaagaagtcgaaaatggagcacgtccaggctgaccacgagcttttcctccaggcctttgagaagccaacacagatctatagatttctttgaactcggaatctcatagcaccaatatttttgcacagaactcttacttacatgtctcatcgaaactccagaacaaacatcaaaagatacttgaatacctaccaagtagaaggcactatgccagcactgcatagctttccttgaagaagagcaattactgcccttcaggagtgtataatctagtaggagaaataaaatatttacatgagttttacatgtaggaaactgaatgaaaagaaaacatttaaagttgatgatatgttatcaaaagtagagaaaatgaaaggagagcaagaatctcatagcttgtcagctcatttgcagcttacatttttggtttcttccacaaaaatgataagccatcaccaaactcagaaaatgaacaaaattctgttaccctggaagtcctgcttgtgaaagtttgccacaaaaaaagaaaggatgtatgttgtccaataaggcaagttcccacaggtaaaaagcaggtgcctttgaatcctgacctcaatcaaacaaaacctggaaatttcccgtcccttgcagtttccagtaatgaatttgaacctagtaacagccacatggtgaagtcttactcgttgctatttagagtgactcgtccaagaagaagagagtttaatggaatgattaatggagaaaccatgaaaatattggtaattttttttttactagattttatcactggagattaagatggtcattgaaaatgattgtaccagtgttccttcatgatagtcatggtgctgagtcttaaagcaaacagtgaattcacctccacctcaacattttgttgtgcaaattttcaaacataaaggacaatgagaagtattttatagtgaacacttatctacttacctcttagattcaacaatgaatattttattatacttgttgcatatttatccccctacccatccctcttttcttccaacaattgtgaattcatctttgaggtattcattcaacaaacacataggtgctggggatgatttaatttaatcgaagatgattaaagcattcagtcctgtcctccaaagtctcacaacctagtgtagggaaatagacatgaaatatatcattgctgcaaaatgatgagtggcataatacaggtatatgtgaagttcagcagagaaacacgttggaagaaataatctttgactcttgaagtattgtttgaagtttttgggagttaccacgagtgagaaggagtttgcctagcaaagataattctaaacagaaacattagcatttgcaaagatgtggggttaatgttgtgagtgttaaaaagaacatatagtaaaaatgcaaaattggaaacgtggtctgtatattattgcaactttagtgtaattcctacctcatttgggataaatgtagcatgttttatgttaagggaccatatatcgtaacacatttttgttctaatatttgatttatgagaaatgtttgttaaatttagatgtcagtgaagagcttccagccagaagaaaatgaaatcgtgaggatggggaaaagacatttgttgcacaaatgacagtatttgataaaaacagagtttcactcttgttgcccaggctggagtgcagtggcatgatctggactcactgcaacctccacctcccaggtttaagcagttctcctgcctgagcctctcggattacagagatggggtttcaccatcttggccaagctggtcttgaactcctgaccttgtgatccacccacctcggcctcccaaagtgctgggattacaggcgtgagccactgcgtccagccggtaggtgctatttttaacatacccattttataagtgaggaaaatgaggcacgaaaagaaaaaaagattaaaaatagctaaataacctgatcccgactacctggctgatgactggtggaaccaggactcaaacacaggcattctgactctagaatcaatcaatctatctatctatttttttgaaatggagtttcatccttgttgcccaggctggagtgcaatggcgcgatctcagctcactgcaacctctgcctccctggttcaagcgattctcctgcctcagcctcctgagtagctgggattacagggatgcaccaccatgcccggctagttttgtatttttagtagagacggggtttcaccatgttggtcaggctggtctcgaactcctgacctcaggtgatccgcctgcctcggcttcccaaagtgctgggattagaggcgtgagccaccacacctggcctaattttgtatttgtagtagagacacggtttcaccatgttgctcaggctggtcttggaactcctgacctcaggtgatccaccctccttggcctcccaaagtgctgggattacggagtgagccaccgtgcccggcctagaatctatattcttaaccatttgtagccatgatggcacacttctattttatattctagctctagacacatagaaggtttgtcatagttgacattataatttatgtaactattgctgccagcgcctaaatcttccatataagaatttgcaatgatttgattactatttgttaagtaaataaagcatttaaaaagaactattataatcctaaaaaatcccattatggttatgaagacactattcaagcatgaagaacttcctatgtggcaagtttaagcttttccttttgtgttttcatttcagatgtcagtactttgtgtgctcttgaaataggaaatgtacagatccctattgccagacacatcattctctccatccagaaagccaactttgcaaggacaaaaaaaaaaattagtgtgaaacaaaatgtggcttttccaaagacagatgtgattatttatagtcaatgtggcctcaaaatgtcattgattgtgaaatagcaaacatgcgggatcataatatttgggtaggtttctgaagttatttcatatctgagcagtctaaagaagtatggggaggaggggccgggcatagtggctcacacctgtaatcccagcactttgggaggccaaggagggtggatcacctgagtcaggagttccaagaccaccctgagcaacatgggtgaaaccccgtaactacaaaaaaggcaaaaattagctgggtgtggtggtggctcctgtggtcctagctactcaggaggctgaggtgagagggtcacttgaacctgt

SEQ ID NO: 60257 - DNA, 1760 bp, Homo sapiens
aagtgggcggagcgaggccaggtagggtgagcggcctccgaagcggagcggggctctgaggagacactttttttttcctccctccttccctcctctcctcctcccttcccttcccctctcctcccctctctcctccttcccccctcggtccgccggagcctgctggggcgagcggttggtattgcaggcgcttgctctccggggccgcccggcgggtagctggcggggggaggaggcaggaaccgcgatggcgcctcagaagcacggcggtgggggagggggcggctcggggcccagcgcggggtccgggggaggcggcttcgggggttcggcggcggtggcggcggcgacggcttcgggcggcaaatccggcggcgggagctgtggagggggtggcagttactcggcctcctcctcctcctccgcggcggcagcggcgggggctgcggtgttaccggtgaagaagccgaaaatggagcacgtccaggctgaccacgagcttttcctccaggcctttgagaagccaacacagatctatagatttcttcgaactcggaatctcatagcaccaatatttttgcacagaactcttacttacatgtctcatcgaaactccagaacaaacatcaaaaggaaaacatttaaagttgatgatatgttatcaaaagtagagaaaatgaaaggagagcaagaatctcatagcttgtcagctcatttgcagcttacatttttggtttcttccacaaaaatgataagccatcaccaaactcagaaaatgaacaaaattctgttaccctggaagtcctgcttgtgaaagtttgccacaaaaaaagaaaggatgtatgttgtccaataaggcaagttcccacaggtaaaaagcaggtgcctttgaatcctgacctcaatcaaacaaaacctggaaatttcccgtcccttgcagtttccagtaatgaatttgaacctagtaacagccacatggtgaagtcttactcgttgctatttagagtgactcgtccaagaagaagagagtttaatggaatgattaatggagaaaccatgaaaatattgatgtcagtgaagagcttccagccagaagaaaatgaaatcgtgaggatggggaaaagacatttgttgcacaaatgacagtatttgataaaaacagagtttcactcttgttgcccaggctggagtgcagtggcatgatctggactcactgcaacctccacctcccaggtttaagcagttctcctgcctgagcctctcggattacagatgtcagtactttgtgtgctcttgaaataggaaatgtacagatccctattgccagacacatcattctctccatccagaaagccaactttgcaaggacaaaaaaaaaaattagtgtgaaacaaaatgtggcttttccaaagacagatgtgattatttatagtcaatgtggcctcaaaatgtcattgattgtgaaatagcaaacatgcgggatcataatatttgggtaggtttctgaagttatttcatatctgagcagtctaaagaagtatggggaggaggggccgggcatagtggctcacacctgtaatcccagcactttgggaggccaaggagggtggatcacctgagtcaggagttccaagaccaccctgagcaacatgggtgaaaccccgtaactacaaaaaaggcaaaaattagctgggtgtggtggtggctcctgtggtcctagctactcaggaggctgaggtgagagggtcacttgaacctgt

SEQ ID NO: 60258 - DNA, 3068 bp, Homo sapiens
tctaatttttggttggtggcggcggtgctgggccaggggaaggaagggacacggaggccgccctcgccccgccacctcctaccagcttccccccagccccggctccgggagatgtgccgggcggggggcccgggttcgccgagccgcaggagagacacgctgggccgaccccagagcggcgctggacagcttgtcagctcatttgcagcttacatttttggtttcttccacaaaaatgataagccatcaccaaactcagaaaatgaacaaaattctgttaccctggaagtcctgcttgtgaaagtttgccacaaaaaaagaaaggatgtatgttgtccaataaggcaagttcccacaggtaaaaagcaggtgcctttgaatcctgacctcaatcaaacaaaacctggaaatttcccgtcccttgcagtttccagtaatgaatttgaacctagtaacagccacatggtgaagtcttactcgttgctatttagagtgactcgtccaagaagaagagagtttaatggaatgattaatggagaaaccatgaaaatattggtaattttttttttactagattttatcactggagattaagatggtcattgaaaatgattgtaccagtgttccttcatgatagtcatggtgctgagtcttaaagcaaacagtgaattcacctccacctcaacattttgttgtgcaaattttcaaacataaaggacaatgagaagtattttatagtgaacacttatctacttacctcttagattcaacaatgaatattttattatacttgttgcatatttatccccctacccatccctcttttcttccaacaattgtgaattcatctttgaggtattcattcaacaaacacataggtgctggggatgatttaatttaatcgaagatgattaaagcattcagtcctgtcctccaaagtctcacaacctagtgtagggaaatagacatgaaatatatcattgctgcaaaatgatgagtggcataatacaggtatatgtgaagttcagcagagaaacacgttggaagaaataatctttgactcttgaagtattgtttgaagtttttgggagttaccacgagtgagaaggagtttgcctagcaaagataattctaaacagaaacattagcatttgcaaagatgtggggttaatgttgtgagtgttaaaaagaacatatagtaaaaatgcaaaattggaaacgtggtctgtatattattgcaactttagtgtaattcctacctcatttgggataaatgtagcatgttttatgttaagggaccatatatcgtaacacatttttgttctaatatttgatttatgagaaatgtttgttaaatttagatgtcagtgaagagcttccagccagaagaaaatgaaatcgtgaggatggggaaaagacatttgttgcacaaatgacagtatttgataaaaacagagtttcactcttgttgcccaggctggagtgcagtggcatgatctggactcactgcaacctccacctcccaggtttaagcagttctcctgcctgagcctctcggattacagagatggggtttcaccatcttggccaagctggtcttgaactcctgaccttgtgatccacccacctcggcctcccaaagtgctgggattacaggcgtgagccactgcgtccagccggtaggtgctatttttaacatacccattttataagtgaggaaaatgaggcacgaaaagaaaaaaagattaaaaatagctaaataacctgatcccgactacctggctgatgactggtggaaccaggactcaaacacaggcattctgactctagaatcaatcaatctatctatctatttttttgaaatggagtttcatccttgttgcccaggctggagtgcaatggcgcgatctcagctcactgcaacctctgcctccctggttcaagcgattctcctgcctcagcctcctgagtagctgggattacagggatgcaccaccatgcccggctagttttgtatttttagtagagacggggtttcaccatgttggtcaggctggtctcgaactcctgacctcaggtgatccgcctgcctcggcttcccaaagtgctgggattagaggcgtgagccaccacacctggcctaattttgtatttgtagtagagacacggtttcaccatgttgctcaggctggtcttggaactcctgacctcaggtgatccaccctccttggcctcccaaagtgctgggattacggagtgagccaccgtgcccggcctagaatctatattcttaaccatttgtagccatgatggcacacttctattttatattctagctctagacacatagaaggtttgtcatagttgacattataatttatgtaactattgctgccagcgcctaaatcttccatataagaatttgcaatgatttgattactatttgttaagtaaataaagcatttaaaaagaactattataatcctaaaaaatcccattatggttatgaagacactattcaagcatgaagaacttcctatgtggcaagtttaagcttttccttttgtgttttcatttcagatgtcagtactttgtgtgctcttgaaataggaaatgtacagatccctattgccagacacatcattctctccatccagaaagccaactttgcaaggacaaaaaaaaaaattagtgtgaaacaaaatgtggcttttccaaagacagatgtgattatttatagtcaatgtggcctcaaaatgtcattgattgtgaaatagcaaacatgcgggatcataatatttgggtaggtttctgaagttatttcatatctgagcagtctaaagaagtatggggaggaggggccgggcatagtggctcacacctgtaatcccagcactttgggaggccaaggagggtggatcacctgagtcaggagttccaagaccaccctgagcaacatgggtgaaaccccgtaactacaaaaaaggcaaaaattagctgggtgtggtggtggctcctgtggtcctagctactcaggaggctgaggtgagagggtcacttgaacctgt

SEQ ID NO: 60259 - DNA, 2725 bp, Homo sapiens
aggcctgggtagggtgagcggcctccgaagcggagcggggctctgaggagacactttttcttcctccctccttccctcctctcctcctgccttcccttcccctttcctcccctctctcctccttctcccctcggtcagccggagcctgctggggcgagcggttggtattgcaggcgcttactctccggggccgcccggcgagtagctggccggggaaggaggcaggaaccgcgatggcgcctcagaagcacggcggtgggggagggggcggctcggggcccagcgcggggtccgggggaggcggcttcgggggttcggcggcgacggcttcgagcggcaaatccggcggcgggggctgtggaggcggtggcagttactcggcctcctcctcctccgcggcgttaccggtgaagaagtcgaaaatggagcacgtccaggctgaccacgagcttttcctccaggcctttgagaagccaacacagatctatagatttctttgaactcggaatctcatagcaccaatatttttgcacagaactcttacttacatgtctcatcgaaactccagaacaaacatcaaaaggaaaacatttaaagttgatgatatgttatcaaaagtagagaaaatgaaaggagagcaagaatctcatagcttgtcagctcatttgcagcttacatttttggtttcttccacaaaaatgataagccatcaccaaactcagaaaatgaacaaaattctgttaccctggaagtcctgcttgtgaaagtttgccacaaaaaaagaaaggatgtatgttgtccaataaggcaagttcccacaggtaaaaagcaggtgcctttgaatcctgacctcaatcaaacaaaacctggaaatttcccgtcccttgcagtttccagtaatgaatttgaacctagtaacagccacatggtgaagtcttactcgttgctatttagagtgactcgtccaagaagaagagagtttaatggaatgattaatggagaaaccatgaaaatattgatgtcagtgaagagcttccagccagaagaaaatgaaatcgtgaggatggggaaaagacatttgttgcacaaatgacagtatttgataaaaacagagtttcactcttgttgcccaggctggagtgcagtggcatgatctggactcactgcaacctccacctcccaggtttaagcagttctcctgcctgagcctctcggattacagagatggggtttcaccatcttggccaagctggtcttgaactcctgaccttgtgatccacccacctcggcctcccaaagtgctgggattacaggcgtgagccactgcgtccagccggtaggtgctatttttaacatacccattttataagtgaggaaaatgaggcacgaaaagaaaaaaagattaaaaatagctaaataacctgatcccgactacctggctgatgactggtggaaccaggactcaaacacaggcattctgactctagaatcaatcaatctatctatctatttttttgaaatggagtttcatccttgttgcccaggctggagtgcaatggcgcgatctcagctcactgcaacctctgcctccctggttcaagcgattctcctgcctcagcctcctgagtagctgggattacagggatgcaccaccatgcccggctagttttgtatttttagtagagacggggtttcaccatgttggtcaggctggtctcgaactcctgacctcaggtgatccgcctgcctcggcttcccaaagtgctgggattagaggcgtgagccaccacacctggcctaattttgtatttgtagtagagacacggtttcaccatgttgctcaggctggtcttggaactcctgacctcaggtgatccaccctccttggcctcccaaagtgctgggattacggagtgagccaccgtgcccggcctagaatctatattcttaaccatttgtagccatgatggcacacttctattttatattctagctctagacacatagaaggtttgtcatagttgacattataatttatgtaactattgctgccagcgcctaaatcttccatataagaatttgcaatgatttgattactatttgttaagtaaataaagcatttaaaaagaactattataatcctaaaaaatcccattatggttatgaagacactattcaagcatgaagaacttcctatgtggcaagtttaagcttttccttttgtgttttcatttcagatgtcagtactttgtgtgctcttgaaataggaaatgtacagatccctattgccagacacatcattctctccatccagaaagccaactttgcaaggacaaaaaaaaaaattagtgtgaaacaaaatgtggcttttccaaagacagatgtgattatttatagtcaatgtggcctcaaaatgtcattgattgtgaaatagcaaacatgcgggatcataatatttgggtaggtttctgaagttatttcatatctgagcagtctaaagaagtatggggaggaggggccgggcatagtggctcacacctgtaatcccagcactttgggaggccaaggagggtggatcacctgagtcaggagttccaagaccaccctgagcaacatgggtgaaaccccgtaactacaaaaaaggcaaaaattagctgggtgtggtggtggctcctgtggtcctagctactcaggaggctgaggtgagagggtcacttgaacctgt

SEQ ID NO: 60260 - DNA, 1710 bp, Homo sapiens
aggcctgggtagggtgagcggcctccgaagcggagcggggctctgaggagacactttttcttcctccctccttccctcctctcctcctgccttcccttcccctttcctcccctctctcctccttctcccctcggtcagccggagcctgctggggcgagcggttggtattgcaggcgcttactctccggggccgcccggcgagtagctggccggggaaggaggcaggaaccgcgatggcgcctcagaagcacggcggtgggggagggggcggctcggggcccagcgcggggtccgggggaggcggcttcgggggttcggcggcgacggcttcgagcggcaaatccggcggcgggggctgtggaggcggtggcagttactcggcctcctcctcctccgcggcgttaccggtgaagaagtcgaaaatggagcacgtccaggctgaccacgagcttttcctccaggcctttgagaagccaacacagatctatagatttctttgaactcggaatctcatagcaccaatatttttgcacagaactcttacttacatgtctcatcgaaactccagaacaaacatcaaaaggaaaacatttaaagttgatgatatgttatcaaaagtagagaaaatgaaaggagagcaagaatctcatagcttgtcagctcatttgcagcttacatttttggtttcttccacaaaaatgataagccatcaccaaactcagaaaatgaacaaaattctgttaccctggaagtcctgcttgtgaaagtttgccacaaaaaaagaaaggatgtatgttgtccaataaggcaagttcccacaggtaaaaagcaggtgcctttgaatcctgacctcaatcaaacaaaacctggaaatttcccgtcccttgcagtttccagtaatgaatttgaacctagtaacagccacatggtgaagtcttactcgttgctatttagagtgactcgtccaagaagaagagagtttaatggaatgattaatggagaaaccatgaaaatattgatgtcagtgaagagcttccagccagaagaaaatgaaatcgtgaggatggggaaaagacatttgttgcacaaatgacagtatttgataaaaacagagtttcactcttgttgcccaggctggagtgcagtggcatgatctggactcactgcaacctccacctcccaggtttaagcagttctcctgcctgagcctctcggattacagatgtcagtactttgtgtgctcttgaaataggaaatgtacagatccctattgccagacacatcattctctccatccagaaagccaactttgcaaggacaaaaaaaaaaattagtgtgaaacaaaatgtggcttttccaaagacagatgtgattatttatagtcaatgtggcctcaaaatgtcattgattgtgaaatagcaaacatgcgggatcataatatttgggtaggtttctgaagttatttcatatctgagcagtctaaagaagtatggggaggaggggccgggcatagtggctcacacctgtaatcccagcactttgggaggccaaggagggtggatcacctgagtcaggagttccaagaccaccctgagcaacatgggtgaaaccccgtaactacaaaaaaggcaaaaattagctgggtgtggtggtggctcctgtggtcctagctactcaggaggctgaggtgagagggtcacttgaacctgt

SEQ ID NO: 60261 - DNA, 1242 bp, Homo sapiens
ggataaactagagaagtgtgttctcatctcttccccatgcctcgtaggaagctctaggttgggtagcataagtgcctcttactttgcctggatccctgattttttatttgaaagttgctttagaggaagctaagtggcatgttattgcctataatgttgaacatatgatattttgatagtgttactcctagagtaaatttagagggattctcagaaataaaatgtcctgagtttcatttcccgttttgcctcctgggatgaaattcttcttatttacaatagtttgtatgtcatctggtgcctaggaggaaggcaggccaacaaattcaactctggattatttcaagattcttaatgtaatgtcttaaaacgtaatcttcccttttgttttcaggcagtatccagtctgatagcagtgggtacatctcatggattggctttaatatttggtaaatttttaagtgctttcctgcttttaaatattaagtgtccttttgggttttataatgtcctttaatcacagtttatatagtgtacttgattttcttgaacaaaaccagaaaaacttgaaaagtagcagtcagtatttttatagctaaaaattatttgcctcacagctttgttttgctgcttattgcaagtttattttcttcttcatgaatttataagctatcatatctattgatctctctgcaaacctagacaaaaagaataaagttgaagggaaccttgggttatcatcttgtctgcctccggttgttggtggtggggatttttgattctgaatcaccttccagtaatgggtattctaaaagatcttcaggaaaacaggctttctcagtaattttcagggagctctcactgacaataagcttttttaaaaaatttccattgtaaatcacctcctaaaccgaattttttttggcctgtaatcacattgctttccttggttgaaagagaactagttttatttgtatagtagaagatagttgtattttctcatttttttctacatgagactaaatgactatagtttcattaaaccttctttgcttttgaattcaatgtatgagtagaatattttgttctttttaaatttaaaaactgttagatttttgtggccgggcatggggcgcacgcctgtaatcctagcactttgggaggccgaggcaggtggatcacctgagttgaggagtttgagaccagcctggccaacatggtgaaaccccgtctctactgaaa

SEQ ID NO: 60262 - DNA, 4424 bp, Homo sapiens
  misc_feature (1850)..(1850): n is a, c, g, or t
gtctgcagctgacaaagtagatgctggcttgcctacagcaattgcagtatccagtctgatagcagtgggtacatctcatggattggctttaatatttgatcagaatcaagctttgcgactctgtctgggtagcactagtgttggaggtcagtatggcgctatctctgccctcagtatcaacaatgattgctcaagacttctttgtggctttgctaaaggacagatcaccatgtgggatttggccagtggaaaacttctaagatcaataacagatgctcatcctccaggaacagcaatattgcatatcaagtttacagatgatccaactcttgcaatttgcaacgacagcggaggctctgtttttgaattgacatttaagagagtgatgggagtgagaacctgtgaatctagatgtctgttcagtggttccaagggtgaagtctgctgtattgagcctctgcattctaagcctgagttgaaagatcatcccatcacacagttttcattattggccatggcatccttgacaaaaatactggtcattggattgaaaccatccttgaaagtatggatgacttttccctatggccggatggatccttccagtgtgccactgctggcctggcactttgtagcagtacaaaattacgtgaatcccatgcttgccttctgcagaggagatgttgttcattttctattggtaaagagagatgaatctggagcaatacatgttactaagcaaaagcatcttcacctatactatgacctcatcaactttacctggataaattcacgcacagttgtgctcttagacagcgtagagaagttgcatgtgattgatcggcaaacacaagaggaattggagacagtggagatctcagaagttcagctggtctacaatagcagccatttcaaatcactagccactggaggaaatgttagccaggcactggctttggttggagagaaggcttgttatcaatccatcagtagctatggtggtcagatcttttatttggggacaaaatctgtttatgtgatgatgctgaggagctggagagagagagtggatcatctcctgaaacaagattgtcttacagaagcgttggctcttgcgtggtctttccatgaaggaaaagcaaaagcagtagtgggattatcaggggatgccagtaagcgaaaggctattgttgcagaccggatggtagaaatcctattccattatgcagatcgagctctgaaaaagtgcccagaccaaggaaaaatccaagtgatggagcagcattttcaggatatggtgcctgtcatagttgattactgccttctgctgcagcgaaaggatcttttatttagtcagatgtatgataaattaagtgagaattcagtggccaaaggagtatttttggagtgccttgagccatatattttaagtgataaattggtgggaatcacaccccaagtaatgaaagacttgattgttcatttccaagataaaaaattaatggaaaatgtggaagcgctcattgtacatatggatatcaccagcctagatattcagcaggtagttctcatgtgttgggaaaatcgtttatatgatgctatgatctatgtctacaacagaggcatgaatgaatttattagtccaatggagaaacttttcagagtcattgctcctcctctgaatgcaggaaaaacactaacagatgaacaagttgttatgggcaataagctccttgtatatattagctgttgtctagcaggtcgtgcctatccccttggtgacatccctgaagatctggttcccttggttaaaaaccaggtttttgaatttctaattcgcctgcattcancagaggcttctcctgaggaagaaatctatccttacattcggactttgctacattttgacacaagagaatttctcaatgtattggcactgacttttgaagattttaaaaatgacaagcaagctgtggaatatcaacagcgaattgtggatattttgttgaaagttatggtggagaattcagactttaccccctcacaagtaggatgtctctttaccttccttgctcggcagcttgcaaagcctgacaacaccttgtttgtaaacagaacactttttgatcaggtccttgaattcctttgtagtcctgacgatgactcccgacactctgaaagacagcaggtccttttagaattgctgcaggctggaggcatagttcaatttgaagagagtcgactcatccggatggcagaaaaagctgagttctatcaaatttgtgaatttatgtatgaaagagaacaccaatatgacaaaattattgattgctacttacgtgaccctctgcgagaggaagaagtctttaattacattcacaatatcttatccattcccggacacagtgcagaggagaagcagtctgtatggcagaaagcaatggatcatattgaggaactcgtgtccctgaagccttgtaaagctgcggagctggttgccacccacttttctggacatattgaaacggtcattaaaaaacttcagaaccaggttttgcttttcaaatttttgaggagtcttcttgacccaagggaaggtattcatgtaaatcaagaattactgcaaatatctccttgtatcacagagcagttcattgagctgttgtgtcagttcaacccaacccaagttatagagactctgcaagtccttgagtgctaccgtctggaagaaactattcagattactcagaagtatcaacttcatgaagtcaccgcttatctattggaaaagaaaggagatattcatggtgccttcctaataatgttagagagactacaaagcaaacttcaagaggtaacacatcaaggtgaaaataccaaagaggatccctcattgaaggatgttgaagatactatggtggagaccattgctctttgccagagaaattcacataatttgaaccagcagcaacgtgaggccctttggtttccgttattggaggcaatgatggcccctcagaagctgtccagttcagccattcctcatctacactctgaagctctgaagtctttgaccatgcaagttttaaatagcatggcagcatttattgcccttccatcaatcttgcaaagaatcttacaggatccagtttatggaaaaggaaaacttggagaaatccagggacttatcttgggaatgttagatacctttaactatgaacaaaccctgctggaaacaacaaccagccttctaaaccaagatctccattggtcattgtgtaacctgagagcttcggtcaccagaggactgaatcccaaacaagattactgctctatatgtttgcagcagtacaagagacgccaagaaatggctgatgaaataattgtctttagctgtggccatttgtatcactcattctgcctacaaaacaaagaatgcactgtggaatttgagggccaaacaagatggacatgctacaaatgcagttcaagtaacaaagtaggaaaactcagtgaaaattcatctgaaattaaaaagggaaggataaccccatcacaggtaaaaatgtctccatcgtatcatcagtccaaaggggatcccactgctaaaaagggaacctcagaacctgttctggatccacagcaaatccaagcatttgatcagctttgccgtctctaccgaggaagctccaggctggctctcctcacggaactctcccagaatcgcagcagcgagagctataggccattcagtggctcgcagagtgctcctgctttcaacagcatcttccagaatgagaacttccagctgcagctcattcctccacctgtgactgaggattgatgactccatggagcctggcccaggagaaccagagatgatcccgaggcagctggggagaggccccgcctctggtgggcttggcctccaccacctcccacgcttctgagaagaggttccaaattgggcttctgtgcccagagcgtccacagcaccattcccagtgtagactcccagtcttctccacattgctgtcatggcgtcagttcaccagactcattgattttgttttgcttgttaagcaaaggaatgtcacatacctctgtccagctttttaggaaatacatttcgcctattgcgactttttccatttaccctgaagcctagaaagtaggtggaactcacacaaatggcattccagagtctgccatactccgtctcctccagctgctggataatacagaggaacttcaacttctacagggaacagtggttggccaggctgcagtataactgaagcatgccttggagagagcagacactgtgggggccagggccatctccctttaatgtgttcatgttaaaacctatttgagtgtaagacttgccctttctaacaataaatgctccgtgtttaagttct

SEQ ID NO: 60263 - DNA, 1224 bp, Homo sapiens
  misc_feature (15)..(15): n is a, c, g, or t
ctagaggatcccggncggctagcaccctgctggaaacaacaaccagccttctaaaccaagatctccattggtcattgtgtaacctgagagcttcggtcaccagaggactgaatcccaaacaagattactgctctatatgtttgcagcagtacaagagacgccaagaaatggctgatgaaataattgtctttagctgtggccatttgtatcactcattctgcctacaaaacaaagaatgcactgtggaatttgagggccaaacaagatggacatgctacaaatgcagttcaagtaacaaagtaggaaaactcagtgaaaattcatctgaaattaaaaagggaaggataaccccatcacaggtaaaaatgtctccatcgtatcatcagtccaaaggggatcccactgctaaaaagggaacctcagaacctgttctggatccacagcaaatccaagcatttgatcagctttgccgtctctaccgaggaagctccaggctggctctcctcacggaactctcccagaatcgcagcagcgagagctataggccattcagtggctcgcagagtgctcctgctttcaacagcatcttccagaatgagaacttccagctgcagctcattcctccacctgtgactgaggattgatgactccatggagcctggcccaggagaaccagagatgatcccgaggcagctggggagaggccccgcctctggtgggcttggcctccaccacctcccacgcttctgagaagaggttccaaattgggcttctgtgcccagagcgtccacagcaccattcccagtgtagactcccagtcttctccacattgctgtcatggcgtcagttcaccagactcattgattttgttttgcttgttaagcaaaggaatgtcacatacctctgtccagctttttaggaaatacatttcgcctattgcgactttttccatttaccctgaagcctagaaagtaggtggaactcacacaaatggcattccagagtctgccatactccgtctcctccagctgctggataatacagaggaacttcaacttctacagggaacagtggttggccaggctgcagtataactgaagcatgccttggagagagcagacactgtgggggccagggccatctccctttaatgtgttcatgttaaaacctatttgagtgtaagacttgccctttctaacaataaatgctccgtgtttaagttct

SEQ ID NO: 60264 - DNA, 1068 bp, Homo sapiens
  misc_feature (1)..(1): n is a, c, g, or t
ncatgctgaacgactctcttaacctccaccgctacagctgtggccatttgtatcactcattctgcctacaaaacaaagaatgcactgtggaatttgagggccaaacaagatggacatgctacaaatgcagttcaagtaacaaagtaggaaaactcagtgaaaattcatctgaaattaaaaagggaaggataaccccatcacaggtaaaaatgtctccatcgtatcatcagtccaaaggggatcccactgctaaaaagggaacctcagaacctgttctggatccacagcaaatccaagcatttgatcagctttgccgtctctaccgaggaagctccaggctggctctcctcacggaactctcccagaatcgcagcagcgagagctataggccattcagtggctcgcagagtgctcctgctttcaacagcatcttccagaatgagaacttccagctgcagctcattcctccacctgtgactgaggattgatgactccatggagcctggcccaggagaaccagagatgatcccgaggcagctggggagaggccccgcctctggtgggcttggcctccaccacctcccacgcttctgagaagaggttccaaattgggcttctgtgcccagagcgtccacagcaccattcccagtgtagactcccagtcttctccacattgctgtcatggcgtcagttcaccagactcattgattttgttttgcttgttaagcaaaggaatgtcacatacctctgtccagctttttaggaaatacatttcgcctattgcgactttttccatttaccctgaagcctagaaagtaggtggaactcacacaaatggcattccagagtctgccatactccgtctcctccagctgctggataatacagaggaacttcaacttctacagggaacagtggttggccaggctgcagtataactgaagcatgccttggagagagcagacactgtgggggccagggccatctccctttaatgtgttcatgttaaaacctatttgagtgtaagacttgccctttctaacaataaatgctccgtgtttaagttct

SEQ ID NO: 60265 - DNA, 4660 bp, Homo sapiens
  misc_feature (2201)..(2201): n is a, c, g, or t
ggataaactagagaagtgtgttctcatctcttccccatgcctcgtaggaagctctaggttgggtagcataagtgcctcttactttgcctggatccctgattttttatttgaaagttgctttagaggaagctaagtggcatgttattgcctataatgttgaacatatgatattttgatagtgttactcctagagtaaatttagagggattctcagaaataaaatgtcctgagtttcatttcccgttttgcctcctgggatgaaattcttcttatttacaatagtttgtatgtcatctggtgcctaggaggaaggcaggccaacaaattcaactctggattatttcaagattcttaatgtaatgtcttaaaacgtaatcttcccttttgttttcaggcagtatccagtctgatagcagtgggtacatctcatggattggctttaatatttgatcagaatcaagctttgcgactctgtctgggtagcactagtgttggaggtcagtatggcgctatctctgccctcagtatcaacaatgattgctcaagacttctttgtggctttgctaaaggacagatcaccatgtgggatttggccagtggaaaacttctaagatcaataacagatgctcatcctccaggaacagcaatattgcatatcaagtttacagatgatccaactcttgcaatttgcaacgacagcggaggctctgtttttgaattgacatttaagagagtgatgggagtgagaacctgtgaatctagatgtctgttcagtggttccaagggtgaagtctgctgtattgagcctctgcattctaagcctgagttgaaagatcatcccatcacacagttttcattattggccatggcatccttgacaaaaatactggtcattggattgaaaccatccttgaaagtatggatgacttttccctatggccggatggatccttccagtgtgccactgctggcctggcactttgtagcagtacaaaattacgtgaatcccatgcttgccttctgcagaggagatgttgttcattttctattggtaaagagagatgaatctggagcaatacatgttactaagcaaaagcatcttcacctatactatgacctcatcaactttacctggataaattcacgcacagttgtgctcttagacagcgtagagaagttgcatgtgattgatcggcaaacacaagaggaattggagacagtggagatctcagaagttcagctggtctacaatagcagccatttcaaatcactagccactggaggaaatgttagccaggcactggctttggttggagagaaggcttgttatcaatccatcagtagctatggtggtcagatcttttatttggggacaaaatctgtttatgtgatgatgctgaggagctggagagagagagtggatcatctcctgaaacaagattgtcttacagaagcgttggctcttgcgtggtctttccatgaaggaaaagcaaaagcagtagtgggattatcaggggatgccagtaagcgaaaggctattgttgcagaccggatggtagaaatcctattccattatgcagatcgagctctgaaaaagtgcccagaccaaggaaaaatccaagtgatggagcagcattttcaggatatggtgcctgtcatagttgattactgccttctgctgcagcgaaaggatcttttatttagtcagatgtatgataaattaagtgagaattcagtggccaaaggagtatttttggagtgccttgagccatatattttaagtgataaattggtgggaatcacaccccaagtaatgaaagacttgattgttcatttccaagataaaaaattaatggaaaatgtggaagcgctcattgtacatatggatatcaccagcctagatattcagcaggtagttctcatgtgttgggaaaatcgtttatatgatgctatgatctatgtctacaacagaggcatgaatgaatttattagtccaatggagaaacttttcagagtcattgctcctcctctgaatgcaggaaaaacactaacagatgaacaagttgttatgggcaataagctccttgtatatattagctgttgtctagcaggtcgtgcctatccccttggtgacatccctgaagatctggttcccttggttaaaaaccaggtttttgaatttctaattcgcctgcattcancagaggcttctcctgaggaagaaatctatccttacattcggactttgctacattttgacacaagagaatttctcaatgtattggcactgacttttgaagattttaaaaatgacaagcaagctgtggaatatcaacagcgaattgtggatattttgttgaaagttatggtggagaattcagactttaccccctcacaagtaggatgtctctttaccttccttgctcggcagcttgcaaagcctgacaacaccttgtttgtaaacagaacactttttgatcaggtccttgaattcctttgtagtcctgacgatgactcccgacactctgaaagacagcaggtccttttagaattgctgcaggctggaggcatagttcaatttgaagagagtcgactcatccggatggcagaaaaagctgagttctatcaaatttgtgaatttatgtatgaaagagaacaccaatatgacaaaattattgattgctacttacgtgaccctctgcgagaggaagaagtctttaattacattcacaatatcttatccattcccggacacagtgcagaggagaagcagtctgtatggcagaaagcaatggatcatattgaggaactcgtgtccctgaagccttgtaaagctgcggagctggttgccacccacttttctggacatattgaaacggtcattaaaaaacttcagaaccaggttttgcttttcaaatttttgaggagtcttcttgacccaagggaaggtattcatgtaaatcaagaattactgcaaatatctccttgtatcacagagcagttcattgagctgttgtgtcagttcaacccaacccaagttatagagactctgcaagtccttgagtgctaccgtctggaagaaactattcagattactcagaagtatcaacttcatgaagtcaccgcttatctattggaaaagaaaggagatattcatggtgccttcctaataatgttagagagactacaaagcaaacttcaagaggtaacacatcaaggtgaaaataccaaagaggatccctcattgaaggatgttgaagatactatggtggagaccattgctctttgccagagaaattcacataatttgaaccagcagcaacgtgaggccctttggtttccgttattggaggcaatgatggcccctcagaagctgtccagttcagccattcctcatctacactctgaagctctgaagtctttgaccatgcaagttttaaatagcatggcagcatttattgcccttccatcaatcttgcaaagaatcttacaggatccagtttatggaaaaggaaaacttggagaaatccagggacttatcttgggaatgttagatacctttaactatgaacaaaccctgctggaaacaacaaccagccttctaaaccaagatctccattggtcattgtgtaacctgagagcttcggtcaccagaggactgaatcccaaacaagattactgctctatatgtttgcagcagtacaagagacgccaagaaatggctgatgaaataattgtctttagctgtggccatttgtatcactcattctgcctacaaaacaaagaatgcactgtggaatttgagggccaaacaagatggacatgctacaaatgcagttcaagtaacaaagtaggaaaactcagtgaaaattcatctgaaattaaaaagggaaggataaccccatcacaggtaaaaatgtctccatcgtatcatcagtccaaaggggatcccactgctaaaaagggaacctcagaacctgttctggatccacagcaaatccaagcatttgatcagctttgccgtctctaccgaggaagctccaggctggctctcctcacggaactctcccagaatcgcagcagcgagagctataggccattcagtggctcgcagagtgctcctgctttcaacagcatcttccagaatgagaacttccagctgcagctcattctcccacgcttctgagaagaggttccaaattgggcttctgtgcccagagcgtccacagcaccattcccagtgtagactcccagtcttctccacattgctgtcatggcgtcagttcaccagactcattgattttgttttgcttgttaagcaaaggaatgtcacatacctctgtccagctttttaggaaatacatttcgcctattgcgactttttccatttaccctgaagcctagaaagtaggtggaactcacacaaatggcattccagagtctgccatactccgtctcctccagctgctggataatacagaggaacttcaacttctacagggaacagtggttggccaggctgcagtataactgaagcatgccttggagagagcagacactgtgggggccagggccatctccctttaatgtgttcatgttaaaacctatttgagtgtaagacttgccctttctaacaataaatgctccgtgtttaagttct

SEQ ID NO: 60266 - DNA, 4368 bp, Homo sapiens
  misc_feature (2201)..(2201): n is a, c, g, or t
ggataaactagagaagtgtgttctcatctcttccccatgcctcgtaggaagctctaggttgggtagcataagtgcctcttactttgcctggatccctgattttttatttgaaagttgctttagaggaagctaagtggcatgttattgcctataatgttgaacatatgatattttgatagtgttactcctagagtaaatttagagggattctcagaaataaaatgtcctgagtttcatttcccgttttgcctcctgggatgaaattcttcttatttacaatagtttgtatgtcatctggtgcctaggaggaaggcaggccaacaaattcaactctggattatttcaagattcttaatgtaatgtcttaaaacgtaatcttcccttttgttttcaggcagtatccagtctgatagcagtgggtacatctcatggattggctttaatatttgatcagaatcaagctttgcgactctgtctgggtagcactagtgttggaggtcagtatggcgctatctctgccctcagtatcaacaatgattgctcaagacttctttgtggctttgctaaaggacagatcaccatgtgggatttggccagtggaaaacttctaagatcaataacagatgctcatcctccaggaacagcaatattgcatatcaagtttacagatgatccaactcttgcaatttgcaacgacagcggaggctctgtttttgaattgacatttaagagagtgatgggagtgagaacctgtgaatctagatgtctgttcagtggttccaagggtgaagtctgctgtattgagcctctgcattctaagcctgagttgaaagatcatcccatcacacagttttcattattggccatggcatccttgacaaaaatactggtcattggattgaaaccatccttgaaagtatggatgacttttccctatggccggatggatccttccagtgtgccactgctggcctggcactttgtagcagtacaaaattacgtgaatcccatgcttgccttctgcagaggagatgttgttcattttctattggtaaagagagatgaatctggagcaatacatgttactaagcaaaagcatcttcacctatactatgacctcatcaactttacctggataaattcacgcacagttgtgctcttagacagcgtagagaagttgcatgtgattgatcggcaaacacaagaggaattggagacagtggagatctcagaagttcagctggtctacaatagcagccatttcaaatcactagccactggaggaaatgttagccaggcactggctttggttggagagaaggcttgttatcaatccatcagtagctatggtggtcagatcttttatttggggacaaaatctgtttatgtgatgatgctgaggagctggagagagagagtggatcatctcctgaaacaagattgtcttacagaagcgttggctcttgcgtggtctttccatgaaggaaaagcaaaagcagtagtgggattatcaggggatgccagtaagcgaaaggctattgttgcagaccggatggtagaaatcctattccattatgcagatcgagctctgaaaaagtgcccagaccaaggaaaaatccaagtgatggagcagcattttcaggatatggtgcctgtcatagttgattactgccttctgctgcagcgaaaggatcttttatttagtcagatgtatgataaattaagtgagaattcagtggccaaaggagtatttttggagtgccttgagccatatattttaagtgataaattggtgggaatcacaccccaagtaatgaaagacttgattgttcatttccaagataaaaaattaatggaaaatgtggaagcgctcattgtacatatggatatcaccagcctagatattcagcaggtagttctcatgtgttgggaaaatcgtttatatgatgctatgatctatgtctacaacagaggcatgaatgaatttattagtccaatggagaaacttttcagagtcattgctcctcctctgaatgcaggaaaaacactaacagatgaacaagttgttatgggcaataagctccttgtatatattagctgttgtctagcaggtcgtgcctatccccttggtgacatccctgaagatctggttcccttggttaaaaaccaggtttttgaatttctaattcgcctgcattcancagaggcttctcctgaggaagaaatctatccttacattcggactttgctacattttgacacaagagaatttctcaatgtattggcactgacttttgaagattttaaaaatgacaagcaagctgtggaatatcaacagcgaattgtggatattttgttgaaagttatggtggagaattcagactttaccccctcacaagtaggatgtctctttaccttccttgctcggcagcttgcaaagcctgacaacaccttgtttgtaaacagaacactttttgatcaggtccttgaattcctttgtagtcctgacgatgactcccgacactctgaaagacagcaggtccttttagaattgctgcaggctggaggcatagttcaatttgaagagagtcgactcatccggatggcagaaaaagctgagttctatcaaatttgtgaatttatgtatgaaagagaacaccaatatgacaaaattattgattgctacttacgtgaccctctgcgagaggaagaagtctttaattacattcacaatatcttatccattcccggacacagtgcagaggagaagcagtctgtatggcagaaagcaatggatcatattgaggaactcgtgtccctgaagccttgtaaagctgcggagctggttgccacccacttttctggacatattgaaacggtcattaaaaaacttcagaaccaggttttgcttttcaaatttttgaggagtcttcttgacccaagggaaggtattcatgtaaatcaagaattactgcaaatatctccttgtatcacagagcagttcattgagctgttgtgtcagttcaacccaacccaagttatagagactctgcaagtccttgagtgctaccgtctggaagaaactattcagattactcagaagtatcaacttcatgaagtcaccgcttatctattggaaaagaaaggagatattcatggtgccttcctaataatgttagagagactacaaagcaaacttcaagaggtaacacatcaaggtgaaaataccaaagaggatccctcattgaaggatgttgaagatactatggtggagaccattgctctttgccagagaaattcacataatttgaaccagcagcaacgtgaggccctttggtttccgttattggaggcaatgatggcccctcagaagctgtccagttcagccattcctcatctacactctgaagctctgaagtctttgaccatgcaagttttaaatagcatggcagcatttattgcccttccatcaatcttgcaaagaatcttacaggatccagtttatggaaaaggaaaacttggagaaatccagggacttatcttgggaatgttagatacctttaactatgaacaaaccctgctggaaacaacaaccagccttctaaaccaagatctccattggtcattgtgtaacctgagagcttcggtcaccagaggactgaatcccaaacaagattactgctctatatgtttgcagcagtacaagagacgccaagaaatggctgatgaaataattgtctttagctgtggccatttgtatcactcattctgcctacaaaacaaagaatgcactgtggaatttgagggccaaacaagatggacatgctacaaatgcagttcaagtaacaaagtaggaaaactcagtgaaaattcatctgaaattaaaaagggaaggataaccccatcacaggtaaaaatgtctccatcgtatcatcagtccaaaggggatcccactgctaaaaagggaacctcagaacctgttctggatccacagcaaatccaagcatttgatcagctttgccgtctctaccgaggaagctccaggctggctctcctcacggaactctcccagaatcgcagcagcgagagctataggccattcagtggctcgcagagtgctcctgctttcaacagcatcttccagaatgagaacttccagctgcagctcatttataactgaagcatgccttggagagagcagacactgtgggggccagggccatctccctttaatgtgttcatgttaaaacctatttgagtgtaagacttgccctttctaacaataaatgctccgtgtttaagttctgcaggtctcctggctggctggctggctctcagtctgtcaagtcatggaggacatttcgaaac

SEQ ID NO: 60267 - DNA, 2984 bp, Homo sapiens
  misc_feature (2201)..(2201): n is a, c, g, or t
ggataaactagagaagtgtgttctcatctcttccccatgcctcgtaggaagctctaggttgggtagcataagtgcctcttactttgcctggatccctgattttttatttgaaagttgctttagaggaagctaagtggcatgttattgcctataatgttgaacatatgatattttgatagtgttactcctagagtaaatttagagggattctcagaaataaaatgtcctgagtttcatttcccgttttgcctcctgggatgaaattcttcttatttacaatagtttgtatgtcatctggtgcctaggaggaaggcaggccaacaaattcaactctggattatttcaagattcttaatgtaatgtcttaaaacgtaatcttcccttttgttttcaggcagtatccagtctgatagcagtgggtacatctcatggattggctttaatatttgatcagaatcaagctttgcgactctgtctgggtagcactagtgttggaggtcagtatggcgctatctctgccctcagtatcaacaatgattgctcaagacttctttgtggctttgctaaaggacagatcaccatgtgggatttggccagtggaaaacttctaagatcaataacagatgctcatcctccaggaacagcaatattgcatatcaagtttacagatgatccaactcttgcaatttgcaacgacagcggaggctctgtttttgaattgacatttaagagagtgatgggagtgagaacctgtgaatctagatgtctgttcagtggttccaagggtgaagtctgctgtattgagcctctgcattctaagcctgagttgaaagatcatcccatcacacagttttcattattggccatggcatccttgacaaaaatactggtcattggattgaaaccatccttgaaagtatggatgacttttccctatggccggatggatccttccagtgtgccactgctggcctggcactttgtagcagtacaaaattacgtgaatcccatgcttgccttctgcagaggagatgttgttcattttctattggtaaagagagatgaatctggagcaatacatgttactaagcaaaagcatcttcacctatactatgacctcatcaactttacctggataaattcacgcacagttgtgctcttagacagcgtagagaagttgcatgtgattgatcggcaaacacaagaggaattggagacagtggagatctcagaagttcagctggtctacaatagcagccatttcaaatcactagccactggaggaaatgttagccaggcactggctttggttggagagaaggcttgttatcaatccatcagtagctatggtggtcagatcttttatttggggacaaaatctgtttatgtgatgatgctgaggagctggagagagagagtggatcatctcctgaaacaagattgtcttacagaagcgttggctcttgcgtggtctttccatgaaggaaaagcaaaagcagtagtgggattatcaggggatgccagtaagcgaaaggctattgttgcagaccggatggtagaaatcctattccattatgcagatcgagctctgaaaaagtgcccagaccaaggaaaaatccaagtgatggagcagcattttcaggatatggtgcctgtcatagttgattactgccttctgctgcagcgaaaggatcttttatttagtcagatgtatgataaattaagtgagaattcagtggccaaaggagtatttttggagtgccttgagccatatattttaagtgataaattggtgggaatcacaccccaagtaatgaaagacttgattgttcatttccaagataaaaaattaatggaaaatgtggaagcgctcattgtacatatggatatcaccagcctagatattcagcaggtagttctcatgtgttgggaaaatcgtttatatgatgctatgatctatgtctacaacagaggcatgaatgaatttattagtccaatggagaaacttttcagagtcattgctcctcctctgaatgcaggaaaaacactaacagatgaacaagttgttatgggcaataagctccttgtatatattagctgttgtctagcaggtcgtgcctatccccttggtgacatccctgaagatctggttcccttggttaaaaaccaggtttttgaatttctaattcgcctgcattcancagaggcttctcctgaggaagaaatctatccttacattcggactttgctacattttgacacaagagaatttctcaatgtattggcactgacttttgaagattttaaaaatgacaagcaagctgtggaatatcaacagcgaattgtggatattttgttgaaagttatggtggagaattcagactttaccccctcacaagtaggatgtctctttaccttccttgctcggcagcttgcaaagcctgacaacaccttgtttgtaaacagaacactttttgatcaggtccttgaattcctttgtagtcctgacgatgactcccgacactctgaaagacagcaggtccttttagaattgctgcaggctggaggcatagttcaatttgaagagagtcgactcatccggatggcagaaaaagctgagttctatcaaatttgtgaatttatgtatgaaagagaacaccaatatgacaaaattattgattgctacttacgtgaccctctgcgagaggaagaagtctttaattacattcacaatatcttatccattcccggacacagtgcagaggagaagcagtctgtatggcagaaagcaatggataatacagaggaacttcaacttctacagggaacagtggttggccaggctgcagtataactgaagcatgccttggagagagcagacactgtgggggccagggccatctccctttaatgtgttcatgttaaaacctatttgagtgtaagacttgccctttctaacaataaatgctccgtgtttaagttct

SEQ ID NO: 60268 - DNA, 496 bp, Homo sapiens
agtaggaaaactcagtgaaaattcatctgaaattaaaaagggaaggataaccccatcacaggtaagacttgttttcgtggcaaaatggaaatggtcttttcttaccaatgtcatctgggcctggtctcatttccttcggttccataggtctcaacaaatttacctggtgggtattgggtacatgaaatgttcttttcagtcctatttagtgttcgaagagcctctcctctctactcagtatggaaaaacatgaatttgagagcaacagatgacattttctgcctttaaacggcttaagatccagttggacagatgaggtgtacacacatgagcctgcttttaagaccttttgatagagtaacagcttagcaagtacagctgagtacttgcaggtaccaatgagtacctatatgataagagtgcagaattatgacttttaagtagggctgatgatggacaaggtgcatacacatatgctctttcactgcctttggag

SEQ ID NO: 60269 - DNA, 4775 bp, Homo sapiens
  misc_feature (2201)..(2201): n is a, c, g, or t
ggataaactagagaagtgtgttctcatctcttccccatgcctcgtaggaagctctaggttgggtagcataagtgcctcttactttgcctggatccctgattttttatttgaaagttgctttagaggaagctaagtggcatgttattgcctataatgttgaacatatgatattttgatagtgttactcctagagtaaatttagagggattctcagaaataaaatgtcctgagtttcatttcccgttttgcctcctgggatgaaattcttcttatttacaatagtttgtatgtcatctggtgcctaggaggaaggcaggccaacaaattcaactctggattatttcaagattcttaatgtaatgtcttaaaacgtaatcttcccttttgttttcaggcagtatccagtctgatagcagtgggtacatctcatggattggctttaatatttgatcagaatcaagctttgcgactctgtctgggtagcactagtgttggaggtcagtatggcgctatctctgccctcagtatcaacaatgattgctcaagacttctttgtggctttgctaaaggacagatcaccatgtgggatttggccagtggaaaacttctaagatcaataacagatgctcatcctccaggaacagcaatattgcatatcaagtttacagatgatccaactcttgcaatttgcaacgacagcggaggctctgtttttgaattgacatttaagagagtgatgggagtgagaacctgtgaatctagatgtctgttcagtggttccaagggtgaagtctgctgtattgagcctctgcattctaagcctgagttgaaagatcatcccatcacacagttttcattattggccatggcatccttgacaaaaatactggtcattggattgaaaccatccttgaaagtatggatgacttttccctatggccggatggatccttccagtgtgccactgctggcctggcactttgtagcagtacaaaattacgtgaatcccatgcttgccttctgcagaggagatgttgttcattttctattggtaaagagagatgaatctggagcaatacatgttactaagcaaaagcatcttcacctatactatgacctcatcaactttacctggataaattcacgcacagttgtgctcttagacagcgtagagaagttgcatgtgattgatcggcaaacacaagaggaattggagacagtggagatctcagaagttcagctggtctacaatagcagccatttcaaatcactagccactggaggaaatgttagccaggcactggctttggttggagagaaggcttgttatcaatccatcagtagctatggtggtcagatcttttatttggggacaaaatctgtttatgtgatgatgctgaggagctggagagagagagtggatcatctcctgaaacaagattgtcttacagaagcgttggctcttgcgtggtctttccatgaaggaaaagcaaaagcagtagtgggattatcaggggatgccagtaagcgaaaggctattgttgcagaccggatggtagaaatcctattccattatgcagatcgagctctgaaaaagtgcccagaccaaggaaaaatccaagtgatggagcagcattttcaggatatggtgcctgtcatagttgattactgccttctgctgcagcgaaaggatcttttatttagtcagatgtatgataaattaagtgagaattcagtggccaaaggagtatttttggagtgccttgagccatatattttaagtgataaattggtgggaatcacaccccaagtaatgaaagacttgattgttcatttccaagataaaaaattaatggaaaatgtggaagcgctcattgtacatatggatatcaccagcctagatattcagcaggtagttctcatgtgttgggaaaatcgtttatatgatgctatgatctatgtctacaacagaggcatgaatgaatttattagtccaatggagaaacttttcagagtcattgctcctcctctgaatgcaggaaaaacactaacagatgaacaagttgttatgggcaataagctccttgtatatattagctgttgtctagcaggtcgtgcctatccccttggtgacatccctgaagatctggttcccttggttaaaaaccaggtttttgaatttctaattcgcctgcattcancagaggcttctcctgaggaagaaatctatccttacattcggactttgctacattttgacacaagagaatttctcaatgtattggcactgacttttgaagattttaaaaatgacaagcaagctgtggaatatcaacagcgaattgtggatattttgttgaaagttatggtggagaattcagactttaccccctcacaagtaggatgtctctttaccttccttgctcggcagcttgcaaagcctgacaacaccttgtttgtaaacagaacactttttgatcaggtccttgaattcctttgtagtcctgacgatgactcccgacactctgaaagacagcaggtccttttagaattgctgcaggctggaggcatagttcaatttgaagagagtcgactcatccggatggcagaaaaagctgagttctatcaaatttgtgaatttatgtatgaaagagaacaccaatatgacaaaattattgattgctacttacgtgaccctctgcgagaggaagaagtctttaattacattcacaatatcttatccattcccggacacagtgcagaggagaagcagtctgtatggcagaaagcaatggatcatattgaggaactcgtgtccctgaagccttgtaaagctgcggagctggttgccacccacttttctggacatattgaaacggtcattaaaaaacttcagaaccaggttttgcttttcaaatttttgaggagtcttcttgacccaagggaaggtattcatgtaaatcaagaattactgcaaatatctccttgtatcacagagcagttcattgagctgttgtgtcagttcaacccaacccaagttatagagactctgcaagtccttgagtgctaccgtctggaagaaactattcagattactcagaagtatcaacttcatgaagtcaccgcttatctattggaaaagaaaggagatattcatggtgccttcctaataatgttagagagactacaaagcaaacttcaagaggtaacacatcaaggtgaaaataccaaagaggatccctcattgaaggatgttgaagatactatggtggagaccattgctctttgccagagaaattcacataatttgaaccagcagcaacgtgaggccctttggtttccgttattggaggcaatgatggcccctcagaagctgtccagttcagccattcctcatctacactctgaagctctgaagtctttgaccatgcaagttttaaatagcatggcagcatttattgcccttccatcaatcttgcaaagaatcttacaggatccagtttatggaaaaggaaaacttggagaaatccagggacttatcttgggaatgttagatacctttaactatgaacaaaccctgctggaaacaacaaccagccttctaaaccaagatctccattggtcattgtgtaacctgagagcttcggtcaccagaggactgaatcccaaacaagattactgctctatatgtttgcagcagtacaagagacgccaagaaatggctgatgaaataattgtctttagctgtggccatttgtatcactcattctgcctacaaaacaaagaatgcactgtggaatttgagggccaaacaagatggacatgctacaaatgcagttcaagtaacaaagtaggaaaactcagtgaaaattcatctgaaattaaaaagggaaggataaccccatcacaggtaaaaatgtctccatcgtatcatcagtccaaaggggatcccactgctaaaaagggaacctcagaacctgttctggatccacagcaaatccaagcatttgatcagctttgccgtctctaccgaggaagctccaggctggctctcctcacggaactctcccagaatcgcagcagcgagagctataggccattcagtggctcgcagagtgctcctgctttcaacagcatcttccagaatgagaacttccagctgcagctcattcctccacctgtgactgaggattgatgactccatggagcctggcccaggagaaccagagatgatcccgaggcagctggggagaggccccgcctctggtgggcttggcctccaccacctcccacgcttctgagaagaggttccaaattgggcttctgtgcccagagcgtccacagcaccattcccagtgtagactcccagtcttctccacattgctgtcatggcgtcagttcaccagactcattgattttgttttgcttgttaagcaaaggaatgtcacatacctctgtccagctttttaggaaatacatttcgcctattgcgactttttccatttaccctgaagcctagaaagtaggtggaactcacacaaatggcattccagagtctgccatactccgtctcctccagctgctggataatacagaggaacttcaacttctacagggaacagtggttggccaggctgcagtataactgaagcatgccttggagagagcagacactgtgggggccagggccatctccctttaatgtgttcatgttaaaacctatttgagtgtaagacttgccctttctaacaataaatgctccgtgtttaagttct

SEQ ID NO: 60270 - DNA, 1584 bp, Homo sapiens
tctaatgtttaccaacaaatgtatgtgagaagtacgtttcaacctgtaaaacatcatgctgatgttagttattcttttgtttttcattgttttctttgaccacttttctttttctttgattttctctgacattataggccctttggtttccgttattggaggcaatgatggcccctcagaagctgtccagttcagccattcctcatctacactctgaagctctgaagtctttgaccatgcaagttttaaatagcatggcagcatttattgcccttccatcaatcttgcaaagaatcttacaggatccagtttatggaaaaggaaaacttggagaaatccagggacttatcttgggaatgttagatacctttaactatgaacaaaccctgctggaaacaacaaccagccttctaaaccaagatctccattggtcattgtgtaacctgagagcttcggtcaccagaggactgaatcccaaacaagattactgctctatatgtttgcagcagtacaagagacgccaagaaatggctgatgaaataattgtctttagctgtggccatttgtatcactcattctgcctacaaaacaaagaatgcactgtggaatttgagggccaaacaagatggacatgctacaaatgcagttcaagtaacaaagtaggaaaactcagtgaaaattcatctgaaattaaaaagggaaggataaccccatcacaggtaaaaatgtctccatcgtatcatcagtccaaaggggatcccactgctaaaaagggaacctcagaacctgttctggatccacagcaaatccaagcatttgatcagctttgccgtctctaccgaggaagctccaggctggctctcctcacggaactctcccagaatcgcagcagcgagagctataggccattcagtggctcgcagagtgctcctgctttcaacagcatcttccagaatgagaacttccagctgcagctcattcctccacctgtgactgaggattgatgactccatggagcctggcccaggagaaccagagatgatcccgaggcagctggggagaggccccgcctctggtgggcttggcctccaccacctcccacgcttctgagaagaggttccaaattgggcttctgtgcccagagcgtccacagcaccattcccagtgtagactcccagtcttctccacattgctgtcatggcgtcagttcaccagactcattgattttgttttgcttgttaagcaaaggaatgtcacatacctctgtccagctttttaggaaatacatttcgcctattgcgactttttccatttaccctgaagcctagaaagtaggtggaactcacacaaatggcattccagagtctgccatactccgtctcctccagctgctggataatacagaggaacttcaacttctacagggaacagtggttggccaggctgcagtataactgaagcatgccttggagagagcagacactgtgggggccagggccatctccctttaatgtgttcatgttaaaacctatttgagtgtaagacttgccctttctaacaataaatgctccgtgtttaagttct

SEQ ID NO: 60271 - DNA, 4837 bp, Homo sapiens
  misc_feature (2201)..(2201): n is a, c, g, or t
ggataaactagagaagtgtgttctcatctcttccccatgcctcgtaggaagctctaggttgggtagcataagtgcctcttactttgcctggatccctgattttttatttgaaagttgctttagaggaagctaagtggcatgttattgcctataatgttgaacatatgatattttgatagtgttactcctagagtaaatttagagggattctcagaaataaaatgtcctgagtttcatttcccgttttgcctcctgggatgaaattcttcttatttacaatagtttgtatgtcatctggtgcctaggaggaaggcaggccaacaaattcaactctggattatttcaagattcttaatgtaatgtcttaaaacgtaatcttcccttttgttttcaggcagtatccagtctgatagcagtgggtacatctcatggattggctttaatatttgatcagaatcaagctttgcgactctgtctgggtagcactagtgttggaggtcagtatggcgctatctctgccctcagtatcaacaatgattgctcaagacttctttgtggctttgctaaaggacagatcaccatgtgggatttggccagtggaaaacttctaagatcaataacagatgctcatcctccaggaacagcaatattgcatatcaagtttacagatgatccaactcttgcaatttgcaacgacagcggaggctctgtttttgaattgacatttaagagagtgatgggagtgagaacctgtgaatctagatgtctgttcagtggttccaagggtgaagtctgctgtattgagcctctgcattctaagcctgagttgaaagatcatcccatcacacagttttcattattggccatggcatccttgacaaaaatactggtcattggattgaaaccatccttgaaagtatggatgacttttccctatggccggatggatccttccagtgtgccactgctggcctggcactttgtagcagtacaaaattacgtgaatcccatgcttgccttctgcagaggagatgttgttcattttctattggtaaagagagatgaatctggagcaatacatgttactaagcaaaagcatcttcacctatactatgacctcatcaactttacctggataaattcacgcacagttgtgctcttagacagcgtagagaagttgcatgtgattgatcggcaaacacaagaggaattggagacagtggagatctcagaagttcagctggtctacaatagcagccatttcaaatcactagccactggaggaaatgttagccaggcactggctttggttggagagaaggcttgttatcaatccatcagtagctatggtggtcagatcttttatttggggacaaaatctgtttatgtgatgatgctgaggagctggagagagagagtggatcatctcctgaaacaagattgtcttacagaagcgttggctcttgcgtggtctttccatgaaggaaaagcaaaagcagtagtgggattatcaggggatgccagtaagcgaaaggctattgttgcagaccggatggtagaaatcctattccattatgcagatcgagctctgaaaaagtgcccagaccaaggaaaaatccaagtgatggagcagcattttcaggatatggtgcctgtcatagttgattactgccttctgctgcagcgaaaggatcttttatttagtcagatgtatgataaattaagtgagaattcagtggccaaaggagtatttttggagtgccttgagccatatattttaagtgataaattggtgggaatcacaccccaagtaatgaaagacttgattgttcatttccaagataaaaaattaatggaaaatgtggaagcgctcattgtacatatggatatcaccagcctagatattcagcaggtagttctcatgtgttgggaaaatcgtttatatgatgctatgatctatgtctacaacagaggcatgaatgaatttattagtccaatggagaaacttttcagagtcattgctcctcctctgaatgcaggaaaaacactaacagatgaacaagttgttatgggcaataagctccttgtatatattagctgttgtctagcaggtcgtgcctatccccttggtgacatccctgaagatctggttcccttggttaaaaaccaggtttttgaatttctaattcgcctgcattcancagaggcttctcctgaggaagaaatctatccttacattcggactttgctacattttgacacaagagaatttctcaatgtattggcactgacttttgaagattttaaaaatgacaagcaagctgtggaatatcaacagcgaattgtggatattttgttgaaagttatggtggagaattcagactttaccccctcacaagtaggatgtctctttaccttccttgctcggcagcttgcaaagcctgacaacaccttgtttgtaaacagaacactttttgatcaggtccttgaattcctttgtagtcctgacgatgactcccgacactctgaaagacagcaggtccttttagaattgctgcaggctggaggcatagttcaatttgaagagagtcgactcatccggatggcagaaaaagctgagttctatcaaatttgtgaatttatgtatgaaagagaacaccaatatgacaaaattattgattgctacttacgtgaccctctgcgagaggaagaagtctttaattacattcacaatatcttatccattcccggacacagtgcagaggagaagcagtctgtatggcagaaagcaatggatcatattgaggaactcgtgtccctgaagccttgtaaagctgcggagctggttgccacccacttttctggacatattgaaacggtcattaaaaaacttcagaaccaggttttgcttttcaaatttttgaggagtcttcttgacccaagggaaggtattcatgtaaatcaagaattactgcaaatatctccttgtatcacagagcagttcattgagctgttgtgtcagttcaacccaacccaagttatagagactctgcaagtccttgagtgctaccgtctggaagaaactattcagattactcagaagtatcaacttcatgaagtcaccgcttatctattggaaaagaaaggagatattcatggtgccttcctaataatgttagagagactacaaagcaaacttcaagaggtaacacatcaaggtgaaaataccaaagaggatccctcattgaaggatgttgaagatactatggtggagaccattgctctttgccagagaaattcacataatttgaaccagcagcaacgtgaggccctttggtttccgttattggaggcaatgatggcccctcagaagctgtccagttcagccattcctcatctacactctgaagctctgaagtctttgaccatgcaagttttaaatagcatggcagcatttattgcccttccatcaatcttgcaaagaatcttacaggatccagtttatggaaaaggaaaacttggagaaatccagggacttatcttgggaatgttagatacctttaactatgaacaaaccctgctggaaacaacaaccagccttctaaaccaagatctccattggtcattgtgtaacctgagagcttcggtcaccagaggactgaatcccaaacaagattactgctctatatgtttgcagcagtacaagagacgccaagaaatggctgatgaaataattgtctttagctgtggccatttgtatcactcattctgcctacaaaacaaagaatgcactgtggaatttgagggccaaacaagatggacatgctacaaatgcagttcaagtaacaaagtaggaaaactcagtgaaaattcatctgaaattaaaaagggaaggataaccccatcacaggtaaaaatgtctccatcgtatcatcagtccaaaggggatcccactgctaaaaagggaacctcagaacctgttctggatccacagcaaatccaagcatttgatcagctttgccgtctctaccgaggaagctccaggctggctctcctcacggaactctcccagaatcgcagcagcgagagctataggccattcagtggctcgcagagtgctcctgctttcaacagcatcttccagaatgagaacttccagctgcagctcattcctccacctgtgactgaggattgatgactccatggagcctggcccaggagaaccagagatgatcccgaggcagctggggagaggccccgcctctggtgggcttggcctccaccacctcccacgcttctgagaagaggttccaaattgggcttctgtgcccagagcgtccacagcaccattcccagtgtagactcccagtcttctccacattgctgtcatggcgtcagttcaccagactcattgattttgttttgcttgttaagcaaaggaatgtcacatacctctgtccagctttttaggaaatacatttcgcctattgcgactttttccatttaccctgaagcctagaaagtaggtggaactcacacaaatggcattccagagtctgccatactccgtctcctccagctgctggataatacagaggaacttcaacttctacagggaacagtggttggccaggctgcagtataactgaagcatgccttggagagagcagacactgtgggggccagggccatctccctttaatgtgttcatgttaaaacctatttgagtgtaagacttgccctttctaacaataaatgctccgtgtttaagttctgcaggtctcctggctggctggctggctctcagtctgtcaagtcatggaggacatttcgaaac

SEQ ID NO: 60272 - DNA, 816 bp, Homo sapiens
  misc_feature (21)..(21): n is a, c, g, or t
  misc_feature (50)..(50): n is a, c, g, or t
ctcgttgtacagccacacccngtggttggctcctagcaacccaagcattngatcagctttgccgtctcttttgaggaagctccgggctggctctcctcacggaactctcccagaatcgcagcagcgagagctataggccattcagtggctcgcagagtgctcctgctttcaacagcatcttccagaatgagaacttccagctgcagctcattcctccacctgtgactgaggattgatgactccatggagcctggcccaggagaaccagagatgatcccgaggcagctggggagaggccccgcctctggtgggcttggcctccaccacctcccacgcttctgagaagaggttccaaattgggcttctgtgcccagagcgtccacagcaccattcccagtgtagactcccagtcttctccacattgctgtcatggcgtcagttcaccagactcattgattttgttttgcttgttaagcaaaggaatgtcacatacctctgtccagctttttaggaaatacatttcgcctattgcgactttttccatttaccctgaagcctagaaagtaggtggaactcacacaaatggcattccagagtctgccatactccgtctcctccagctgctggataatacagaggaacttcaacttctacagggaacagtggttggccaggctgcagtataactgaagcatgccttggagagagcagacactgtgggggccagggccatctccctttaatgtgttcatgttaaaacctatttgagtgtaagacttgccctttctaacaataaatgctccgtgtttaagttct

SEQ ID NO: 60273 - DNA, 1698 bp, Homo sapiens
ggataaactagagaagtgtgttctcatctcttccccatgcctcgtaggaagctctaggttgggtagcataagtgcctcttactttgcctggatccctgattttttatttgaaagttgctttagaggaagctaagtggcatgttattgcctataatgttgaacatatgatattttgatagtgttactcctagagtaaatttagagggattctcagaaataaaatgtcctgagtttcatttcccgttttgcctcctgggatgaaattcttcttatttacaatagtttgtatgtcatctggtgcctaggaggaaggcaggccaacaaattcaactctggattatttcaagattcttaatgtaatgtcttaaaacgtaatcttcccttttgttttcaggcagtatccagtctgatagcagtgggtacatctcatggattggctttaatatttgatcagaatcaagctttgcgactctgtctgggtagcactagtgttggaggtcagtatggcgctatctctgccctcagtatcaacaatgattgctcaagacttctttgtggctttgctaaaggacagatcaccatgtgggatttggccagtggaaaacttctaagatcaataacagatgctcatcctccaggaacagcaatattgcatatcaagtttacagatgatccaactcttgcaatttgcaacgacagcggaggctctgtttttgaattgacatttaagagagtgatgggagtgagaacctgtgaatctagatgtctgttcagtggttccaagggtgaagtctgctgtattgagcctctgcattctaagcctgagttgaaagatcatcccatcacacagttttcattattggccatggcatccttgacaaaaatactggtcattggattgaaaccatccttgaaagtatggatgacttttccctatggccggatggatccttccagtgtgccactgctggcctggcactttgtagcagtacaaaattacgtgaatcccatgcttgccttctgcagaggagatgttgttcattttctattggtaaagagagatgaatctggagcaatacatgttactaagcaaaagcatcttcacctatactatgacctcatcaactttacctggataaattcacgcacagttgtgctcttagacagcgtagagaagttgcatgtgattgatcggcaaacacaagaggaattggagacagtggagatctcagaagttcagctggtctacaatagcagccatttcaaatcactagccactggaggaaatgttagccaggcactggctttggttggagagaaggcttgttatcaatccatcagtagctatggtggtcagatcttttatttggggacaaaatctgtttatgtgatgatgctgaggagctggagagaggtgagttccaagtaatttcacatgtcagagttactgaattggtagcttcttaacatttctgttttgacttttcagaagaagattatttggtaagcttcttaatttcagaagtgtacaagaaaaccattatagctgttaggtacttgatttgctagaactgacagtataagttagaattaggtttgtctacatatattagaaaattcaaaataatagtggcttaaataagatttctctgtcatgtaaaagcacctggagctaggtggtccgcagctcttgtagga

SEQ ID NO: 60274 - DNA, 3246 bp, Homo sapiens
  misc_feature (2201)..(2201): n is a, c, g, or t
  misc_feature (3216)..(3216): n is a, c, g, or t
ggataaactagagaagtgtgttctcatctcttccccatgcctcgtaggaagctctaggttgggtagcataagtgcctcttactttgcctggatccctgattttttatttgaaagttgctttagaggaagctaagtggcatgttattgcctataatgttgaacatatgatattttgatagtgttactcctagagtaaatttagagggattctcagaaataaaatgtcctgagtttcatttcccgttttgcctcctgggatgaaattcttcttatttacaatagtttgtatgtcatctggtgcctaggaggaaggcaggccaacaaattcaactctggattatttcaagattcttaatgtaatgtcttaaaacgtaatcttcccttttgttttcaggcagtatccagtctgatagcagtgggtacatctcatggattggctttaatatttgatcagaatcaagctttgcgactctgtctgggtagcactagtgttggaggtcagtatggcgctatctctgccctcagtatcaacaatgattgctcaagacttctttgtggctttgctaaaggacagatcaccatgtgggatttggccagtggaaaacttctaagatcaataacagatgctcatcctccaggaacagcaatattgcatatcaagtttacagatgatccaactcttgcaatttgcaacgacagcggaggctctgtttttgaattgacatttaagagagtgatgggagtgagaacctgtgaatctagatgtctgttcagtggttccaagggtgaagtctgctgtattgagcctctgcattctaagcctgagttgaaagatcatcccatcacacagttttcattattggccatggcatccttgacaaaaatactggtcattggattgaaaccatccttgaaagtatggatgacttttccctatggccggatggatccttccagtgtgccactgctggcctggcactttgtagcagtacaaaattacgtgaatcccatgcttgccttctgcagaggagatgttgttcattttctattggtaaagagagatgaatctggagcaatacatgttactaagcaaaagcatcttcacctatactatgacctcatcaactttacctggataaattcacgcacagttgtgctcttagacagcgtagagaagttgcatgtgattgatcggcaaacacaagaggaattggagacagtggagatctcagaagttcagctggtctacaatagcagccatttcaaatcactagccactggaggaaatgttagccaggcactggctttggttggagagaaggcttgttatcaatccatcagtagctatggtggtcagatcttttatttggggacaaaatctgtttatgtgatgatgctgaggagctggagagagagagtggatcatctcctgaaacaagattgtcttacagaagcgttggctcttgcgtggtctttccatgaaggaaaagcaaaagcagtagtgggattatcaggggatgccagtaagcgaaaggctattgttgcagaccggatggtagaaatcctattccattatgcagatcgagctctgaaaaagtgcccagaccaaggaaaaatccaagtgatggagcagcattttcaggatatggtgcctgtcatagttgattactgccttctgctgcagcgaaaggatcttttatttagtcagatgtatgataaattaagtgagaattcagtggccaaaggagtatttttggagtgccttgagccatatattttaagtgataaattggtgggaatcacaccccaagtaatgaaagacttgattgttcatttccaagataaaaaattaatggaaaatgtggaagcgctcattgtacatatggatatcaccagcctagatattcagcaggtagttctcatgtgttgggaaaatcgtttatatgatgctatgatctatgtctacaacagaggcatgaatgaatttattagtccaatggagaaacttttcagagtcattgctcctcctctgaatgcaggaaaaacactaacagatgaacaagttgttatgggcaataagctccttgtatatattagctgttgtctagcaggtcgtgcctatccccttggtgacatccctgaagatctggttcccttggttaaaaaccaggtttttgaatttctaattcgcctgcattcancagaggcttctcctgaggaagaaatctatccttacattcggactttgctacattttgacacaagagaatttctcaatgtattggcactgacttttgaagattttaaaaatgacaagcaagctgtggaatatcaacagcgaattgtggatattttgttgaaagttatggtggagaattcagactttaccccctcacaagtaggatgtctctttaccttccttgctcggcagcttgcaaagcctgacaacaccttgtttgtaaacagaacactttttgatcaggtccttgaattcctttgtagtcctgacgatgactcccgacactctgaaagacagcaggtccttttagaattgctgcaggctggaggcatagttcaatttgaagagagtcgactcatccggatggcagaaaaagctgagttctatcaaatttgtgaatttatgtatgaaagagaacaccaatatgacaaaattattgattgctacttacgtgaccctctgcgagaggaagaagtctttaattacattcacaatatcttatccattcccggacacagtgcagaggagaagcagtctgtatggcagaaagcaatggatcatattgaggaactcgtgtccctgaagccttgtaaagctgcggagctggttgccacccacttttctggacatattgaaacggtcattaaaaaacttcagaaccaggttttgcttttcaaatttttgaggagtcttcttgacccaagggaaggtattcatgtaaatcaagaattactgcaaatatctccttgtatcacagagcagttcattgagctgttgtgtcagttcaacccaacccaagttatagagactctgcaagtccttgagtgctaccgtctggaagaaactattcagattactcagaagtatcaacttcatgaagtcaccgcttatctattggaaaagaaaggagatattcatggtgccttcctaataatgttagagagacgtacaaagcaaacttcgaagaggtaacacantcaaggaggcaagggaggctcacagttgct

SEQ ID NO: 60275 - DNA, 2982 bp, Homo sapiens
cccttatggcgattgggcggctgcagagaccaggactcagttcccctgccctagtctgagcctagtgggtgggactcagctcagagtcagttttccagaagcaggtttcagtgcagagttttcctacacttttcctgcgctagagcagcgagcagcctggaacagacccaggcggaggacacctgtgggggagggagcgcctggaggagcttagagaccccagccgggcgtgatctcaccatgtgcggatttgcgaggcgcgccctggagctgctagagatccggaagcacagccccgaggtgtgcgaagccaccaagactgcggctcttggagaaagcgtgagcagggggccaccgcggtctccgcgcctgtctgcaccctgtcgcctgagctgcctgacagtgacaatgacatcccagttaccagtgtccttgaattgatagtggcttctgtttgtcagtctcatataagaactacagctcatcaggaggagatcgcagcagggtaagagacaccaacaccatgttctgcacgaagctcaaggatctcaagatcacaggagagtgtcctttctccttactggcaccaggtcaagttcctaacgagtcttcagaggaggcagcaggaagctcagagagctgcaaagcaaccgtgcccatctgtcaagacattcctgagaagaacatacaagaaagtcttcctcaaagaaaaaccagtcggagccgagtctatcttcacactttggcagagagtatttgcaaactgattttcccagagtttgaacggctgaatgttgcacttcagagaacattggcaaagcacaaaataaaagaaagcaggaaatctttggaaagagaagactttgaaaaaacaattgcagagcaagcagttgcagcaggagttccagtggaggttatcaaagaatctcttggtgaagaggtttttaaaatatgttacgaggaagatgaaaacatccttggggtggttggaggcacccttaaagattttttaaacagcttcagtacccttctgaaacagagcagccattgccaagaagcaggaaaaaggggcaggcttgaggacgcctccattctatgcctggataaggaggatgattttctacatgtttactacttcttccctaagagaaccacctccctgattcttcccggcatcataaaggcagctgctcacgtattatatgaaacggaagtggaagtgtcgttaatgcctccctgcttccataatgattgcagcgagtttgtgaatcagccctacttgttgtactccgttcacatgaaaagcaccaagccatccctgtcccccagcaaaccccagtcctcgctggtgattcccacatcgctattctgcaagacatttccattccatttcatgtttgacaaagatatgacaattctgcaatttggcaatggcatcagaaggctgatgaacaggagagactttcaaggaaagcctaattttgaagaatactttgaaattctgactccaaaaatcaaccagacgtttagcgggatcatgactatgttgaatatgcagtttgttgtacgagtgaggagatgggacaactctgtgaagaaatcttcaagggttatggacctcaaaggccaaatgatctacattgttgaatccagtgcaatcttgtttttggggtcaccctgtgtggacagattagaagattttacaggacgagggctctacctctcagacatcccaattcacaatgcactgagggatgtggtcttaataggggaacaagcccgagctcaagatggcctgaagaagaggctggggaagctgaaggctacccttgagcaagcccaccaagccctggaggaggagaagaaaaagacagtagaccttctgtgctccatatttccctgtgaggttgctcagcagctgtggcaagggcaagttgtgcaagccaagaagttcagtaatgtcaccatgctcttctcagacatcgttgggttcactgccatctgctcccagtgctcaccgctgcaggtcatcaccatgctcaatgcactgtacactcgcttcgaccagcagtgtggagagctggatgtctacaaggtggagaccattggcgatgcctattgtgtagctgggggattacacaaagagagtgatactcatgctgttcagatagcgctgatggccctgaagatgatggagctctctgatgaagttatgtctccccatggagaacctatcaagatgcgaattggactgcactctggatcagtttttgctggcgtcgttggagttaaaatgccccgttactgtctttttggaaacaatgtcactctggctaacaaatttgagtcctgcagtgtaccacgaaaaatcaatgtcagcccaacaacttacagattactcaaagactgtcctggtttcgtgtttacccctcgatcaagggaggaacttccaccaaacttccctagtgaaatccccggaatctgccattttctggatgcttaccaacaaggaacaaactcaaaaccatgcttccaaaagaaagatgtggaagatggcaatgccaattttttaggcaaagcatcaggaatagattagcaacctatatacctatttataagtctttggggtttgactcattgaagatgtgtagagcctctgaaagcactttagggattgtagatggctaacaagcagtattaaaatttcaggagccaagtcacaatctttctcctgtttaacatgacaaaatgtactcacttcagtacttcagctcttcaagaaaaaaaaaaaaaccttaaaaagctacttttgtgggagtatttctattatataaccagcacttactacctgtactcaaaattcagcaccttgtacatatatcagataattgtagtcaattgtacaaactgatggagtcacctgcaatctcatatcctggtggaatgccatggttattaaagtgtgtttgtgatagtgtcgtc

SEQ ID NO: 60276 - DNA, 758 bp, Homo sapiens
aatctacattttggttggggataaagatttgattttaaaaacagcttgaatttaaagcaagaaaaagatgaacgttatagttttaaaatcaatattagcagagccatagataggctgaactcttatttggggttctgagaaataactcagtttaaaacttctttaactgcctcccttagtacccaggctagcccatggtgacatcagggatattcattactgattggcctctagtattccaagggtactactatagatattacaatgatgctgtttactaagtgataaccccgtatcttacaggactgactttgactcaataaaccactcagcctattattggaaagtgccataggccttgagaaagtatagttacatcctcacaaatatatgaagttaagtcactacttacaaggaaaaaaaatgtaaatacatttttctttctggaaccgaactcttattatggggaaataatagaaataaagaaaatgtaaaagcatgaaatggaatgtagtcttgatcaaacatttcagcagacctcaatttgcttacaatctgtactcaaaaagtttataattcaatcagaattcaaaaagtattttgtgtgtttgtgatgtattagcatatacacaaaacaaatgaggggaatgtatataatcttggtgaaaagttgtatgggagttttttgtacgattcctgcaacttttctataaacgtggcattatatctaaataaaaaattaccaaaaaacatatttt

SEQ ID NO: 60277 - DNA, 1069 bp, Homo sapiens
cccttatggcgattgggcggctgcagagaccaggactcagttcccctgccctagtctgagcctagtgggtgggactcagctcagagtcagttttccagaagcaggtttcagtgcagagttttcctacacttttcctgcgctagagcagcgagcagcctggaacagacccaggcggaggacacctgtgggggagggagcgcctggaggagcttagagaccccagccgggcgtgatctcaccatgtgcggatttgcgaggcgcgccctggagctgctagagatccggaagcacagccccgaggtgtgcgaagccaccaagactgcggctcttggagaaagcgtgagcagggggccaccgcggtctccgcgcctgtctgcaccctgtcgcctgagctgcctgacagtgacaatggtgtgaggggctgcgttgcaatgtggtcatgtgatttcaggctatggatttcgtgcgtctttctctgctcactgattttcacatggttattctttcattttgcactcgataaacagtttacatcttctgaagtaagccagaagattgtatggctcacttaacgatgactggttgaaggcatcttgatttggaacctatggaaacagtgctgagttttaaataggacagatttttttttctttcatttgaacttcatttataacatatcaatagtgatgttttaggatcagttctcctatggtaatttcactaaatgcctatttaatgaattgatttgatttcatacatctctaccacttactagaactgtctttgtacaaacgtcaaactttcctgttacatatgggtaagcatagaagcacttgatataatttttttttatcttggttcagagtgtagaagtggtctgttgcttttcctaaaattgctatacatattttttctttaagagtgatcatttcaggtaccctattatgtacagtggtaaaaagtaaactcgttatgatagcaacgacgatgtaaccaaaataagcaacacttaattggtctgaaagttatacatataagctttattattgcttcagtggaagttgtctat

SEQ ID NO: 60278 - DNA, 3846 bp, Homo sapiens
cccttatggcgattgggcggctgcagagaccaggactcagttcccctgccctagtctgagcctagtgggtgggactcagctcagagtcagttttccagaagcaggtttcagtgcagagttttcctacacttttcctgcgctagagcagcgagcagcctggaacagacccaggcggaggacacctgtgggggagggagcgcctggaggagcttagagaccccagccgggcgtgatctcaccatgtgcggatttgcgaggcgcgccctggagctgctagagatccggaagcacagccccgaggtgtgcgaagccaccaaacatcccagttaccagtgtccttgaattgatagtggcttctgtttgtcagtctcatataagaactacagctcatcaggaggagatcgcagcagggtaagagacaccaacaccatgttctgcacgaagctcaaggatctcaagatcacaggagagtgtcctttctccttactggcaccaggtcaagttcctaacgagtcttcagaggaggcagcaggaagctcagagagctgcaaagcaaccgtgcccatctgtcaagacattcctgagaagaacatacaagaaagtcttcctcaaagaaaaaccagtcggagccgagtctatcttcacactttggcagagagtatttgcaaactgattttcccagagtttgaacggctgaatgttgcacttcagagaacattggcaaagcacaaaataaaagaaagcaggaaatctttggaaagagaagactttgaaaaaacaattgcagagcaagcagttgcagcaggagttccagtggaggttatcaaagaatctcttggtgaagaggtttttaaaatatgttacgaggaagatgaaaacatccttggggtggttggaggcacccttaaagattttttaaacagcttcagtacccttctgaaacagagcagccattgccaagaagcaggaaaaaggggcaggcttgaggacgcctccattctatgcctggataaggaggatgattttctacatgtttactacttcttccctaagagaaccacctccctgattcttcccggcatcataaaggcagctgctcacgtattatatgaaacggaagtggaagtgtcgttaatgcctccctgcttccataatgattgcagcgagtttgtgaatcagccctacttgttgtactccgttcacatgaaaagcaccaagccatccctgtcccccagcaaaccccagtcctcgctggtgattcccacatcgctattctgcaagacatttccattccatttcatgtttgacaaagatatgacaattctgcaatttggcaatggcatcagaaggctgatgaacaggagagactttcaaggaaagcctaattttgaagaatactttgaaattctgactccaaaaatcaaccagacgtttagcgggatcatgactatgttgaatatgcagtttgttgtacgagtgaggagatgggacaactctgtgaagaaatcttcaagggttatggacctcaaaggccaaatgatctacattgttgaatccagtgcaatcttgtttttggggtcaccctgtgtggacagattagaagattttacaggacgagggctctacctctcagacatcccaattcacaatgcactgagggatgtggtcttaataggggaacaagcccgagctcaagatggcctgaagaagaggctggggaagctgaaggctacccttgagcaagcccaccaagccctggaggaggagaagaaaaagacagtagaccttctgtgctccatatttccctgtgaggttgctcagcagctgtggcaagggcaagttgtgcaagccaagaagttcagtaatgtcaccatgctcttctcagacatcgttgggttcactgccatctgctcccagtgctcaccgctgcaggtcatcaccatgctcaatgcactgtacactcgcttcgaccagcagtgtggagagctggatgtctacaaggtggagaccattggcgatgcctattgtgtagctgggggattacacaaagagagtgatactcatgctgttcagatagcgctgatggccctgaagatgatggagctctctgatgaagttatgtctccccatggagaacctatcaagatgcgaattggactgcactctggatcagtttttgctggcgtcgttggagttaaaatgccccgttactgtctttttggaaacaatgtcactctggctaacaaatttgagtcctgcagtgtaccacgaaaaatcaatgtcagcccaacaacttacagattactcaaagactgtcctggtttcgtgtttacccctcgatcaagggaggaacttccaccaaacttccctagtgaaatccccggaatctgccattttctggatgcttaccaacaaggaacaaactcaaaaccatgcttccaaaagaaagatgtggaagatggcaatgccaattttttaggcaaagcatcaggaatagattagcaacctatatacctatttataagtctttggggtttgactcattgaagatgtgtagagcctctgaaagcactttagggattgtagatggctaacaagcagtattaaaatttcaggagccaagtcacaatctttctcctgtttaacatgacaaaatgtactcacttcagtacttcagctcttcaagaaaaaaaaaaaaaccttaaaaagctacttttgtgggagtatttctattatataaccagcacttactacctgtactcaaaattcagcaccttgtacatatatcagataattgtagtcaattgtacaaactgatggagtcacctgcaatctcatatcctggtggaatgccatggttattaaagtgtgtttgtgatagtgtcgtcaaaaaaaaggtttttgaatagaaattacattctttgacaccctcagttctttcaaactttcaactctgcattttattgcattttctcatttaactgttagtatatgtttgaatataggctgactttttttctctattgcactttcttctttttttctttttagaaaataagcaattaggggttagatgcaatatgaatataaaatagttctgtaaataccaaatattatttttagttctggaagttaaaaatactctccatagtaacgtgtgttataataataaatatttcttttgtttgacttttttaaaattctacaatggtaaaagctattttaatccatgttagcaatttaattcctattaattcattttactatcataatagcaaagtattcagaataaaagaggtttatatcttctattaaaatgcagtaatactattcaaatctaatttagctggaagcaacatgggagtaaagtaatcatccaggggacccaccataaaggacattggtaaaacatttacacacgtaaacacacgtgcaggcacacttggaacaatatggacccacttcagcagacatcttctattgccatgctgagctgtttaaagttttaagaagaaaatctaagtatggaagtagaaaataagacttgttcttttggtggatatctcatttttcttgagtatttgtgctgaacattttggtgtatgtctatgaactaagaatcaagtttttgtctcattaaatatacatatatgaagtgtttttattctacttgaaatatcttgacttaaaaaaaacgactgttagtattgatgaagcaaatgaggcagtgactacattatggaaatgtctaagtattttttccggaacttcaactttttctttttgttttacataaacatttaagcagctaggaacttttagttttagttaggtcagttgaagttc

SEQ ID NO: 60279 - DNA, 3784 bp, Homo sapiens
gaggcgggcagaggtctgaaaaaatcgaatgccttatggaaaggaactgcaagggttcctttggggtgatcaaagagggagacacagacacagagagacaaaggcaaggaggactgtctgggagccacgcgggcgatacagtttccgaggcacgccgcgtcccgcctagcctgttgaacagtgcggatttgcgaggcgcgccctggagctgctagagatccggaagcacagccccgaggtgtgcgaagccaccaaacatcccagttaccagtgtccttgaattgatagtggcttctgtttgtcagtctcatataagaactacagctcatcaggaggagatcgcagcagggtaagagacaccaacaccatgttctgcacgaagctcaaggatctcaagatcacaggagagtgtcctttctccttactggcaccaggtcaagttcctaacgagtcttcagaggaggcagcaggaagctcagagagctgcaaagcaaccgtgcccatctgtcaagacattcctgagaagaacatacaagaaagtcttcctcaaagaaaaaccagtcggagccgagtctatcttcacactttggcagagagtatttgcaaactgattttcccagagtttgaacggctgaatgttgcacttcagagaacattggcaaagcacaaaataaaagaaagcaggaaatctttggaaagagaagactttgaaaaaacaattgcagagcaagcagttgcagcaggagttccagtggaggttatcaaagaatctcttggtgaagaggtttttaaaatatgttacgaggaagatgaaaacatccttggggtggttggaggcacccttaaagattttttaaacagcttcagtacccttctgaaacagagcagccattgccaagaagcaggaaaaaggggcaggcttgaggacgcctccattctatgcctggataaggaggatgattttctacatgtttactacttcttccctaagagaaccacctccctgattcttcccggcatcataaaggcagctgctcacgtattatatgaaacggaagtggaagtgtcgttaatgcctccctgcttccataatgattgcagcgagtttgtgaatcagccctacttgttgtactccgttcacatgaaaagcaccaagccatccctgtcccccagcaaaccccagtcctcgctggtgattcccacatcgctattctgcaagacatttccattccatttcatgtttgacaaagatatgacaattctgcaatttggcaatggcatcagaaggctgatgaacaggagagactttcaaggaaagcctaattttgaagaatactttgaaattctgactccaaaaatcaaccagacgtttagcgggatcatgactatgttgaatatgcagtttgttgtacgagtgaggagatgggacaactctgtgaagaaatcttcaagggttatggacctcaaaggccaaatgatctacattgttgaatccagtgcaatcttgtttttggggtcaccctgtgtggacagattagaagattttacaggacgagggctctacctctcagacatcccaattcacaatgcactgagggatgtggtcttaataggggaacaagcccgagctcaagatggcctgaagaagaggctggggaagctgaaggctacccttgagcaagcccaccaagccctggaggaggagaagaaaaagacagtagaccttctgtgctccatatttccctgtgaggttgctcagcagctgtggcaagggcaagttgtgcaagccaagaagttcagtaatgtcaccatgctcttctcagacatcgttgggttcactgccatctgctcccagtgctcaccgctgcaggtcatcaccatgctcaatgcactgtacactcgcttcgaccagcagtgtggagagctggatgtctacaaggtggagaccattggcgatgcctattgtgtagctgggggattacacaaagagagtgatactcatgctgttcagatagcgctgatggccctgaagatgatggagctctctgatgaagttatgtctccccatggagaacctatcaagatgcgaattggactgcactctggatcagtttttgctggcgtcgttggagttaaaatgccccgttactgtctttttggaaacaatgtcactctggctaacaaatttgagtcctgcagtgtaccacgaaaaatcaatgtcagcccaacaacttacagattactcaaagactgtcctggtttcgtgtttacccctcgatcaagggaggaacttccaccaaacttccctagtgaaatccccggaatctgccattttctggatgcttaccaacaaggaacaaactcaaaaccatgcttccaaaagaaagatgtggaagatggcaatgccaattttttaggcaaagcatcaggaatagattagcaacctatatacctatttataagtctttggggtttgactcattgaagatgtgtagagcctctgaaagcactttagggattgtagatggctaacaagcagtattaaaatttcaggagccaagtcacaatctttctcctgtttaacatgacaaaatgtactcacttcagtacttcagctcttcaagaaaaaaaaaaaaaccttaaaaagctacttttgtgggagtatttctattatataaccagcacttactacctgtactcaaaattcagcaccttgtacatatatcagataattgtagtcaattgtacaaactgatggagtcacctgcaatctcatatcctggtggaatgccatggttattaaagtgtgtttgtgatagtgtcgtcaaaaaaaaggtttttgaatagaaattacattctttgacaccctcagttctttcaaactttcaactctgcattttattgcattttctcatttaactgttagtatatgtttgaatataggctgactttttttctctattgcactttcttctttttttctttttagaaaataagcaattaggggttagatgcaatatgaatataaaatagttctgtaaataccaaatattatttttagttctggaagttaaaaatactctccatagtaacgtgtgttataataataaatatttcttttgtttgacttttttaaaattctacaatggtaaaagctattttaatccatgttagcaatttaattcctattaattcattttactatcataatagcaaagtattcagaataaaagaggtttatatcttctattaaaatgcagtaatactattcaaatctaatttagctggaagcaacatgggagtaaagtaatcatccaggggacccaccataaaggacattggtaaaacatttacacacgtaaacacacgtgcaggcacacttggaacaatatggacccacttcagcagacatcttctattgccatgctgagctgtttaaagttttaagaagaaaatctaagtatggaagtagaaaataagacttgttcttttggtggatatctcatttttcttgagtatttgtgctgaacattttggtgtatgtctatgaactaagaatcaagtttttgtctcattaaatatacatatatgaagtgtttttattctacttgaaatatcttgacttaaaaaaaacgactgttagtattgatgaagcaaatgaggcagtgactacattatggaaatgtctaagtattttttccggaacttcaactttttctttttgttttacataaacatttaagcagctaggaacttttagttttagttaggtcagttgaagttc

SEQ ID NO: 60280 - DNA, 2650 bp, Homo sapiens
cccttatggcgattgggcggctgcagagaccaggactcagttcccctgccctagtctgagcctagtgggtgggactcagctcagagtcagttttccagaagcaggtttcagtgcagagttttcctacacttttcctgcgctagagcagcgagcagcctggaacagacccaggcggaggacacctgtgggggagggagcgcctggaggagcttagagaccccagccgggcgtgatctcaccatgtgcggatttgcgaggcgcgccctggagctgctagagatccggaagcacagccccgaggtgtgcgaagccaccaaacatcccagttaccagtgtccttgaattgatagtggcttctgtttgtcagtctcatataagaactacagctcatcaggaggagatcgcagcagggtaagagacaccaacaccatgttctgcacgaagctcaaggatctcaagatcacaggagagtgtcctttctccttactggcaccaggtcaagttcctaacgagtcttcagaggaggcagcaggaagctcagagagctgcaaagcaaccgtgcccatctgtcaagacattcctgagaagaacatacaagaaagtcttcctcaaagaaaaaccagtcggagccgagtctatcttcacactttggcagagagtatttgcaaactgattttcccagagtttgaacggctgaatgttgcacttcagagaacattggcaaagcacaaaataaaagaaagcaggaaatctttggaaagagaagactttgaaaaaacaattgcagagcaagcagttgcagcaggtggagaccattggcgatgcctattgtgtagctgggggattacacaaagagagtgatactcatgctgttcagatagcgctgatggccctgaagatgatggagctctctgatgaagttatgtctccccatggagaacctatcaagatgcgaattggactgcactctggatcagtttttgctggcgtcgttggagttaaaatgccccgttactgtctttttggaaacaatgtcactctggctaacaaatttgagtcctgcagtgtaccacgaaaaatcaatgtcagcccaacaacttacagattactcaaagactgtcctggtttcgtgtttacccctcgatcaagggaggaacttccaccaaacttccctagtgaaatccccggaatctgccattttctggatgcttaccaacaaggaacaaactcaaaaccatgcttccaaaagaaagatgtggaagatggcaatgccaattttttaggcaaagcatcaggaatagattagcaacctatatacctatttataagtctttggggtttgactcattgaagatgtgtagagcctctgaaagcactttagggattgtagatggctaacaagcagtattaaaatttcaggagccaagtcacaatctttctcctgtttaacatgacaaaatgtactcacttcagtacttcagctcttcaagaaaaaaaaaaaaaccttaaaaagctacttttgtgggagtatttctattatataaccagcacttactacctgtactcaaaattcagcaccttgtacatatatcagataattgtagtcaattgtacaaactgatggagtcacctgcaatctcatatcctggtggaatgccatggttattaaagtgtgtttgtgatagtgtcgtcaaaaaaaaggtttttgaatagaaattacattctttgacaccctcagttctttcaaactttcaactctgcattttattgcattttctcatttaactgttagtatatgtttgaatataggctgactttttttctctattgcactttcttctttttttctttttagaaaataagcaattaggggttagatgcaatatgaatataaaatagttctgtaaataccaaatattatttttagttctggaagttaaaaatactctccatagtaacgtgtgttataataataaatatttcttttgtttgacttttttaaaattctacaatggtaaaagctattttaatccatgttagcaatttaattcctattaattcattttactatcataatagcaaagtattcagaataaaagaggtttatatcttctattaaaatgcagtaatactattcaaatctaatttagctggaagcaacatgggagtaaagtaatcatccaggggacccaccataaaggacattggtaaaacatttacacacgtaaacacacgtgcaggcacacttggaacaatatggacccacttcagcagacatcttctattgccatgctgagctgtttaaagttttaagaagaaaatctaagtatggaagtagaaaataagacttgttcttttggtggatatctcatttttcttgagtatttgtgctgaacattttggtgtatgtctatgaactaagaatcaagtttttgtctcattaaatatacatatatgaagtgtttttattctacttgaaatatcttgacttaaaaaaaacgactgttagtattgatgaagcaaatgaggcagtgactacattatggaaatgtctaagtattttttccggaacttcaactttttctttttgttttacataaacatttaagcagctaggaacttttagttttagttaggtcagttgaagttc

SEQ ID NO: 60281 - DNA, 1602 bp, Homo sapiens
  misc_feature (55)..(55): n is a, c, g, or t
attatagaggccacatcagattagagggagtaggcgcacggcccggtcgccttantattactcaaagactgtcctggtttcgtgtttacccctcgatcaagggaggaacttccaccaaacttccctagtgaaatccccggaatctgccattttctggatgcttaccaacaaggaacaaactcaaaaccatgcttccaaaagaaagatgtggaagatggcaatgccaattttttaggcaaagcatcaggaatagattagcaacctatatacctatttataagtctttggggtttgactcattgaagatgtgtagagcctctgaaagcactttagggattgtagatggctaacaagcagtattaaaatttcaggagccaagtcacaatctttctcctgtttaacatgacaaaatgtactcacttcagtacttcagctcttcaagaaaaaaaaaaaaaccttaaaaagctacttttgtgggagtatttctattatataaccagcacttactacctgtactcaaaattcagcaccttgtacatatatcagataattgtagtcaattgtacaaactgatggagtcacctgcaatctcatatcctggtggaatgccatggttattaaagtgtgtttgtgatagtgtcgtcaaaaaaaaggtttttgaatagaaattacattctttgacaccctcagttctttcaaactttcaactctgcattttattgcattttctcatttaactgttagtatatgtttgaatataggctgactttttttctctattgcactttcttctttttttctttttagaaaataagcaattaggggttagatgcaatatgaatataaaatagttctgtaaataccaaatattatttttagttctggaagttaaaaatactctccatagtaacgtgtgttataataataaatatttcttttgtttgacttttttaaaattctacaatggtaaaagctattttaatccatgttagcaatttaattcctattaattcattttactatcataatagcaaagtattcagaataaaagaggtttatatcttctattaaaatgcagtaatactattcaaatctaatttagctggaagcaacatgggagtaaagtaatcatccaggggacccaccataaaggacattggtaaaacatttacacacgtaaacacacgtgcaggcacacttggaacaatatggacccacttcagcagacatcttctattgccatgctgagctgtttaaagttttaagaagaaaatctaagtatggaagtagaaaataagacttgttcttttggtggatatctcatttttcttgagtatttgtgctgaacattttggtgtatgtctatgaactaagaatcaagtttttgtctcattaaatatacatatatgaagtgtttttattctacttgaaatatcttgacttaaaaaaaacgactgttagtattgatgaagcaaatgaggcagtgactacattatggaaatgtctaagtattttttccggaacttcaactttttctttttgttttacataaacatttaagcagctaggaacttttagttttagttaggtcagttgaagttc

SEQ ID NO: 60282 - DNA, 1472 bp, Homo sapiens
cccttatggcgattgggcggctgcagagaccaggactcagttcccctgccctagtctgagcctagtgggtgggactcagctcagagtcagttttccagaagcaggtttcagtgcagagttttcctacacttttcctgcgctagagcagcgagcagcctggaacagacccaggcggaggacacctgtgggggagggagcgcctggaggagcttagagaccccagccgggcgtgatctcaccatgtgcggatttgcgaggcgcgccctggagctgctagagatccggaagcacagccccgaggtgtgcgaagccaccaaacatcccagttaccagtgtccttgaattgatagtggcttctgtttgtcagtctcatataagaactacagctcatcaggaggagatcgcagcagggtaagagacaccaacaccatgttctgcacgaagctcaaggatctcaagatcacaggagagtgtcctttctccttactggcaccaggtcaagttcctaacgagtcttcagaggaggcagcaggaagctcagagagctgcaaagcaaccgtgcccatctgtcaagacattcctgagaagaacatacaagaaagtcttcctcaaagaaaaaccagtcggagccgagtctatcttcacactttggcagagagtatttgcaaactgattttcccagagtttgaacggctgaatgttgcacttcagagaacattggcaaagcacaaaataaaagaaagcaggaaatctttggaaagagaagactttgaaaaaacaattgcagagcaagcagttgcagcaggagttccagtggaggttatcaaagaatctcttggtgaagaggtttttaaaatatgttacgaggaagatgaaaacatccttggggtggttggaggcacccttaaagattttttaaacagcttcagtacccttctgaaacagagcagccattgccaagaagcaggaaaaaggggcaggcttgaggacgcctccattctatgcctggataaggaggatgattttctacatgtttactacttcttccctaagagaaccacctccctgattcttcccggcatcataaaggcagctgctcacgtattatatgaaacggaagtggaagtgtcgttaatgcctccctgcttccataatgattgcagcgagtttgtgaatcagccctacttgttgtactccgttcacatgaaaagcaccaagccatccctgtcccccatcaaacatttcagcagacctcaatttgcttacaatctgtactcaaaaagtttataattcaatcagaattcaaaaagtattttgtgtgtttgtgatgtattagcatatacacaaaacaaatgaggggaatgtatataatcttggtgaaaagttgtatgggagttttttgtacgattcctgcaacttttctataaacgtggcattatatctaaataaaaaattaccaaaaaacatatttt

SEQ ID NO: 60283 - DNA, 103 bp, Homo sapiens
cagatagcgctgatggccctgaagatgatggagctctctgatgaagttatgtctccccatggagaacctatcaaggtaaggcagatgatatattgtccaaaag

SEQ ID NO: 60284 - DNA, 3805 bp, Homo sapiens
agcacagacgggggtgggcgccgagcagcgccgcgccggctgctgagctcgcggggccgggccgtgagaacgcgcggggcgcgccggggccgctggtctcccacggccagggcgcctgggccccagaacccatcagccgcgtgcagcgctgcggcctccggcgcgccggaaggcaagcgagcgggcgcagctgggggatgcctggaccccggaggcagcagggctggaggcggtggcgggcttcagggcaacttcacccggccggctgcggcgtggacatcccagttaccagtgtccttgaattgatagtggcttctgtttgtcagtctcatataagaactacagctcatcaggaggagatcgcagcagggtaagagacaccaacaccatgttctgcacgaagctcaaggatctcaagatcacaggagagtgtcctttctccttactggcaccaggtcaagttcctaacgagtcttcagaggaggcagcaggaagctcagagagctgcaaagcaaccgtgcccatctgtcaagacattcctgagaagaacatacaagaaagtcttcctcaaagaaaaaccagtcggagccgagtctatcttcacactttggcagagagtatttgcaaactgattttcccagagtttgaacggctgaatgttgcacttcagagaacattggcaaagcacaaaataaaagaaagcaggaaatctttggaaagagaagactttgaaaaaacaattgcagagcaagcagttgcagcaggagttccagtggaggttatcaaagaatctcttggtgaagaggtttttaaaatatgttacgaggaagatgaaaacatccttggggtggttggaggcacccttaaagattttttaaacagcttcagtacccttctgaaacagagcagccattgccaagaagcaggaaaaaggggcaggcttgaggacgcctccattctatgcctggataaggaggatgattttctacatgtttactacttcttccctaagagaaccacctccctgattcttcccggcatcataaaggcagctgctcacgtattatatgaaacggaagtggaagtgtcgttaatgcctccctgcttccataatgattgcagcgagtttgtgaatcagccctacttgttgtactccgttcacatgaaaagcaccaagccatccctgtcccccagcaaaccccagtcctcgctggtgattcccacatcgctattctgcaagacatttccattccatttcatgtttgacaaagatatgacaattctgcaatttggcaatggcatcagaaggctgatgaacaggagagactttcaaggaaagcctaattttgaagaatactttgaaattctgactccaaaaatcaaccagacgtttagcgggatcatgactatgttgaatatgcagtttgttgtacgagtgaggagatgggacaactctgtgaagaaatcttcaagggttatggacctcaaaggccaaatgatctacattgttgaatccagtgcaatcttgtttttggggtcaccctgtgtggacagattagaagattttacaggacgagggctctacctctcagacatcccaattcacaatgcactgagggatgtggtcttaataggggaacaagcccgagctcaagatggcctgaagaagaggctggggaagctgaaggctacccttgagcaagcccaccaagccctggaggaggagaagaaaaagacagtagaccttctgtgctccatatttccctgtgaggttgctcagcagctgtggcaagggcaagttgtgcaagccaagaagttcagtaatgtcaccatgctcttctcagacatcgttgggttcactgccatctgctcccagtgctcaccgctgcaggtcatcaccatgctcaatgcactgtacactcgcttcgaccagcagtgtggagagctggatgtctacaaggtggagaccattggcgatgcctattgtgtagctgggggattacacaaagagagtgatactcatgctgttcagatagcgctgatggccctgaagatgatggagctctctgatgaagttatgtctccccatggagaacctatcaagatgcgaattggactgcactctggatcagtttttgctggcgtcgttggagttaaaatgccccgttactgtctttttggaaacaatgtcactctggctaacaaatttgagtcctgcagtgtaccacgaaaaatcaatgtcagcccaacaacttacagattactcaaagactgtcctggtttcgtgtttacccctcgatcaagggaggaacttccaccaaacttccctagtgaaatccccggaatctgccattttctggatgcttaccaacaaggaacaaactcaaaaccatgcttccaaaagaaagatgtggaagatggcaatgccaattttttaggcaaagcatcaggaatagattagcaacctatatacctatttataagtctttggggtttgactcattgaagatgtgtagagcctctgaaagcactttagggattgtagatggctaacaagcagtattaaaatttcaggagccaagtcacaatctttctcctgtttaacatgacaaaatgtactcacttcagtacttcagctcttcaagaaaaaaaaaaaaaccttaaaaagctacttttgtgggagtatttctattatataaccagcacttactacctgtactcaaaattcagcaccttgtacatatatcagataattgtagtcaattgtacaaactgatggagtcacctgcaatctcatatcctggtggaatgccatggttattaaagtgtgtttgtgatagtgtcgtcaaaaaaaaggtttttgaatagaaattacattctttgacaccctcagttctttcaaactttcaactctgcattttattgcattttctcatttaactgttagtatatgtttgaatataggctgactttttttctctattgcactttcttctttttttctttttagaaaataagcaattaggggttagatgcaatatgaatataaaatagttctgtaaataccaaatattatttttagttctggaagttaaaaatactctccatagtaacgtgtgttataataataaatatttcttttgtttgacttttttaaaattctacaatggtaaaagctattttaatccatgttagcaatttaattcctattaattcattttactatcataatagcaaagtattcagaataaaagaggtttatatcttctattaaaatgcagtaatactattcaaatctaatttagctggaagcaacatgggagtaaagtaatcatccaggggacccaccataaaggacattggtaaaacatttacacacgtaaacacacgtgcaggcacacttggaacaatatggacccacttcagcagacatcttctattgccatgctgagctgtttaaagttttaagaagaaaatctaagtatggaagtagaaaataagacttgttcttttggtggatatctcatttttcttgagtatttgtgctgaacattttggtgtatgtctatgaactaagaatcaagtttttgtctcattaaatatacatatatgaagtgtttttattctacttgaaatatcttgacttaaaaaaaacgactgttagtattgatgaagcaaatgaggcagtgactacattatggaaatgtctaagtattttttccggaacttcaactttttctttttgttttacataaacatttaagcagctaggaacttttagttttagttaggtcagttgaagttc

SEQ ID NO: 60285 - DNA, 2694 bp, Homo sapiens
cccttatggcgattgggcggctgcagagaccaggactcagttcccctgccctagtctgagcctagtgggtgggactcagctcagagtcagttttccagaagcaggtttcagtgcagagttttcctacacttttcctgcgctagagcagcgagcagcctggaacagacccaggcggaggacacctgtgggggagggagcgcctggaggagcttagagaccccagccgggcgtgatctcaccatgtgcggatttgcgaggcgcgccctggagctgctagagatccggaagcacagccccgaggtgtgcgaagccaccaaacatcccagttaccagtgtccttgaattgatagtggcttctgtttgtcagtctcatataagaactacagctcatcaggaggagatcgcagcagggtaagagacaccaacaccatgttctgcacgaagctcaaggatctcaagatcacaggagagtgtcctttctccttactggcaccaggtcaagttcctaacgagtcttcagaggaggcagcaggaagctcagagagctgcaaagcaaccgtgcccatctgtcaagacattcctgagaagaacatacaagaaagtcttcctcaaagaaaaaccagtcggagccgagtctatcttcacactttggcagagagtatttgcaaactgattttcccagagtttgaacggctgaatgttgcacttcagagaacattggcaaagcacaaaataaaagaaagcaggaaatctttggaaagagaagactttgaaaaaacaattgcagagcaagcagttgcagcaggagttccagtggaggttatcaaagaatctcttggtgaagaggtttttaaaatatgttacgaggaagatgaaaacatccttggggtggttggaggcacccttaaagattttttaaacagcttcagtacccttctgaaacagagcagccattgccaagaagcaggaaaaaggggcaggcttgaggacgcctccattctatgcctggataaggaggatgattttctacatgtttactacttcttccctaagagaaccacctccctgattcttcccggcatcataaaggcagctgctcacgtattatatgaaacggaagtggaagtgtcgttaatgcctccctgcttccataatgattgcagcgagtttgtgaatcagccctacttgttgtactccgttcacatgaaaagcaccaagccatccctgtcccccagcaaaccccagtcctcgctggtgattcccacatcgctattctgcaagacatttccattccatttcatgtttgacaaagatatgacaattctgcaatttggcaatggcatcagaaggctgatgaacaggagagactttcaaggaaagcctaattttgaagaatactttgaaattctgactccaaaaatcaaccagacgtttagcgggatcatgactatgttgaatatgcagtttgttgtacgagtgaggagatgggacaactctgtgaagaaatcttcaagggttatggacctcaaaggccaaatgatctacattgttgaatccagtgcaatcttgtttttggggtcaccctgtgtggacagattagaagattttacaggacgagggctctacctctcagacatcccaattcacaatgcactgagggatgtggtcttaataggggaacaagcccgagctcaagatggcctgaagaagaggctggggaagctgaaggctacccttgagcaagcccaccaagccctggaggaggagaagaaaaagacagtagaccttctgtgctccatatttccctgtgaggttgctcagcagctgtggcaagggcaagttgtgcaagccaagaagttcagtaatgtcaccatgctcttctcagacatcgttgggttcactgccatctgctcccagtgctcaccgctgcaggtcatcaccatgctcaatgcactgtacactcgcttcgaccagcagtgtggagagctggatgtctacaaggtggagaccattggcgatgcctattgtgtagctgggggattacacaaagagagtgatactcatgctgttcagatagcgctgatggccctgaagatgatggagctctctgatgaagttatgtctccccatggagaacctatcaagatgcgaattggactgcactctggatcagtttttgctggcgtcgttggagttaaaatgccccgttactgtctttttggaaacaatgtcactctggctaacaaatttgagtcctgcagtgtaccacgaaaaatcaatgtcagcccaacaacttacagattactcaaagactgtcctggtttcgtgtttacccctcgatcaagggaggaacttccaccaaacttccctagtgaaatccccggaatctgccattttctggatgcttaccaacaaggaacaaactcaaaaccatgcttccaaaagaaagatgtggaagatggcaatgccaattttttaggcaaagcatcaggaatagattagcaacctatatacctatttataagtctttggggtttgactcattgaagatgtgtagagcctctgaaagcactttagggattgtagatggctaacaagcagtattaaaatttcaggagccaagtcacaatccttttcttcttggtttaaacattggaccaaaaatggcccctcacctttcaggtacttttgagg

SEQ ID NO: 60286 - DNA, 1670 bp, Homo sapiens
cccttatggcgattgggcggctgcagagaccaggactcagttcccctgccctagtctgagcctagtgggtgggactcagctcagagtcagttttccagaagcaggtttcagtgcagagttttcctacacttttcctgcgctagagcagcgagcagcctggaacagacccaggcggaggacacctgtgggggagggagcgcctggaggagcttagagaccccagccgggcgtgatctcaccatgtgcggatttgcgaggcgcgccctggagctgctagagatccggaagcacagccccgaggtgtgcgaagccaccaaacatcccagttaccagtgtccttgaattgatagtggcttctgtttgtcagtctcatataagaactacagctcatcaggaggagatcgcagcagggtaagagacaccaacaccatgttctgcacgaagctcaaggatctcaagatcacaggagagtgtcctttctccttactggcaccaggtcaagttcctaacgagtcttcagaggaggcagcaggaagctcagagagctgcaaagcaaccgtgcccatctgtcaagacattcctgagaagaacatacaagaaagtcttcctcaaagaaaaaccagtcggagccgagtctatcttcacactttggcagagagtatttgcaaactgattttcccagagtttgaacggctgaatgttgcacttcagagaacattggcaaagcacaaaataaaagaaagcaggaaatctttggaaagagaagactttgaaaaaacaattgcagagcaagcagttgcagcaggagttccagtggaggttatcaaagaatctcttggtgaagaggtttttaaaatatgttacgaggaagatgaaaacatccttggggtggttggaggcacccttaaagattttttaaacagcttcagtacccttctgaaacagagcagccattgccaagaagcaggaaaaaggggcaggcttgaggacgcctccattctatgcctggataaggaggatgattttctacatgtttactacttcttccctaagagaaccacctccctgattcttcccggcatcataaaggcagctgctcacgtattatatgaaacggaagtggaagtgtcgttaatgcctccctgcttccataatgattgcagcgagtttgtgaatcagccctacttgttgtactccgttcacatgaaaagcaccaagccatccctgtcccccagcaaaccccagtcctcgctggtgattcccacatcgctattctgcaagacatttccattccatttcatgtttgacaaagatatgacaattctgcaatttggcaatggcatcagaaggctgatgaacaggagagactttcaaggaaagcctaattttgaagaatactttgaaattctgactccaaaaatcaaccagacgtttagcgggatcatgactatgttgaatatgcagtttgttgtacgagtgaggagatgggacaactctgtgaagaaatcttcaagggtaaggaaaacataatactatcttgaatatgaaagctatttcatatttaagagcaagaaacaaaagggtaaaaatatatgcatcacttcaaatgtttgataaaacatatgtaaaacaatggtaaaagaattgtaaagctgtaataaactgaaaac

SEQ ID NO: 60287 - DNA, 2341 bp, Homo sapiens
cccttatggcgattgggcggctgcagagaccaggactcagttcccctgccctagtctgagcctagtgggtgggactcagctcagagtcagttttccagaagcaggtttcagtgcagagttttcctacacttttcctgcgctagagcagcgagcagcctggaacagacccaggcggaggacacctgtgggggagggagcgcctggaggagcttagagaccccagccgggcgtgatctcaccatgtgcggatttgcgaggcgcgccctggagctgctagagatccggaagcacagccccgaggtgtgcgaagccaccaaacatcccagttaccagtgtccttgaattgatagtggcttctgtttgtcagtctcatataagaactacagctcatcaggaggagatcgcagcagggtaagagacaccaacaccatgttctgcacgaagctcaaggatctcaagatcacaggagagtgtcctttctccttactggcaccaggtcaagttcctaacgagtcttcagaggaggcagcaggaagctcagagagctgcaaagcaaccgtgcccatctgtcaagacattcctgagaagaacatacaagaaagtcttcctcaaagaaaaaccagtcggagccgagtctatcttcacactttggcagagagtatttgcaaactgattttcccagagtttgaacggctgaatgttgcacttcagagaacattggcaaagcacaaaataaaagaaagcaggaaatctttggaaagagaagactttgaaaaaacaattgcagagcaagcagttgcagcaggagttccagtggaggttatcaaagaatctcttggtgaagaggtttttaaaatatgttacgaggaagatgaaaacatccttggggtggttggaggcacccttaaagattttttaaacagcttcagtacccttctgaaacagagcagccattgccaagaagcaggaaaaaggggcaggcttgaggacgcctccattctatgcctggataaggaggatgattttctacatgtttactacttcttccctaagagaaccacctccctgattcttcccggcatcataaaggcagctgctcacgtattatatgaaacggaagtggaagtgtcgttaatgcctccctgcttccataatgattgcagcgagtttgtgaatcagccctacttgttgtactccgttcacatgaaaagcaccaagccatccctgtcccccagcaaaccccagtcctcgctggtgattcccacatcgctattctgcaagacatttccattccatttcatgtttgacaaagatatgacaattctgcaatttggcaatggcatcagaaggctgatgaacaggagagactttcaaggaaagcctaattttgaagaatactttgaaattctgactccaaaaatcaaccagacgtttagcgggatcatgactatgttgaatatgcagtttgttgtacgagtgaggagatgggacaactctgtgaagaaatcttcaagggttatggacctcaaaggccaaatgatctacattgttgaatccagtgcaatcttgtttttggggtcaccctgtgtggacagattagaagattttacaggacgagggctctacctctcagacatcccaattcacaatgcactgagggatgtggtcttaataggggaacaagcccgagctcaagatggcctgaagaagaggctggggaagctgaaggctacccttgagcaagcccaccaagccctggaggaggagaagaaaaagacagtagaccttctgtgctccatatttccctgtgaggttgctcagcagctgtggcaagggcaagttgtgcaagccaagaagttcagtaatgtcaccatgctcttctcagacatcgttgggttcactgccatctgctcccagtgctcaccgctgcaggtcatcaccatgctcaatgcactgtacactcgcttcgaccagcagtgtggagagctggatgtctacaaggtggagaccattggcgatgcctattgtgtagctgggggattacacaaagagagtgatactcatgctgttcagatagcgctgatggccctgaagatgatggagctctctgatgaagttatgtctccccatggagaacctatcaagatgcgaattggactgcactctggatcagtttttgctggcgtcgttggagttaaaatgccccgttactgtctttttggaaacaatgtcactctggctaacaaatttgagtcctgcagtgtaccacgaaaaatcaatgtcagcccaacaacttacaggtagtaattatgttaaacacctaaaatctcttgtttttatt

SEQ ID NO: 60288 - DNA, 346 bp, Homo sapiens
tcatttcctctgctagcaactaggagagatatggacccagtcaaggccaaagataagtatggtgggagacttctggggaatttttctttgtttatagaaacagaaaaaacctgacctttagtgaaattgctgaactaatctatcaaccagatccaaagcctgtcctgcagattttggacttttggttatatgagagaataactgtctttaatgtatgagactatttgagtcaagatttctattacttgaagtggaaaacatgctgatagaaaaaaaatgtatccacactagagatggaaaaaaatcattagaatggaaatgggaaaagtgtgcttttattgaaacc

SEQ ID NO: 60289 - DNA, 201 bp, Homo sapiens
cagtaccaagtcttgggagatttatgaaatagtctgcagcatttaaatcacttatttttcttttgcaaacgtgtactgtataggtaaaattcaggtacgttaagtgtgtgtatgatgtaactgaactatatctctttccccatcaccaaacctatgtttcctcctccacttcctacttccatgaataggattcccacttgt

SEQ ID NO: 60290 - DNA, 212 bp, Homo sapiens
ataagaagcaattacagtcacacttcaggttgctgtttccatgagggaataaggtattgtatttagctgactcttccaatcaattgagggttaataaattaatgcccatacttgtcaaaatgtagcatgacaaaggagaaatctcttaaatgcttagaagatagagactttaaaactccaatctgtaatcttccatttccagatcataaagt

SEQ ID NO: 60291 - DNA, 492 bp, Homo sapiens
acccaggaacttagattgcttgtgtgtctggcatctagccatcatggattccattccaatatattggttttccagtccctcaatagctgttatatgccttcattgcaacatatgtgtgccatccagtttagtttcggaaagaaatattttctgttataccaaaattgtaggactgaatacttggaagctgcagccctttaattcacaaaacaaaatttgtgagagaaaacttctcccaagtaagattacatttagcatcatatttaaattgtttctatctgaactttttattcttggtctcctacagcttgaatgacgtttctaactttaacagctctttctactatataaaacatttatacaggatttgctgtttgtgatcttacactttgtagcagctatgtacttagatagatacataatagtactctccttgtgatgaatgtttatgtgttttttttaacttcaaaatgatttatactgggagttaaa

SEQ ID NO: 60292 - DNA, 349 bp, Homo sapiens
ctgggaaggccctgagcgtcactgctgctgggcggaagggcctgtggacagcccacccaggcggcggggtcttggtgggtccagtggtaatggtgcccctcccctccattccctgtgggtgcagcccacaggctggcgaggaggtgcctctgccctaccctcgggtctggcgagggagggggcagggtgcatccactgtgacagcccctctgggcccacaactccctgaccctggaagctgagcctgctttcctgaccctccgccccaccccctcctccccagaacactcagagggacggtcaacatcagagcacattaaacgctggtgaaaccatgtctgtgaaaaaa

SEQ ID NO: 60293 - DNA, 2474 bp, Homo sapiens
gggaatgagaaaataactttatttcattgtggggagcgggccgatgtccagcctcagaacttctggaactgcttcttggtccggcagccttggtgaccttgagcacgttgaagcgcactgtcttgctcagaggccggcactcgcccactgtgactcatcctgccccacgtggacatccagctaaagtattttgacctcgggctcccaaaccgtgaccagactgatgaccaggtcaccattgactctgcactggccacccagaagtacagtgtggctgtcaagtgtgccaccatcacccctgatgaggcccgtgtggaagagttcaagctgaagaagatgtggaaaagtcccaatggaactatccggaacatcctgggggggactgtcttccgggagcccatcatctgcaaaaacatcccacgcctagtccctggctggaccaagcccatcaccattggcaggcacgcccatggcgaccagtacaaggccacagactttgtggcagaccgggccggcactttcaaaatggtcttcaccccaaaagatggcagtggtgtcaaggagtgggaagtgtacaacttccccgcaggcggcgtgggcatgggcatgtacaacaccgacgagtccatctcaggttttgcgcacagctgcttccagtatgccatccagaagaaatggccgctgtacatgagcaccaagaacaccatactgaaagcctacgatgggcgtttcaaggacatcttccaggagatctttgacaagcactataagaccgacttcgacaagaataagatctggtatgagcaccggctcattgatgacatggtggctcaggtcctcaagtcttcgggtggctttgtgtgggcctgcaagaactatgacggagatgtgcagtcagacatcctggcccagggctttggctcccttggcctgatgacgtccgtcctggtctgccctgatgggaagacgattgaggctgaggccgctcatgggaccgtcacccgccactatcgggagcaccagaagggccggcccaccagcaccaaccccatcgccagcatctttgcctggacacgtggcctggagcaccgggggaagctggatgggaaccaagacctcatcaggtttgcccagatgctggagaaggtgtgcgtggagacggtggagagtggagccatgaccaaggacctggcgggctgcattcacggcctcagcaatgtgaagctgaacgagcacttcctgaacaccacggacttcctcgacaccatcaagagcaacctggacagagccctgggcaggcagtagggggaggcgccacccatggctgcagtggaggggccagggctgagccggcgggtcctcctgagcgcggcagagggtgagcctcacagcccctctctggaggcctttctaggggatgtttttttataagccagatgtttttaaaagcatatgtgtgtttcccctcatggtgacgtgaggcaggagcagtgcgttttacctcagccagtcagtatgttttgcatactgtaatttatattgcccttggaacacatggtgccatatttagctactaaaaagctcttcacaaaaaaaaaaaaaaaaaaaaagaaaaaaaaaaaaaaaaaaaaaaaaaaaaaaaaaaaaaagggggggggcagcgccaaaagagttctccccagggggggcgcacaactacacgcgacacccccgagtttagttgaccacgaggggggccccaatagggggggcggattattaaagacgccaggcggaggggcgagcgacatgttcaaaaaacacaagggaggagacgagggaaacaccgcgagcaccagggagagcaaacattgagggacaaacgaacccctcatttcaggggggggggggcaaccacagagaggaaacaaacacacccccgcgcagaggagatgtaaccaacccccaccgagaggggaccaaaaacaacacaagccacagcggcacgatgagaggggggcaaacaacccaacgaggcggcaatacacgcggcgccgcccgaacaaatgcggccccacgcgacacacctatagcaagaaaaaattaatgcagcaggggcgacgcgcgcaaaccacaaggaacaaagagacgaggaacacaaaaaaaagcaggagacaaggaaaacagaaaaaaagcaaggcagagcgaaaacaacaaagagaaacagaaagaaaaaaaaaaaacagaacgagaaaagggggaaggagagaaggggaagggagaagagggcagggaacgaagagagccgcgagcgaacacaaagaaaagaagaggagagcaggggaagaggaaaagaagcaggggagaggggggggggggagggaaggtggaagggacgacgacagggggagagagcagaggcaggggggaggggaggagacaagagagggcaacgcggaggaggagagaagacagggcagggaacaagaggggaa

SEQ ID NO: 60294 - DNA, 310 bp, Homo sapiens
tactactactaaattcgcggccgcgtcgaaaagaaaagaaatggccacgagcagctccaggcgtactcctgcctgcttggctaccctatcagaagagaatgcctctttatccccagttccagctccaatgccaggctgagtcacatgaccacctctgagccaatcacagaggccctggggagaaaggcttctgattggataagccagggacacactgtcaaccccagcgctaggcctgggaattagccctgccccagccacatgtagtctaaggcggtgctttccaaaaaaaagttgtttccaaaaaaaa

SEQ ID NO: 60295 - DNA, 349 bp, Homo sapiens
agaaatggccgctgtacatgagcaccaagaacaccatactgaaagcctacgatgggcgtttcaaggacatcttccaggagatctttgacaagcaccattggcaggcacgcccatggagcccagtacaaggccacagactttgtggcagaccgggccggcactttcaaaatggtcttcaccccaaaagatggcagtggtgtcaaggagtgggaagtgtacaacttccccgcaggcggcgtgggcatgggcatgtacaacaccgacgagtcatctcaggtttgcgcacagtgcttcagtatgcatcagaggaatggccgcaccatgctgcagtgagggcaggctacggcgg

SEQ ID NO: 60296 - DNA, 1769 bp, Homo sapiens
tagcagctggtactggtctgagatgttatggatggcccagcgttagcccgcggccaggcagccgggaggagcggcgcgcgctcggacctctcccgccctgctcgttcgctctccagcttgggatggccggctacctgcgggtcgtgcgctcgctctgcagagcctcaggctcgcggccggcctgggcgccggcggccctgacagcccccacctcgcaagagcagccgcggcgccactatgccgacaaaaggatcaaggtggcgaagcccgtggtggagatggatggtgatgagatgacccgtattatctggcagttcatcaaggagaagctcatcctgccccacgtggacatccagctaaagtattttgacctcgggctcccaaaccgtgaccagactgatgaccaggtcaccattgactctgcactggccacccagaagtacagtgtggctgtcaagtgtgccaccatcacccctgatgaggcccgtgtggaagagttcaagctgaagaagatgtggaaaagtcccaatggaactatccggaacatcctgggggggactgtcttccgggagcccatcatctgcaaaaacatcccacgcctagtccctggctggaccaagcccatcaccattggcaggcacgcccatggcgaccagtacaaggccacagactttgtggcagaccgggccggcactttcaaaatggtcttcaccccaaaagatggcagtggtgtcaaggagtgggaagtgtacaacttccccgcaggcggcgtgggcatgggcatgtacaacaccgacgagtccatctcaggttttgcgcacagctgcttccagtatgccatccagaagaaatggccgctgtacatgagcaccaagaacaccatactgaaagcctacgatgggcgtttcaaggacatcttccaggagatctttgacaagcactataagaccgacttcgacaagaataagatctggtatgagcaccggctcattgatgacatggtggctcaggtcctcaagtcttcgggtggctttgtgtgggcctgcaagaactatgacggagatgtgcagtcagacatcctggcccagggctttggctcccttggcctgatgacgtccgtcctggtctgccctgatgggaagacgattgaggctgaggccgctcatgggaccgtcacccgccactatcgggagcaccagaagggccggcccaccagcaccaaccccatcgccagcatctttgcctggacacgtggcctggagcaccgggggaagctggatgggaaccaagacctcatcaggtttgcccagatgctggagaaggtgtgcgtggagacggtggagagtggagccatgaccaaggacctggcgggctgcattcacggcctcagcaatgtgaagctgaacgagcacttcctgaacaccacggacttcctcgacaccatcaagagcaacctggacagagccctgggcaggcagtagggggaggcgccacccatggctgcagtggaggggccagggctgagccggcgggtcctcctgagcgcggcagagggtgagcctcacagcccctctctggaggcctttctaggggatgtttttttataagccagatgtttttaaaagcatatgtgtgtttcccctcatggtgacgtgaggcaggagcagtgcgttttacctcagccagtcagtatgttttgcatactgtaatttatattgcccttggaacacatggtgccatatttagctactaaaaagctcttcacaaaa

SEQ ID NO: 60297 - DNA, 1760 bp, Homo sapiens
  misc_feature (2)..(2): n is a, c, g, or t
gncttaacctaccgaattcccgggagcccagcgttagcccgcggccaggcagccgggaggagcggcgcgcgctcggacctctcccgccctgctcgttcgctctccagcttgggatggccggctacctgcgggtcgtgcgctcgctctgcagagcctcaggctcgcggccggcctgggcgccggcggccctgacagcccccacctcgcaagagcagccgcggcgccactatgccgacaaaaggatcaaggtggcgaagcccgtggtggagatggatggtgatgagatgacccgtattatctggcagttcatcaaggagaagctcatcctgccccacgtggacatccagctaaagtattttgacctcgggctcccaaaccgtgaccagactgatgaccaggtcaccattgactctgcactggccacccagaagtacagtgtggctgtcaagtgtgccaccatcacccctgatgaggcccgtgtggaagagttcaagctgaagaagatgtggaaaagtcccaatggaactatccggaacatcctgggggggactgtcttccgggagcccatcatctgcaaaaacatcccacgcctagtccctggctggaccaagcccatcaccattggcaggcacgcccatggcgaccagtacaaggccacagactttgtggcagaccgggccggcactttcaaaatggtcttcaccccaaaagatggcagtggtgtcaaggagtgggaagtgtacaacttccccgcaggcggcgtgggcatgggcatgtacaacaccgacgagtccatctcaggttttgcgcacagctgcttccagtatgccatccagaagaaatggccgctgtacatgagcaccaagaacaccatactgaaagcctacgatgggcgtttcaaggacatcttccaggagatctttgacaagcactataagaccgacttcgacaagaataagatctggtatgagcaccggctcattgatgacatggtggctcaggtcctcaagtcttcgggtggctttgtgtgggcctgcaagaactatgacggagatgtgcagtcagacatcctggcccagggctttggctcccttggcctgatgacgtccgtcctggtctgccctgatgggaagacgattgaggctgaggccgctcatgggaccgtcacccgccactatcgggagcaccagaagggccggcccaccagcaccaaccccatcgccagcatctttgcctggacacgtggcctggagcaccgggggaagctggatgggaaccaagacctcatcaggtttgcccagatgctggagaaggtgtgcgtggagacggtggagagtggagccatgaccaaggacctggcgggctgcattcacggcctcagcaatgtgaagctgaacgagcacttcctgaacaccacggacttcctcgacaccatcaagagcaacctggacagagccctgggcaggcagtagggggaggcgccacccatggctgcagtggaggggccagggctgagccggcgggtcctcctgagcgcggcagagggtgagcctcacagcccctctctggaggcctttctaggggatgtttttttataagccagatgtttttaaaagcatatgtgtgtttcccctcatggtgacgtgaggcaggagcagtgcgttttacctcagccagtcagtatgttttgcatactgtaatttatattgcccttggaacacatggtgccatatttagctactaaaaagctcttcacaaaa

SEQ ID NO: 60298 - DNA, 1763 bp, Homo sapiens
cttaggctaggtacgatgcctgggtttagcccagcgttagcccgcggccaggcagccgggaggagcggcgcgcgctcggacctctcccgccctgctcgttcgctctccagcttgggatggccggctacctgcgggtcgtgcgctcgctctgcagagcctcaggctcgcggccggcctgggcgccggcggccctgacagcccccacctcgcaagagcagccgcggcgccactatgccgacaaaaggatcaaggtggcgaagcccgtggtggagatggatggtgatgagatgacccgtattatctggcagttcatcaaggagaagctcatcctgccccacgtggacatccagctaaagtattttgacctcgggctcccaaaccgtgaccagactgatgaccaggtcaccattgactctgcactggccacccagaagtacagtgtggctgtcaagtgtgccaccatcacccctgatgaggcccgtgtggaagagttcaagctgaagaagatgtggaaaagtcccaatggaactatccggaacatcctgggggggactgtcttccgggagcccatcatctgcaaaaacatcccacgcctagtccctggctggaccaagcccatcaccattggcaggcacgcccatggcgaccagtacaaggccacagactttgtggcagaccgggccggcactttcaaaatggtcttcaccccaaaagatggcagtggtgtcaaggagtgggaagtgtacaacttccccgcaggcggcgtgggcatgggcatgtacaacaccgacgagtccatctcaggttttgcgcacagctgcttccagtatgccatccagaagaaatggccgctgtacatgagcaccaagaacaccatactgaaagcctacgatgggcgtttcaaggacatcttccaggagatctttgacaagcactataagaccgacttcgacaagaataagatctggtatgagcaccggctcattgatgacatggtggctcaggtcctcaagtcttcgggtggctttgtgtgggcctgcaagaactatgacggagatgtgcagtcagacatcctggcccagggctttggctcccttggcctgatgacgtccgtcctggtctgccctgatgggaagacgattgaggctgaggccgctcatgggaccgtcacccgccactatcgggagcaccagaagggccggcccaccagcaccaaccccatcgccagcatctttgcctggacacgtggcctggagcaccgggggaagctggatgggaaccaagacctcatcaggtttgcccagatgctggagaaggtgtgcgtggagacggtggagagtggagccatgaccaaggacctggcgggctgcattcacggcctcagcaatgtgaagctgaacgagcacttcctgaacaccacggacttcctcgacaccatcaagagcaacctggacagagccctgggcaggcagtagggggaggcgccacccatggctgcagtggaggggccagggctgagccggcgggtcctcctgagcgcggcagagggtgagcctcacagcccctctctggaggcctttctaggggatgtttttttataagccagatgtttttaaaagcatatgtgtgtttcccctcatggtgacgtgaggcaggagcagtgcgttttacctcagccagtcagtatgttttgcatactgtaatttatattgcccttggaacacatggtgccatatttagctactaaaaagctcttcacaaaa

SEQ ID NO: 60299 - DNA, 1769 bp, Homo sapiens
tgcccgcgcggccagcgcccgccaggcccagcgtgcccagcgttagcccgcggccaggcagccgggaggagcggcgcgcgctcggacctctcccgccctgctcgttcgctctccagcttgggatggccggctacctgcgggtcgtgcgctcgctctgcagagcctcaggctcgcggccggcctgggcgccggcggccctgacagcccccacctcgcaagagcagccgcggcgccactatgccgacaaaaggatcaaggtggcgaagcccgtggtggagatggatggtgatgagatgacccgtattatctggcagttcatcaaggagaagctcatcctgccccacgtggacatccagctaaagtattttgacctcgggctcccaaaccgtgaccagactgatgaccaggtcaccattgactctgcactggccacccagaagtacagtgtggctgtcaagtgtgccaccatcacccctgatgaggcccgtgtggaagagttcaagctgaagaagatgtggaaaagtcccaatggaactatccggaacatcctgggggggactgtcttccgggagcccatcatctgcaaaaacatcccacgcctagtccctggctggaccaagcccatcaccattggcaggcacgcccatggcgaccagtacaaggccacagactttgtggcagaccgggccggcactttcaaaatggtcttcaccccaaaagatggcagtggtgtcaaggagtgggaagtgtacaacttccccgcaggcggcgtgggcatgggcatgtacaacaccgacgagtccatctcaggttttgcgcacagctgcttccagtatgccatccagaagaaatggccgctgtacatgagcaccaagaacaccatactgaaagcctacgatgggcgtttcaaggacatcttccaggagatctttgacaagcactataagaccgacttcgacaagaataagatctggtatgagcaccggctcattgatgacatggtggctcaggtcctcaagtcttcgggtggctttgtgtgggcctgcaagaactatgacggagatgtgcagtcagacatcctggcccagggctttggctcccttggcctgatgacgtccgtcctggtctgccctgatgggaagacgattgaggctgaggccgctcatgggaccgtcacccgccactatcgggagcaccagaagggccggcccaccagcaccaaccccatcgccagcatctttgcctggacacgtggcctggagcaccgggggaagctggatgggaaccaagacctcatcaggtttgcccagatgctggagaaggtgtgcgtggagacggtggagagtggagccatgaccaaggacctggcgggctgcattcacggcctcagcaatgtgaagctgaacgagcacttcctgaacaccacggacttcctcgacaccatcaagagcaacctggacagagccctgggcaggcagtagggggaggcgccacccatggctgcagtggaggggccagggctgagccggcgggtcctcctgagcgcggcagagggtgagcctcacagcccctctctggaggcctttctaggggatgtttttttataagccagatgtttttaaaagcatatgtgtgtttcccctcatggtgacgtgaggcaggagcagtgcgttttacctcagccagtcagtatgttttgcatactgtaatttatattgcccttggaacacatggtgccatatttagctactaaaaagctcttcacaaaa

SEQ ID NO: 60300 - DNA, 2615 bp, Homo sapiens
tagcagctggtactggtctgagatgttatggatggcccagcgttagcccgcggccaggcagccgggaggagcggcgcgcgctcggacctctcccgccctgctcgttcgctctccagcttgggatggccggctacctgcgggtcgtgcgctcgctctgcagagcctcaggctcgcggccggcctgggcgccggcggccctgacagcccccacctcgcaagagcagccgcggcgccactatgccgacaaaaggatcaaggtggcgaagcccgtggtggagatggatggtgatgagatgacccgtattatctggcagttcatcaaggagaagctcatcctgccccacgtggacatccagctaaagtattttgacctcgggctcccaaaccgtgaccagactgatgaccaggtcaccattgactctgcactggccacccagaagtacagtgtggctgtcaagtgtgccaccatcacccctgatgaggcccgtgtggaagagttcaagctgaagaagatgtggaaaagtcccaatggaactatccggaacatcctgggggggactgtcttccgggagcccatcatctgcaaaaacatcccacgcctagtccctggctggaccaagcccatcaccattggcaggcacgcccatggcgaccagtacaaggccacagactttgtggcagaccgggccggcactttcaaaatggtcttcaccccaaaagatggcagtggtgtcaaggagtgggaagtgtacaacttccccgcaggcggcgtgggcatgggcatgtacaacaccgacgagtccatctcaggttttgcgcacagctgcttccagtatgccatccagaagaaatggccgctgtacatgagcaccaagaacaccatactgaaagcctacgatgggcgtttcaaggacatcttccaggagatctttgacaagcactataagaccgacttcgacaagaataagatctggtatgagcaccggctcattgatgacatggtggctcaggtcctcaagtcttcgggtggctttgtgtgggcctgcaagaactatgacggagatgtgcagtcagacatcctggcccagggctttggctcccttggcctgatgacgtccgtcctggtctgccctgatgggaagacgattgaggctgaggccgctcatgggaccgtcacccgccactatcgggagcaccagaagggccggcccaccagcaccaaccccatcgccagcatctttgcctggacacgtggcctggagcaccgggggaagctggatgggaaccaagacctcatcaggtttgcccagatgctggagaaggtgtgcgtggagacggtggagagtggagccatgaccaaggacctggcgggctgcattcacggcctcagcaatgtgaagctgaacgagcacttcctgaacaccacggacttcctcgacaccatcaagagcaacctggacagagccctgggcaggcagtagggggaggcgccacccatggctgcagtggaggggccagggctgagccggcgggtcctcctgagcgcggcagagggtgagcctcacagcccctctctggaggcctttctaggggatgtttttttataagccagatgtttttaaaagcatatgtgtgtttcccctcatggtgacgtgaggcaggagcagtgcgttttacctcagccagtcagtatgttttgcatactgtaatttatattgcccttggaacacatggtgccatatttagctactaaaaagctcttcacaaaattgtctgctgtgtttgtccctgaggggaggaggtagtgggaccctgaggcagaggccctgctagagctggcaggttcccctggggcagaccagagcacctcaggaaggggctgccacggcagggaagggaccaggcagccctgggagcccgcattccacaggggcccactgcggagttctcggacactcagggcacaggcctgtgggttccctggaattttctagcatgatccagtttctgtgtccagttctccattctgagagtcaatcagttcctgataggttgtcattgatttttttcttcgttggttttaaccttctaaacatctccaggccactttcttagcctttttctaggtactaaaaagaggtcctacccacacctgcctcacacttctcctttccaaggctgcctgagtttggaggggcttgggtgtgtgtgaacaagggccctgcattgtctaggcctgcagttcccaggcttgggttcactttcaccatgcattggcaaaactagaaaagtaagcttgtgacaaattgttctcggccgggcacagtggcgcacgcctataatccctgtactttgggaggctgaggtgggtggatcacttgaggccaggagttcgagaccagcctggccaacatggtgaaaccccatctctactcaaaatacaaaaattagccaggcgtggtgatgcgcacctgcagtcccagctactcgggaggctgaggcaggaaaatggcttgaacctgggaggcagaggttgcagtgagccgagactgcaccactgcactccagcctgggtgacagagcaagactctgtctcaaaaaaaaaaaaaaaaaaa

SEQ ID NO: 60301 - DNA, 2375 bp, Homo sapiens
  misc_feature (2370)..(2370): n is a, c, g, or t
tagcagctggtactggtctgagatgttatggatggcccagcgttagcccgcggccaggcagccgggaggagcggcgcgcgctcggacctctcccgccctgctcgttcgctctccagcttgggatggccggctacctgcgggtcgtgcgctcgctctgcagagcctcaggctcgcggccggcctgggcgccggcggccctgacagcccccacctcgcaagagcagccgcggcgccactatgccgacaaaaggatcaaggtggcgaagcccgtggtggagatggatggtgatgagatgacccgtattatctggcagttcatcaaggagaagctcatcctgccccacgtggacatccagctaaagtattttgacctcgggctcccaaaccgtgaccagactgatgaccaggtcaccattgactctgcactggccacccagaagtacagtgtggctgtcaagtgtgccaccatcacccctgatgaggcccgtgtggaagagttcaagctgaagaagatgtggaaaagtcccaatggaactatccggaacatcctgggggggactgtcttccgggagcccatcatctgcaaaaacatcccacgcctagtccctggctggaccaagcccatcaccattggcaggcacgcccatggcgaccagtacaaggccacagactttgtggcagaccgggccggcactttcaaaatggtcttcaccccaaaagatggcagtggtgtcaaggagtgggaagtgtacaacttccccgcaggcggcgtgggcatgggcatgtacaacaccgacgagtccatctcaggttttgcgcacagctgcttccagtatgccatccagaagaaatggccgctgtacatgagcaccaagaacaccatactgaaagcctacgatgggcgtttcaaggacatcttccaggagatctttgacaagcactataagaccgacttcgacaagaataagatctggtatgagcaccggctcattgatgacatggtggctcaggtcctcaagtcttcgggtggctttgtgtgggcctgcaagaactatgacggagatgtgcagtcagacatcctggcccagggctttggctcccttggcctgatgacgtccgtcctggtctgccctgatgggaagacgattgaggctgaggccgctcatgggaccgtcacccgccactatcgggagcaccagaagggccggcccaccagcaccaaccccatcgccagcatctttgcctggacacgtggcctggagcaccgggggaagctggatgggaaccaagacctcatcaggtttgcccagatgctggagaaggtgtgcgtggagacggtggagagtggagccatgaccaaggacctggcgggctgcattcacggcctcagcaatgtgaagctgaacgagcacttcctgaacaccacggacttcctcgacaccatcaagagcaacctggacagagccctgggcaggcagtagggggaggcgccacccatggctgcagtggaggggccagggctgagccggcgggtcctcctgagcgcggcagagggtgagcctcacagcccctctctggaggcctttctaggggatgtttttttataagccagatgtttttaaaagcatatgtgtgtttcccctcatggtgacgtgaggcaggagcagtgcgttttacctcagccagtcagtatgttttgcatactgtaatttatattgcccttggaacacatggtgccatatttagctactaaaaagctcttcacaaaattgtctgctgtgtttgtccctgaggggaggaggtagtgggaccctgaggcagaggccctgctagagctggcaggttcccctggggcagaccagagcacctcaggaaggggctgccacggcagggaagggaccaggcagccctgggagcccgcattccacaggggcccactgcggagttctcggacactcagggcacaggcctgtgggttccctggaattttctagcatgatccagtttctgtgtccagttctccattctgagagtcaatcagttcctgataggttgtcattgatttttttcttcgttggttttaaccttctaaacatctccaggccactttcttagcctttttctaggtactaaaaagaggtcctacccacacctgcctcacacttctcctttccaaggctgcctgagtttggaggggcttgggtgtgtgtgaacaagggccctgcattgtctaggcctgcagttcccaggcttgggttcactttcaccatgcattggcaaaactagaaaagtaagcttgtgacaaattgttctcggcctcccaaagtgctgggattacaggtgggagccacaacacccggccatgaattnatccg

SEQ ID NO: 60302 - DNA, 2650 bp, Homo sapiens
tagcagctggtactggtctgagatgttatggatggcccagcgttagcccgcggccaggcagccgggaggagcggcgcgcgctcggacctctcccgccctgctcgttcgctctccagcttgggatggccggctacctgcgggtcgtgcgctcgctctgcagagcctcaggctcgcggccggcctgggcgccggcggccctgacagcccccacctcgcaagagcagccgcggcgccactatgccgacaaaaggatcaaggtggcgaagcccgtggtggagatggatggtgatgagatgacccgtattatctggcagttcatcaaggagaagctcatcctgccccacgtggacatccagctaaagtattttgacctcgggctcccaaaccgtgaccagactgatgaccaggtcaccattgactctgcactggccacccagaagtacagtgtggctgtcaagtgtgccaccatcacccctgatgaggcccgtgtggaagagttcaagctgaagaagatgtggaaaagtcccaatggaactatccggaacatcctgggggggactgtcttccgggagcccatcatctgcaaaaacatcccacgcctagtccctggctggaccaagcccatcaccattggcaggcacgcccatggcgaccagtacaaggccacagactttgtggcagaccgggccggcactttcaaaatggtcttcaccccaaaagatggcagtggtgtcaaggagtgggaagtgtacaacttccccgcaggcggcgtgggcatgggcatgtacaacaccgacgagtccatctcaggttttgcgcacagctgcttccagtatgccatccagaagaaatggccgctgtacatgagcaccaagaacaccatactgaaagcctacgatgggcgtttcaaggacatcttccaggagatctttgacaagcactataagaccgacttcgacaagaataagatctggtatgagcaccggctcattgatgacatggtggctcaggtcctcaagtcttcgggtggctttgtgtgggcctgcaagaactatgacggagatgtgcagtcagacatcctggcccagggctttggctcccttggcctgatgacgtccgtcctggtctgccctgatgggaagacgattgaggctgaggccgctcatgggaccgtcacccgccactatcgggagcaccagaagggccggcccaccagcaccaaccccatcgccagcatctttgcctggacacgtggcctggagcaccgggggaagctggatgggaaccaagacctcatcaggtttgcccagatgctggagaaggtgtgcgtggagacggtggagagtggagccatgaccaaggacctggcgggctgcattcacggcctcagcaatgtgaagctgaacgagcacttcctgaacaccacggacttcctcgacaccatcaagagcaacctggacagagccctgggcaggcagtagggggaggcgccacccatggctgcagtggaggggccagggctgagccggcgggtcctcctgagcgcggcagagggtgagcctcacagcccctctctggaggcctttctaggggatgtttttttataagccagatgtttttaaaagcatatgtgtgtttcccctcatggtgacgtgaggcaggagcagtgcgttttacctcagccagtcagtatgttttgcatactgtaatttatattgcccttggaacacatggtgccatatttagctactaaaaagctcttcacaaaaaaaaaaaaaaaaaaaaagaaaaaaaaaaaaaaaaaaaaaaaaaaaaaaaaaaaaaagggggggggcagcgccaaaagagttctccccagggggggcgcacaactacacgcgacacccccgagtttagttgaccacgaggggggccccaatagggggggcggattattaaagacgccaggcggaggggcgagcgacatgttcaaaaaacacaagggaggagacgagggaaacaccgcgagcaccagggagagcaaacattgagggacaaacgaacccctcatttcaggggggggggggcaaccacagagaggaaacaaacacacccccgcgcagaggagatgtaaccaacccccaccgagaggggaccaaaaacaacacaagccacagcggcacgatgagaggggggcaaacaacccaacgaggcggcaatacacgcggcgccgcccgaacaaatgcggccccacgcgacacacctatagcaagaaaaaattaatgcagcaggggcgacgcgcgcaaaccacaaggaacaaagagacgaggaacacaaaaaaaagcaggagacaaggaaaacagaaaaaaagcaaggcagagcgaaaacaacaaagagaaacagaaagaaaaaaaaaaaacagaacgagaaaagggggaaggagagaaggggaagggagaagagggcagggaacgaagagagccgcgagcgaacacaaagaaaagaagaggagagcaggggaagaggaaaagaagcaggggagaggggggggggggagggaaggtggaagggacgacgacagggggagagagcagaggcaggggggaggggaggagacaagagagggcaacgcggaggaggagagaagacagggcagggaacaagaggggaa

SEQ ID NO: 60303 - DNA, 1777 bp, Homo sapiens
  misc_feature (1731)..(1731): n is a, c, g, or t
  misc_feature (1755)..(1755): n is a, c, g, or t
tagcagctggtactggtctgagatgttatggatggcccagcgttagcccgcggccaggcagccgggaggagcggcgcgcgctcggacctctcccgccctgctcgttcgctctccagcttgggatggccggctacctgcgggtcgtgcgctcgctctgcagagcctcaggctcgcggccggcctgggcgccggcggccctgacagcccccacctcgcaagagcagccgcggcgccactatgccgacaaaaggatcaaggtggcgaagcccgtggtggagatggatggtgatgagatgacccgtattatctggcagttcatcaaggagaagctcatcctgccccacgtggacatccagctaaagtattttgacctcgggctcccaaaccgtgaccagactgatgaccaggtcaccattgactctgcactggccacccagaagtacagtgtggctgtcaagtgtgccaccatcacccctgatgaggcccgtgtggaagagttcaagctgaagaagatgtggaaaagtcccaatggaactatccggaacatcctgggggggactgtcttccgggagcccatcatctgcaaaaacatcccacgcctagtccctggctggaccaagcccatcaccattggcaggcacgcccatggcgaccagtacaaggccacagactttgtggcagaccgggccggcactttcaaaatggtcttcaccccaaaagatggcagtggtgtcaaggagtgggaagtgtacaacttccccgcaggcggcgtgggcatgggcatgtacaacaccgacgagtccatctcaggttttgcgcacagctgcttccagtatgccatccagaagaaatggccgctgtacatgagcaccaagaacaccatactgaaagcctacgatgggcgtttcaaggacatcttccaggagatctttgacaagcactataagaccgacttcgacaagaataagatctggtatgagcaccggctcattgatgacatggtggctcaggtcctcaagtcttcgggtggctttgtgtgggcctgcaagaactatgacggagatgtgcagtcagacatcctggcccagggctttggctcccttggcctgatgacgtccgtcctggtctgccctgatgggaagacgattgaggctgaggccgctcatgggaccgtcacccgccactatcgggagcaccagaagggccggcccaccagcaccaaccccatcgccagcatctttgcctggacacgtggcctggagcaccgggggaagctggatgggaaccaagacctcatcaggtttgcccagatgctggagaaggtgtgcgtggagacggtggagagtggagccatgaccaaggacctggcgggctgcattcacggcctcagcaatgtgaagctgaacgagcacttcctgaacaccacggacttcctcgacaccatcaagagcaacctggacagagccctgggcaggcagtagggggaggcgccacccatggctgcagtggaggggccagggctgagccggcgggtcctcctgagcgcggcagagggtgagcctcacagcccctctctggaggcctttctaggggatgtttttttataagccagatgtttttaaaagcatatgtgtgtttcccctcatggtgacgtgaggcaggagcagtgcgttttacctcagccagtcagtatgttttgcatactgtaatttatatgcacccgttggaaanctacacaatccggtgcgggattanttttacgcttatcctaaacgtt

SEQ ID NO: 60304 - DNA, 1944 bp, Homo sapiens
tagcagctggtactggtctgagatgttatggatggcccagcgttagcccgcggccaggcagccgggaggagcggcgcgcgctcggacctctcccgccctgctcgttcgctctccagcttgggatggccggctacctgcgggtcgtgcgctcgctctgcagagcctcaggctcgcggccggcctgggcgccggcggccctgacagcccccacctcgcaagagcagccgcggcgccactatgccgacaaaaggatcaaggtggcgaagcccgtggtggagatggatggtgatgagatgacccgtattatctggcagttcatcaaggagaagctcatcctgccccacgtggacatccagctaaagtattttgacctcgggctcccaaaccgtgaccagactgatgaccaggtcaccattgactctgcactggccacccagaagtacagtgtggctgtcaagtgtgccaccatcacccctgatgaggcccgtgtggaagagttcaagctgaagaagatgtggaaaagtcccaatggaactatccggaacatcctgggggggactgtcttccgggagcccatcatctgcaaaaacatcccacgcctagtccctggctggaccaagcccatcaccattggcaggcacgcccatggcgaccagtacaaggccacagactttgtggcagaccgggccggcactttcaaaatggtcttcaccccaaaagatggcagtggtgtcaaggagtgggaagtgtacaacttccccgcaggcggcgtgggcatgggcatgtacaacaccgacgagtccatctcaggttttgcgcacagctgcttccagtatgccatccagaagaaatggccgctgtacatgagcaccaagaacaccatactgaaagcctacgatgggcgtttcaaggacatcttccaggagatctttgacaagtaaagcctcatccatgtactctgtggcctttcttcccttccccccatgctgttcccatcctaccctgggaaggtcgctattagagtgcatttggctcagctccgaggctcagggagggatccccaacctgtcagccttctgccctctccccataacagacctttttactcccaggcactataagaccgacttcgacaagaataagatctggtatgagcaccggctcattgatgacatggtggctcaggtcctcaagtcttcgggtggctttgtgtgggcctgcaagaactatgacggagatgtgcagtcagacatcctggcccagggctttggctcccttggcctgatgacgtccgtcctggtctgccctgatgggaagacgattgaggctgaggccgctcatgggaccgtcacccgccactatcgggagcaccagaagggccggcccaccagcaccaaccccatcgccagcatctttgcctggacacgtggcctggagcaccgggggaagctggatgggaaccaagacctcatcaggtttgcccagatgctggagaaggtgtgcgtggagacggtggagagtggagccatgaccaaggacctggcgggctgcattcacggcctcagcaatgtgaagctgaacgagcacttcctgaacaccacggacttcctcgacaccatcaagagcaacctggacagagccctgggcaggcagtagggggaggcgccacccatggctgcagtggaggggccagggctgagccggcgggtcctcctgagcgcggcagagggtgagcctcacagcccctctctggaggcctttctaggggatgtttttttataagccagatgtttttaaaagcatatgtgtgtttcccctcatggtgacgtgaggcaggagcagtgcgttttacctcagccagtcagtatgttttgcatactgtaatttatattgcccttggaacacatggtgccatatttagctactaaaaagctcttcacaaaa

SEQ ID NO: 60305 - DNA, 1732 bp, Homo sapiens
agctacttgggaggctgaggtcagaggatcacttgaagccaggaagtcaatgctgcagtaagctatgatggcatcagtgcattccagcctgaccaatggaacaggaccctgccaagaaagagagagagaaagggaggaaggaacgaaaggaaggaaggaaggaaagaaaggaaaggaaggaaagaaaggaaaggaagtaaatgccgacaaaaggatcaaggtggcgaagcccgtggtggagatggatggtgatgagatgacccgtattatctggcagttcatcaaggagaagctcatcctgccccacgtggacatccagctaaagtattttgacctcgggctcccaaaccgtgaccagactgatgaccaggtcaccattgactctgcactggccacccagaagtacagtgtggctgtcaagtgtgccaccatcacccctgatgaggcccgtgtggaagagttcaagctgaagaagatgtggaaaagtcccaatggaactatccggaacatcctgggggggactgtcttccgggagcccatcatctgcaaaaacatcccacgcctagtccctggctggaccaagcccatcaccattggcaggcacgcccatggcgaccagtacaaggccacagactttgtggcagaccgggccggcactttcaaaatggtcttcaccccaaaagatggcagtggtgtcaaggagtgggaagtgtacaacttccccgcaggcggcgtgggcatgggcatgtacaacaccgacgagtccatctcaggttttgcgcacagctgcttccagtatgccatccagaagaaatggccgctgtacatgagcaccaagaacaccatactgaaagcctacgatgggcgtttcaaggacatcttccaggagatctttgacaagcactataagaccgacttcgacaagaataagatctggtatgagcaccggctcattgatgacatggtggctcaggtcctcaagtcttcgggtggctttgtgtgggcctgcaagaactatgacggagatgtgcagtcagacatcctggcccagggctttggctcccttggcctgatgacgtccgtcctggtctgccctgatgggaagacgattgaggctgaggccgctcatgggaccgtcacccgccactatcgggagcaccagaagggccggcccaccagcaccaaccccatcgccagcatctttgcctggacacgtggcctggagcaccgggggaagctggatgggaaccaagacctcatcaggtttgcccagatgctggagaaggtgtgcgtggagacggtggagagtggagccatgaccaaggacctggcgggctgcattcacggcctcagcaatgtgaagctgaacgagcacttcctgaacaccacggacttcctcgacaccatcaagagcaacctggacagagccctgggcaggcagtagggggaggcgccacccatggctgcagtggaggggccagggctgagccggcgggtcctcctgagcgcggcagagggtgagcctcacagcccctctctggaggcctttctaggggatgtttttttataagccagatgtttttaaaagcatatgtgtgtttcccctcatggtgacgtgaggcaggagcagtgcgttttacctcagccagtcagtatgttttgcatactgtaatttatattgcccttggaacacatggtgccatatttagctactaaaaagctcttcacaaaa

SEQ ID NO: 60306 - DNA, 1511 bp, Homo sapiens
tagcagctggtactggtctgagatgttatggatggcccagcgttagcccgcggccaggcagccgggaggagcggcgcgcgctcggacctctcccgccctgctcgttcgctctccagcttgggatggccggctacctgcgggtcgtgcgctcgctctgcagagcctcaggctcgcggccggcctgggcgccggcggccctgacagcccccacctcgcaagagcagccgcggcgccactagttcaagctgaagaagatgtggaaaagtcccaatggaactatccggaacatcctgggggggactgtcttccgggagcccatcatctgcaaaaacatcccacgcctagtccctggctggaccaagcccatcaccattggcaggcacgcccatggcgaccagtacaaggccacagactttgtggcagaccgggccggcactttcaaaatggtcttcaccccaaaagatggcagtggtgtcaaggagtgggaagtgtacaacttccccgcaggcggcgtgggcatgggcatgtacaacaccgacgagtccatctcaggttttgcgcacagctgcttccagtatgccatccagaagaaatggccgctgtacatgagcaccaagaacaccatactgaaagcctacgatgggcgtttcaaggacatcttccaggagatctttgacaagcactataagaccgacttcgacaagaataagatctggtatgagcaccggctcattgatgacatggtggctcaggtcctcaagtcttcgggtggctttgtgtgggcctgcaagaactatgacggagatgtgcagtcagacatcctggcccagggctttggctcccttggcctgatgacgtccgtcctggtctgccctgatgggaagacgattgaggctgaggccgctcatgggaccgtcacccgccactatcgggagcaccagaagggccggcccaccagcaccaaccccatcgccagcatctttgcctggacacgtggcctggagcaccgggggaagctggatgggaaccaagacctcatcaggtttgcccagatgctggagaaggtgtgcgtggagacggtggagagtggagccatgaccaaggacctggcgggctgcattcacggcctcagcaatgtgaagctgaacgagcacttcctgaacaccacggacttcctcgacaccatcaagagcaacctggacagagccctgggcaggcagtagggggaggcgccacccatggctgcagtggaggggccagggctgagccggcgggtcctcctgagcgcggcagagggtgagcctcacagcccctctctggaggcctttctaggggatgtttttttataagccagatgtttttaaaagcatatgtgtgtttcccctcatggtgacgtgaggcaggagcagtgcgttttacctcagccagtcagtatgttttgcatactgtaatttatattgcccttggaacacatggtgccatatttagctactaaaaagctcttcacaaaa

SEQ ID NO: 60307 - DNA, 1225 bp, Homo sapiens
atacgggctagtgagcctgggtcatttcggacgaggctgcaaaaacatcccacgcctagtccctggctggaccaagcccatcaccattggcaggcacgcccatggcgaccagtacaaggccacagactttgtggcagaccgggccggcactttcaaaatggtcttcaccccaaaagatggcagtggtgtcaaggagtgggaagtgtacaacttccccgcaggcggcgtgggcatgggcatgtacaacaccgacgagtccatctcaggttttgcgcacagctgcttccagtatgccatccagaagaaatggccgctgtacatgagcaccaagaacaccatactgaaagcctacgatgggcgtttcaaggacatcttccaggagatctttgacaagcactataagaccgacttcgacaagaataagatctggtatgagcaccggctcattgatgacatggtggctcaggtcctcaagtcttcgggtggctttgtgtgggcctgcaagaactatgacggagatgtgcagtcagacatcctggcccagggctttggctcccttggcctgatgacgtccgtcctggtctgccctgatgggaagacgattgaggctgaggccgctcatgggaccgtcacccgccactatcgggagcaccagaagggccggcccaccagcaccaaccccatcgccagcatctttgcctggacacgtggcctggagcaccgggggaagctggatgggaaccaagacctcatcaggtttgcccagatgctggagaaggtgtgcgtggagacggtggagagtggagccatgaccaaggacctggcgggctgcattcacggcctcagcaatgtgaagctgaacgagcacttcctgaacaccacggacttcctcgacaccatcaagagcaacctggacagagccctgggcaggcagtagggggaggcgccacccatggctgcagtggaggggccagggctgagccggcgggtcctcctgagcgcggcagagggtgagcctcacagcccctctctggaggcctttctaggggatgtttttttataagccagatgtttttaaaagcatatgtgtgtttcccctcatggtgacgtgaggcaggagcagtgcgttttacctcagccagtcagtatgttttgcatactgtaatttatattgcccttggaacacatggtgccatatttagctactaaaaagctcttcacaaaa

SEQ ID NO: 60308 - DNA, 1205 bp, Homo sapiens
tagcagctggtactggtctgagatgttatggatggcccagcgttagcccgcggccaggcagccgggaggagcggcgcgcgctcggacctctcccgccctgctcgttcgctctccagcttgggatggccggctacctgcgggtcgtgcgctcgctctgcagagcctcaggctcgcggccggcctgggcgccggcggccctgacagcccccacctcgcaagagcagccgcggcgccactatgccgacaaaaggatcaaggtggcgaagcccgtggtggagatggatggtgatgagatgacccgtattatctggcagttcatcaaggagaagctcatcctgccccacgtggacatccagctaaagtattttgacctcgggctcccaaaccgtgaccagactgatgaccaggtcaccattgactctgcactggccacccagaagtacagtgtggctgtcaagtgtgccaccatcacccctgatgaggcccgtgtggaagagttcaagctgaagaagatgtggaaaagtcccaatggaactatccggaacatcctgggggggactgtcttccgggagcccatcatctgcaaaaacatcccacgcctagtccctggctggaccaagcccatcaccattggcaggcacgcccatggcgaccagtacaaggccacagactttgtggcagaccgggccggcactttcaaaatggtcttcaccccaaaagatggcagtggtgtcaaggagtgggaagtgtacaacttccccgcaggcggcgtgggcatgggcatgtacaacaccgacgagtccatctcaggttttgcgcacagctgcttccagtatgccatccagaagaaatggccgctgtacatgagcaccaagaacaccatactgaaagcctacgatgggcgtttcaaggacatcttccaggagatctttgacaagcactataagaccgacttcgacaagaataagatctggtatgacgcggcagagggtgagcctcacagcccctctctggaggcctttctaggggatgtttttttataagccagatgtttttaaaagcatatgtgtgtttcccctcatggtgacgtgaggcaggagcagtgcgttttacctcagccagtcagtatgttttgcatactgtaatttatattgcccttggaacacatggtgccatatttagctactaaaaagctcttcacaaaa

SEQ ID NO: 60309 - DNA, 1343 bp, Homo sapiens
tagcagctggtactggtctgagatgttatggatggcccagcgttagcccgcggccaggcagccgggaggagcggcgcgcgctcggacctctcccgccctgctcgttcgctctccagcttgggatggccggctacctgcgggtcgtgcgctcgctctgcagagcctcaggctcgcggccggcctgggcgccggcggccctgacagcccccacctcgcaagagcagccgcggcgccactatgccgacaaaaggatcaaggtggcgaagcccgtggtggagatggatggtgatgagatgacccgtattatctggcagttcatcaaggagaagctcatcctgccccacgtggacatccagctaaagtattttgacctcgggctcccaaaccgtgaccagactgatgaccaggtcaccattgactctgcactggccacccagaagtacagtgtggctgtcaagtgtgccaccatcacccctgatgaggcccgtgtggaagagttcaagctgaagaagatgtggaaaagtcccaatggaactatccggaacatcctgggggggactgtcttccgggagcccatcatctgcaaaaacatcccacgcctagtccctggctggaccaagcccatcaccattggcaggcacgcccatggcgaccagtacaaggccacagactttgtggcagaccgggccggcactttcaaaatggtcttcaccccaaaagatggcagtggtgtcaaggagtgggaagtgtacaacttccccgcaggcggcgtgggcatgggcatgtacaacaccgacgaggtgaggctggcttgggcatcctgggcccctcctctcccagcttgtctcttcatctctgtctcgtggctttcctttcttctgtaatggcctcattcttaggccacaaagaggcagaaatggccaccagggctgggcatggtggctgacacttgtaatcccggcattttgggaggccaaggcaggattgcttgagaccagaagtttgagaccagcctgggcaacagtgagaccccatctcttgaaacaaaaagaaaagaaaagaaaagaaaagaaatggccacgagcagctccaggcgtactcctgcctgcttggctaccctatcagaagagaatgcctctttatccccagttccagctccaatgccaggctgagtcacatgaccacctctgagccaatcacagaggccctggggagaaaggcttctgattggataagccagggacacactgtcaaccccagcgctaggcctgggaattagccctgccccagccacatgtagtctaaggcggtgctttccaaaaaaaagttgtttccaaaaaaaa

SEQ ID NO: 60310 - DNA, 626 bp, Homo sapiens
  misc_feature (31)..(31): n is a, c, g, or t
  misc_feature (34)..(34): n is a, c, g, or t
  misc_feature (61)..(61): n is a, c, g, or t
  misc_feature (63)..(63): n is a, c, g, or t
  misc_feature (75)..(75): n is a, c, g, or t
  misc_feature (95)..(95): n is a, c, g, or t
  misc_feature (118)..(118): n is a, c, g, or t
  misc_feature (124)..(124): n is a, c, g, or t
  misc_feature (128)..(128): n is a, c, g, or t
  misc_feature (149)..(149): n is a, c, g, or t
ctcctgcttatagtccgtctgttgcccatgnaancgattagtagcgtatggccgtcaccgntntatggagcccanaaagccgccacaggccccancccatgcagacttgctgacacgnttggcnagcncggggaagtgatggaaccaangcctcacagtttgcccagatgctggagaaggtgtgcgtggagacggtggagagtggagccatgaccaaggacctggcgggctgcattcacggcctcagcaatgtgaagctgaacgagcacttcctgaacaccacggacttcctcgacaccatcaagagcaacctggacagagccctgggcaggcagtagggggaggcgccacccatggctgcagtggaggggccagggctgagccggcgggtcctcctgagcgcggcagagggtgagcctcacagcccctctctggaggcctttctaggggatgtttttttataagccagatgtttttaaaagcatatgtgtgtttcccctcatggtgacgtgaggcaggagcagtgcgttttacctcagccagtcagtatgttttgcatactgtaatttatattgcccttggaacacatggtgccatatttagctactaaaaagctcttcacaaaa

SEQ ID NO: 60311 - DNA, 1791 bp, Homo sapiens
tagcagctggtactggtctgagatgttatggatggcccagcgttagcccgcggccaggcagccgggaggagcggcgcgcgctcggacctctcccgccctgctcgttcgctctccagcttgggatggccggctacctgcgggtcgtgcgctcgctctgcagagcctcaggctcgcggccggcctgggcgccggcggccctgacagcccccacctcgcaagagcagccgcggcgccactatgccgacaaaaggatcaaggtggcgaagcccgtggtggagatggatggtgatgagatgacccgtattatctggcagttcatcaaggagaagctcatcctgccccacgtggacatccagctaaagtattttgacctcgggctcccaaaccgtgaccagactgatgaccaggtcaccattgactctgcactggccacccagaagtacagtgtggctgtcaagtgtgccaccatcacccctgatgaggcccgtgtggaagagttcaagctgaagaagatgtggaaaagtcccaatggaactatccggaacatcctgggggggactgtcttccgggagcccatcatctgcaaaaacatcccacgcctagtccctggctggaccaagcccatcaccattggcaggagccctgggcaggcagtagggggaggcgccacccatggctgcagtggaggggccagggctgagccggcgggtcctcctgagcgcggcagagggtgagcctcacagcccctctctggaggcctttctaggggatgtttttttataagccagatgtttttaaaagcatatgtgtgtttcccctcatggtgacgtgaggcaggagcagtgcgttttacctcagccagtcagtatgttttgcatactgtaatttatattgcccttggaacacatggtgccatatttagctactaaaaagctcttcacaaaattgtctgctgtgtttgtccctgaggggaggaggtagtgggaccctgaggcagaggccctgctagagctggcaggttcccctggggcagaccagagcacctcaggaaggggctgccacggcagggaagggaccaggcagccctgggagcccgcattccacaggggcccactgcggagttctcggacactcagggcacaggcctgtgggttccctggaattttctagcatgatccagtttctgtgtccagttctccattctgagagtcaatcagttcctgataggttgtcattgatttttttcttcgttggttttaaccttctaaacatctccaggccactttcttagcctttttctaggtactaaaaagaggtcctacccacacctgcctcacacttctcctttccaaggctgcctgagtttggaggggcttgggtgtgtgtgaacaagggccctgcattgtctaggcctgcagttcccaggcttgggttcactttcaccatgcattggcaaaactagaaaagtaagcttgtgacaaattgttctcggccgggcacagtggcgcacgcctataatccctgtactttgggaggctgaggtgggtggatcacttgaggccaggagttcgagaccagcctggccaacatggtgaaaccccatctctactcaaaatacaaaaattagccaggcgtggtgatgcgcacctgcagtcccagctactcgggaggctgaggcaggaaaatggcttgaacctgggaggcagaggttgcagtgagccgagactgcaccactgcactccagcctgggtgacagagcaagactctgtctcaaaaaaaaaaaaaaaaaaa

SEQ ID NO: 60312 - DNA, 945 bp, Homo sapiens
tagcagctggtactggtctgagatgttatggatggcccagcgttagcccgcggccaggcagccgggaggagcggcgcgcgctcggacctctcccgccctgctcgttcgctctccagcttgggatggccggctacctgcgggtcgtgcgctcgctctgcagagcctcaggctcgcggccggcctgggcgccggcggccctgacagcccccacctcgcaagagcagccgcggcgccactatgccgacaaaaggatcaaggtggcgaagcccgtggtggagatggatggtgatgagatgacccgtattatctggcagttcatcaaggagaagctcatcctgccccacgtggacatccagctaaagtattttgacctcgggctcccaaaccgtgaccagactgatgaccaggtcaccattgactctgcactggccacccagaagtacagtgtggctgtcaagtgtgccaccatcacccctgatgaggcccgtgtggaagagttcaagctgaagaagatgtggaaaagtcccaatggaactatccggaacatcctgggggggactgtcttccgggagcccatcatctgcaaaaacatcccacgcctagtccctggctggaccaagcccatcaccattggcaggagccctgggcaggcagtagggggaggcgccacccatggctgcagtggaggggccagggctgagccggcgggtcctcctgagcgcggcagagggtgagcctcacagcccctctctggaggcctttctaggggatgtttttttataagccagatgtttttaaaagcatatgtgtgtttcccctcatggtgacgtgaggcaggagcagtgcgttttacctcagccagtcagtatgttttgcatactgtaatttatattgcccttggaacacatggtgccatatttagctactaaaaagctcttcacaaaa

SEQ ID NO: 60313 - DNA, 901 bp, Homo sapiens
  misc_feature (694)..(694): n is a, c, g, or t
tagcagctggtactggtctgagatgttatggatggcccagcgttagcccgcggccaggcagccgggaggagcggcgcgcgctcggacctctcccgccctgctcgttcgctctccagcttgggatggccggctacctgcgggtcgtgcgctcgctctgcagagcctcaggctcgcggccggcctgggcgccggcggccctgacagcccccacctcgcaagagcagccgcggcgccactatgccgacaaaaggatcaaggtggcgaagcccgtggtggagatggatggtgatgagatgacccgtattatctggcagttcatcaaggagaagctcatcctgccccacgtggacatccagctaaagtattttgacctcgggctcccaaaccgtgaccagactgatgaccaggtcaccattgactctgcactggccacccagaagtacagtgtggctgtcaagtgtgccaccatcacccctgatgaggcccgtgtggaagagttcaagctgaagaagatgtggaaaagtcccaatggaactatccggaacatcctgggggggactgtcttccgggagcccatcatctgcaaaaacatcccacgcctagtccctggctggaccaagcccatcaccattggcaggcacgcccatggcgaccagtacaagggccacagacatttgttggcaagaaccggggnccgggcaccttttcaaaaatgggttctttcaaccccaaaaagaatgtggcagtgggttgttcaagggaagtgcggaaatgtggtatcacaatatccccagacggggagttgagagcgatagggcgcattgtaacaaaacccggacgcaagaccatctcacggataggacgcacgcagttagtaacccgatataccatccaagacaaa

SEQ ID NO: 60314 - DNA, 1793 bp, Homo sapiens
tagcagctggtactggtctgagatgttatggatggcccagcgttagcccgcggccaggcagccgggaggagcggcgcgcgctcggacctctcccgccctgctcgttcgctctccagcttgggatggccggctacctgcgggtcgtgcgctcgctctgcagagcctcaggctcgcggccggcctgggcgccggcggccctgacagcccccacctcgcaagagcagccgcggcgccactagttcaagctgaagaagatgtggaaaagtcccaatggaactatccggaacatcctgggggggactgtcttccgggagcccatcatctgcaaaaacatcccacgcctagtccctggctggaccaagcccatcaccattggcaggcacgcccatggcgaccagtacaaggccacagactttgtggcagaccgggccggcactttcaaaatggtcttcaccccaaaagatggcagtggtgtcaaggagtgggaagtgtacaacttccccgcaggcggcgtgggcatgggcatgtacaacaccgacgagtccatctcaggttttgcgcacagctgcttccagtatgccatccagaagaaatggccgctgtacatgagcaccaagaacaccatactgaaagcctacgatgggcgtttcaaggacatcttccaggagatctttgacaagcactataagaccgacttcgacaagaataagatctggtatgacgcggcagagggtgagcctcacagcccctctctggaggcctttctaggggatgtttttttataagccagatgtttttaaaagcatatgtgtgtttcccctcatggtgacgtgaggcaggagcagtgcgttttacctcagccagtcagtatgttttgcatactgtaatttatattgcccttggaacacatggtgccatatttagctactaaaaagctcttcacaaaattgtctgctgtgtttgtccctgaggggaggaggtagtgggaccctgaggcagaggccctgctagagctggcaggttcccctggggcagaccagagcacctcaggaaggggctgccacggcagggaagggaccaggcagccctgggagcccgcattccacaggggcccactgcggagttctcggacactcagggcacaggcctgtgggttccctggaattttctagcatgatccagtttctgtgtccagttctccattctgagagtcaatcagttcctgataggttgtcattgatttttttcttcgttggttttaaccttctaaacatctccaggccactttcttagcctttttctaggtactaaaaagaggtcctacccacacctgcctcacacttctcctttccaaggctgcctgagtttggaggggcttgggtgtgtgtgaacaagggccctgcattgtctaggcctgcagttcccaggcttgggttcactttcaccatgcattggcaaaactagaaaagtaagcttgtgacaaattgttctcggccgggcacagtggcgcacgcctataatccctgtactttgggaggctgaggtgggtggatcacttgaggccaggagttcgagaccagcctggccaacatggtgaaaccccatctctactcaaaatacaaaaattagccaggcgtggtgatgcgcacctgcagtcccagctactcgggaggctgaggcaggaaaatggcttgaacctgggaggcagaggttgcagtgagccgagactgcaccactgcactccagcctgggtgacagagcaagactctgtctcaaaaaaaaaaaaaaaaaaa

SEQ ID NO: 60315 - DNA, 1465 bp, Homo sapiens
ggcacgagaattggcagactccagagcccacacatttgcactctagactctactgccttcctcatgaagaattttaggacccccgtctggctgtgttgttgcttggggttcaaattctggttgaaagatggcggctgcagtgggaccactattatctctgtcctcacagagttcaagctgaagaagatgtggaaaagtcccaatggaactatccggaacatcctgggggggactgtcttccgggagcccatcatctgcaaaaacatcccacgcctagtccctggctggaccaagcccatcaccattggcaggagccctgggcaggcagtagggggaggcgccacccatggctgcagtggaggggccagggctgagccggcgggtcctcctgagcgcggcagagggtgagcctcacagcccctctctggaggcctttctaggggatgtttttttataagccagatgtttttaaaagcatatgtgtgtttcccctcatggtgacgtgaggcaggagcagtgcgttttacctcagccagtcagtatgttttgcatactgtaatttatattgcccttggaacacatggtgccatatttagctactaaaaagctcttcacaaaattgtctgctgtgtttgtccctgaggggaggaggtagtgggaccctgaggcagaggccctgctagagctggcaggttcccctggggcagaccagagcacctcaggaaggggctgccacggcagggaagggaccaggcagccctgggagcccgcattccacaggggcccactgcggagttctcggacactcagggcacaggcctgtgggttccctggaattttctagcatgatccagtttctgtgtccagttctccattctgagagtcaatcagttcctgataggttgtcattgatttttttcttcgttggttttaaccttctaaacatctccaggccactttcttagcctttttctaggtactaaaaagaggtcctacccacacctgcctcacacttctcctttccaaggctgcctgagtttggaggggcttgggtgtgtgtgaacaagggccctgcattgtctaggcctgcagttcccaggcttgggttcactttcaccatgcattggcaaaactagaaaagtaagcttgtgacaaattgttctcggccgggcacagtggcgcacgcctataatccctgtactttgggaggctgaggtgggtggatcacttgaggccaggagttcgagaccagcctggccaacatggtgaaaccccatctctactcaaaatacaaaaattagccaggcgtggtgatgcgcacctgcagtcccagctactcgggaggctgaggcaggaaaatggcttgaacctgggaggcagaggttgcagtgagccgagactgcaccactgcactccagcctgggtgacagagcaagactctgtctcaaaaaaaaaaaaaaaaaaa

SEQ ID NO: 60316 - DNA, 751 bp, Homo sapiens
  misc_feature (616)..(616): n is a, c, g, or t
  misc_feature (621)..(621): n is a, c, g, or t
  misc_feature (643)..(643): n is a, c, g, or t
  misc_feature (662)..(662): n is a, c, g, or t
  misc_feature (689)..(689): n is a, c, g, or t
  misc_feature (720)..(720): n is a, c, g, or t
tagcagctggtactggtctgagatgttatggatggcccagcgttagcccgcggccaggcagccgggaggagcggcgcgcgctcggacctctcccgccctgctcgttcgctctccagcttgggatggccggctacctgcgggtcgtgcgctcgctctgcagagcctcaggctcgcggccggcctgggcgccggcggccctgacagcccccacctcgcaagagcagccgcggcgccactatgccgacaaaaggatcaaggtggcgaagcccgtggtggagatggatggtgatgagatgacccgtattatctggcagttcatcaaggagaagctcatcctgccccacgtggacatccagctaaagtattttgacctcgggctcccaaaccgtgaccagactgatgaccaggtcaccattgactctgcactggccacccagaagtacagtgtggctgtcaagtgtgccaccatcacccctgatgaggcccgtgtggaagagttcaagctgaagaagatgtggaaaagtcccaatggaactatccggaacatcctgggggggactgtcttccgggagcccatcatctgcaaaaacatcccacgcctagtccctggctggcncccgnccctcccccttgggcgggccgnccctggggccccgtccccngggcccgcctttgtgggcgcccggggngggccttttcccctggtttttcccccccccnctgggcgtggtgttccggcgtgggccgtgtc

SEQ ID NO: 60317 - DNA, 728 bp, Homo sapiens
tagcagctggtactggtctgagatgttatggatggcccagcgttagcccgcggccaggcagccgggaggagcggcgcgcgctcggacctctcccgccctgctcgttcgctctccagcttgggatggccggctacctgcgggtcgtgcgctcgctctgcagagcctcaggctcgcggccggcctgggcgccggcggccctgacagcccccacctcgcaagagcagccgcggcgccactatgccgacaaaaggatcaaggtggcgaagcccgtggtggagatggatggtgatgagatgacccgtattatctggcagttcatcaaggagaagctcatcctgccccacgtggacatccagctaaagtattttgacctcgggctcccaaaccgtgaccagactgatgaccaggtcaccattgactgagccctgggcaggcagtagggggaggcgccacccatggctgcagtggaggggccagggctgagccggcgggtcctcctgagcgcggcagagggtgagcctcacagcccctctctggaggcctttctaggggatgtttttttataagccagatgtttttaaaagcatatgtgtgtttcccctcatggtgacgtgaggcaggagcagtgcgttttacctcagccagtcagtatgttttgcatactgtaatttatattgcccttggaacacatggtgccatatttagctactaaaaagctcttcacaaaa

SEQ ID NO: 60318 - DNA, 647 bp, Homo sapiens
tagcagctggtactggtctgagatgttatggatggcccagcgttagcccgcggccaggcagccgggaggagcggcgcgcgctcggacctctcccgccctgctcgttcgctctccagcttgggatggccggctacctgcgggtcgtgcgctcgctctgcagagcctcaggctcgcggccggcctgggcgccggcggccctgacagcccccacctcgcaagagcagccgcggcgccactatgccgacaaaaggatcaaggtggcgaagcccgtggtggagatggatggtgatgagatgacccgtattatctggcagttcatcaaggagaagctcatcctgccccacgtggacatccagctaaagtattttgacctcgggctcccaaaccgtgaccagaggctgagccggcgggtcctcctgagcgcggcagagggtgagcctcacagcccctctctggaggcctttctaggggatgtttttttataagccagatgtttttaaaagcatatgtgtgtttcccctcatggtgacgtgaggcaggagcagtgcgttttacctcagccagtcagtatgttttgcatactgtaatttatattgcccttggaacacatggtgccatatttagctactaaaaagctcttcacaaaa

SEQ ID NO: 60319 - DNA, 1426 bp, Homo sapiens
tagcagctggtactggtctgagatgttatggatggcccagcgttagcccgcggccaggcagccgggaggagcggcgcgcgctcggacctctcccgccctgctcgttcgctctccagcttgggatggccggctacctgcgggtcgtgcgctcgctctgcagagcctcaggctcgcggccggcctgggcgccggcggccctgacagcccccacctcgcaagagcagccgcggcgccactgagccctgggcaggcagtagggggaggcgccacccatggctgcagtggaggggccagggctgagccggcgggtcctcctgagcgcggcagagggtgagcctcacagcccctctctggaggcctttctaggggatgtttttttataagccagatgtttttaaaagcatatgtgtgtttcccctcatggtgacgtgaggcaggagcagtgcgttttacctcagccagtcagtatgttttgcatactgtaatttatattgcccttggaacacatggtgccatatttagctactaaaaagctcttcacaaaaaaaaaaaaaaaaaaaaagaaaaaaaaaaaaaaaaaaaaaaaaaaaaaaaaaaaaaagggggggggcagcgccaaaagagttctccccagggggggcgcacaactacacgcgacacccccgagtttagttgaccacgaggggggccccaatagggggggcggattattaaagacgccaggcggaggggcgagcgacatgttcaaaaaacacaagggaggagacgagggaaacaccgcgagcaccagggagagcaaacattgagggacaaacgaacccctcatttcaggggggggggggcaaccacagagaggaaacaaacacacccccgcgcagaggagatgtaaccaacccccaccgagaggggaccaaaaacaacacaagccacagcggcacgatgagaggggggcaaacaacccaacgaggcggcaatacacgcggcgccgcccgaacaaatgcggccccacgcgacacacctatagcaagaaaaaattaatgcagcaggggcgacgcgcgcaaaccacaaggaacaaagagacgaggaacacaaaaaaaagcaggagacaaggaaaacagaaaaaaagcaaggcagagcgaaaacaacaaagagaaacagaaagaaaaaaaaaaaacagaacgagaaaagggggaaggagagaaggggaagggagaagagggcagggaacgaagagagccgcgagcgaacacaaagaaaagaagaggagagcaggggaagaggaaaagaagcaggggagaggggggggggggagggaaggtggaagggacgacgacagggggagagagcagaggcaggggggaggggaggagacaagagagggcaacgcggaggaggagagaagacagggcagggaacaagaggggaa

SEQ ID NO: 60320 - DNA, 1117 bp, Homo sapiens
tagcagctggtactggtctgagatgttatggatggcccagcgttagcccgcggccaggcagccgggaggagcggcgcgcgctcggacctctcccgccctgctcgttcgctctccagcttgggatggccggctacctgcgggtcgtgcgctcgctctgcagagcctcaggctcgcggccggcctgggcgccggcggccctgacagcccccacctcgcaagagcagccgcggcgccactatgccgacaaaaggatcaaggtggcgaagcccgtggtggagatggatggtgatgagatgacccgtattatctggcagttcatcaaggagaagcacaaccagccccacgaaacaaccaacaaaaaaaaaaaaaccacataacacccaaaccaaaccaaacagaaaaccaaaacaccaagagacacgatcactaagccacccaaaaaaacaagaaaagacaatacaagaagaaccaccttacatcgcctaagatatggccctggagaaatatttcgggttcataaaaaaatttaaatataagtacgccaggataatgcaaggccataatcaatccgaaaatatgagcgattcaacgcaaaaatcccagacaacgacataggagacaacctggcatccataattccccgaatctaattccatttctccatggcacgcggagaggctgggatcgcggcagggctgacctgaggaaggggatggctgaaaaaactatattacttagaccttattccttacgtcggtttcaaaaatatatctggcgacgggcatggatgaaaactgggattgatggcattgcttaaattagaaaagaaatctgaggaaggctcgacggatgggatgggattcctttaggcggaaacagaggaaggtttcggaagtaaaggcatgggcaataaatgggtggcagcaactaagcgatctctttttataccttttcccactattttcacgaacgcgggggatgagtgggagaatgacgggatggatacgattcaaaggattaatcgcggaggggtatactgggggccgaatttcgagttgaccattgggagagggggggacggctttggtctatgggaacgcggtttttttttttggga

SEQ ID NO: 60321 - DNA, 999 bp, Homo sapiens
  misc_feature (333)..(333): n is a, c, g, or t
  misc_feature (339)..(339): n is a, c, g, or t
  misc_feature (342)..(342): n is a, c, g, or t
  misc_feature (345)..(345): n is a, c, g, or t
  misc_feature (352)..(352): n is a, c, g, or t
  misc_feature (447)..(447): n is a, c, g, or t
  misc_feature (457)..(457): n is a, c, g, or t
  misc_feature (461)..(461): n is a, c, g, or t
  misc_feature (483)..(483): n is a, c, g, or t
  misc_feature (502)..(502): n is a, c, g, or t
  misc_feature (504)..(504): n is a, c, g, or t
  misc_feature (507)..(507): n is a, c, g, or t
  misc_feature (548)..(548): n is a, c, g, or t
  misc_feature (627)..(627): n is a, c, g, or t
  misc_feature (652)..(652): n is a, c, g, or t
  misc_feature (668)..(668): n is a, c, g, or t
  misc_feature (687)..(687): n is a, c, g, or t
  misc_feature (700)..(700): n is a, c, g, or t
  misc_feature (711)..(711): n is a, c, g, or t
  misc_feature (715)..(715): n is a, c, g, or t
  misc_feature (719)..(719): n is a, c, g, or t
  misc_feature (723)..(723): n is a, c, g, or t
  misc_feature (740)..(740): n is a, c, g, or t
  misc_feature (744)..(744): n is a, c, g, or t
  misc_feature (747)..(747): n is a, c, g, or t
  misc_feature (792)..(792): n is a, c, g, or t
tagcagctggtactggtctgagatgttatggatggcccagcgttagcccgcggccaggcagccgggaggagcggcgcgcgctcggacctctcccgccctgctcgttcgctctccagcttgggatggccggctacctgcgggtcgtgcgctcgctctgcagagcctcaggctcgcggccggcctgggcgccggcggccctgacagcccccacctcgcaagagcagccgcggcgccactatgccgacaaaaggatcaaggtggcgaagcccgtggtggagatggatggtgatgagatgacccgtattatctggcagttcatcaaggagaagcatnaatccntgnccnacgttgntaaacacgcataaagatattttaaccacgggcccaccacaaacacgtgaacacacgaactgaatgacacagggtcaccacacttgaactactgancctggacaanacanaaaagaaaagttgttggcgtgntaaagttgttgcaaccacntnacnccctgaatgaaggtcccgttgtggaaagaagtttcaaagcntgaaagaaagaatgttggaaaaaagttcccaaaatggaaacaaatccgtgaaacaatccctgtggggggggaactgttnctttccggtgtagacccaatacatnctgtcaaaaaaacatnccccacgtccttagttccnctgtgtctggtanccaagtcccantcanccanttgnggaggggaacgtcccantggnganacacagttacaagggccacagacatttgttggcaagaaccggggnccgggcaccttttcaaaaatgggttctttcaaccccaaaaagaatgtggcagtgggttgttcaagggaagtgcggaaatgtggtatcacaatatccccagacggggagttgagagcgatagggcgcattgtaacaaaacccggacgcaagaccatctcacggataggacgcacgcagttagtaacccgatataccatccaagacaaa

SEQ ID NO: 60322 - DNA, 385 bp, Homo sapiens
caggcttgatttttgccaaaagatagtttgacttcctgaaactaacagataactcttgtattcaaaaaataaatgtaatggatttaaagactggtaagaagtattttcttttcttttcatttttgagacacagtttcactctgtcgcccaggctggagtgcggtggtgcgaccttggctcacagcaacctccgcctcctgggttcaagtgattctcctgcctcagcctcctagctgggattaaggtgcccaccacccctggctaatttttgtgtttttagtagagacaagtttttgccatgttggccaggctggtctccaactcttgacctcaggtgagttgcccgcctcaggcctcccaaagtgttgggattagaggcgtgagc

SEQ ID NO: 60323 - DNA, 269 bp, Homo sapiens
gtgaattagagggagaggagggccacggttagggatgcagaggagggacaccatgggtcaggggaaggaacaaaggagacgggagtgtgtcccagccccaggcatgagctgtgctgattggtgggaagcagaattaggatgctgggccactggacaggctgtgaatgcagctgtctccactagggccgccacaagaagccatccctgagaccctgaggtttcttgtgcaaactcgagggaaggggagtacagagagggcaacagggagt

SEQ ID NO: 60324 - DNA, 226 bp, Homo sapiens
gggacatctgtcataaacacgttctgttgcacaacctgagacaggcctgtcacttgctttgctcttcacttcatggctctgatctgcacgcactttctaaggcctaggacaagccagaaattgcttccaagacacttgtgtggcgcaacctctatcggcaagtgcagtttgcctcacgggcttcgtcaaacacttggcacaggggtccacgaactgctgcctgtgt

SEQ ID NO: 60325 - DNA, 434 bp, Homo sapiens
ctcccactcaccctgaccttccatggttcttgttcgtgagtgggtctagtaatccacaggatcaccaagaccattttttggacctctctggactgacaccctgggtacctgggtatcccagcttaggcaccagccgcattggctgaatccccatgtttctccaggtctctgtttccccatctgtaaaatggggataatgatccctgctcttcaaagggagcaggacaatcccataaacctaaaaataaataaggaaataaagatattcattgtgtacatctggtaggtctcagagcgccctgttattgttgggagttcaggtgcaacggcttggaatgcagagacgcgtggactccttgtgtttccttaatgttctgacttattttttcccagaggggtgggccctggcagcatccctgaaacgcttgagaggc

SEQ ID NO: 60326 - DNA, 284 bp, Homo sapiens
ggctcacagacaccttaagaagccactgaaaacccctggtgctctcccggggaaaagacccaggctcaccgaaagttgtgaacaatttcaaggggttcaaagacctttgagtcccatcctccaaactcgagtttagactctgtcttaaagccttgttagttcatttctcaaacattcacggagccccatgggctgctcctggtctaggctaggtgctgggggcccagagacagggctttgctccagggttgggagtaggggtgcgctgagacgcccctaacaca

SEQ ID NO: 60327 - DNA, 2954 bp, Homo sapiens
tgggccgcagccctccccgccccgccgaccgcggtcacacactctcggagcctccccgtgagcgggagcgcggcgcacggcgatgcgccgaggcgggcgctgaggcggcgccgcgcgagcagcagcagaggcggcggcggcccccagcccagcccggcgccgccgccgagcccgggccccaaggtgcggcggcgccccaagttcccgccatgagcagccggctcggggggctccgcggccccggggactcccgccccgccgggcgcgaccgcagcgccccgcggccccgacgcgcttaacgttgtcgcttgccggtcccgccaccgccgcctccgccgccgctcgcgtcctcgccgccaccgcctcggccgctgcagctccgccggcagcatgtctcgaaggaagatttcgtccgagtccttcagctccctgggctccgactacctggagaccagcccggaggaggagggggagtgccccctgtctaggctctgctggaatggcagccggagcccgcccgggccgctggagcccagcccggccgcagctgccgctgccgccgccccggccccgaccccggctgcttctgccgccgccgccgctgccactgccggggccaggagggtgcagcgccggaggcgggtcaacctggactcgctgggcgagagcatcagccgcctgacggcgccctcgcctcagacgatacagcagactctcaagaggacactgcagtattatgaacatcaagttattggttacagggatgcagaaaagaatttccacaatatctctaacagatgctcctatgcagaccactccaacaaagaagaaattgaagatgtctcaggaattcttcagtgtactgctaatatactcggtttgaagtttgaggaaattcaaaaaagatttggtgaagagttctttaatatatgctttcatgagaatgagagagtccttcgagctgtaggtggcactttgcaggacttttttaacggctttgatgctttgttggaacacattagaacttcttttggaaaacaggccactctggagtcaccatctttcctatgcaaagagctccctgaaggtactctcatgctccactacttccaccctcaccatattgtggggtttgcaatgctggggatgattaaggctgcaggaaagaagatctatcggctggatgtggaagtggaacaggttgcaaatgagaagctatgctctgatgtttcaaacccaggcaattgtagctgtcttactttccttatcaaagaatgtgaaaatactaatatcatgaagaaccttccacagggaacctcccaagttcctgcggacctcagaattagcatcaacaccttctgtagagccttccctttccacttgatgtttgatcccagcatgtcagtccttcagttgggggaaggtctaaggaagcagcttcgatgtgacactcacaaagtgctcaagtttgaggactgcttcgagattgtatctccaaaggttaatgccacctttgaaagggtcctgctgcgactgtctaccccgtttgtgattagaaccaagcctgaggcttctggctctgaaaataaagacaaggtgatggaagtcaaaggacaaatgatccatgttccagaatcaaattccattttatttttgggctctccatgtgtggacaagttggatgaactcatgggccgagggctacatctctcagacatccctatccatgatgccacccgagatgtcattttggttggtgagcaggcaaaggcccaagatgggttgaagaaaaggatggataaattaaaggcaactttagaaagaactcaccaggccctggaagaagagaaaaagaagacagtggatcttctatattctattttccctggtgatgtagcccagcaattatggcaagggcagcaagtacaggccagaaagtttgatgatgtcaccatgctcttttcagacattgttggcttcacagccatatgtgcccagtgtactcccatgcaagtaatcagcatgctgaatgaactgtacaccagatttgaccaccagtgtggatttttggatatttataaggtggaaacaataggtgatgcctactgtgttgcagcagggctccacagaaaaagcctctgccatgctaaacccattgctctgatggccttgaagatgatggaactttcagaagaggtgctgacacctgatggaagaccgattcagatgaggataggaattcactcaggctccgtgctggctggagttgttggggtgcgaatgccacgttattgcctgtttggaaataatgtcacactggcaagcaaattcgagtcgggaagtcaccctcggcgcatcaatgtcagcccaaccacttaccaattattaaaacgagaagaaagtttcacattcattccgcggtctcgtgaagagcttccagacaactttccaaaggaaattcctgggatctgctatttcctggaggtaaggactggtccaaagccaccaaagccttctctttcttcgtcgagaataaaaaaggtttcctacaacatcggcaccatgttcctccgggagacaagcctctgagacctgctacagatcaaagactcctccaaaaagcacaagcccagaacatgggtcaccaatggggggtggaaagagattgtgtctctttcattgctttgttgagaacaagcagcaaaatttctgtattatgtcaggcaataatcctactaaaaggtggaggtgaccgctgtcaataaaaagccggaggatgagggaaataagatgtgtccattcatatgagtggttttggtcatatatatacacatatattttaattacaagtgtgggtcccctttcagaactaaccaataaatagattccatgttttcttgtttatcacacatacaagtatctttccctatatatttgtaccacttttgagagcc

SEQ ID NO: 60328 - DNA, 3047 bp, Homo sapiens
tgggccgcagccctccccgccccgccgaccgcggtcacacactctcggagcctccccgtgagcgggagcgcggcgcacggcgatgcgccgaggcgggcgctgaggcggcgccgcgcgagcagcagcagaggcggcggcggcccccagcccagcccggcgccgccgccgagcccgggccccaaggtgcggcggcgccccaagttcccgccatgagcagccggctcggggggctccgcggccccggggactcccgccccgccgggcgcgaccgcagcgccccgcggccccgacgcgcttaacgttgtcgcttgccggtcccgccaccgccgcctccgccgccgctcgcgtcctcgccgccaccgcctcggccgctgcagctccgccggcagcatgtctcgaaggaagatttcgtccgagtccttcagctccctgggctccgactacctggagaccagcccggaggaggagggggagtgccccctgtctaggctctgctggaatggcagccggagcccgcccgggccgctggagcccagcccggccgcagctgccgctgccgccgccccggccccgaccccggctgcttctgccgccgccgccgctgccactgccggggccaggagggtgcagcgccggaggcgggtcaacctggactcgctgggcgagagcatcagccgcctgacggcgccctcgcctcagacgatacagcagactctcaagaggacactgcagtattatgaacatcaagttattggttacagggatgcagaaaagaatttccacaatatctctaacagatgctcctatgcagaccactccaacaaagaagaaattgaagatgtctcaggaattcttcagtgtactgctaatatactcggtttgaagtttgaggaaattcaaaaaagatttggtgaagagttctttaatatatgctttcatgagaatgagagagtccttcgagctgtaggtggcactttgcaggacttttttaacggctttgatgctttgttggaacacattagaacttcttttggaaaacaggccactctggagtcaccatctttcctatgcaaagagctccctgaaggtactctcatgctccactacttccaccctcaccatattgtggggtttgcaatgctggggatgattaaggctgcaggaaagaagatctatcggctggatgtggaagtggaacaggttgcaaatgagaagctatgctctgatgtttcaaacccaggcaattgtagctgtcttactttccttatcaaagaatgtgaaaatactaatatcatgaagaaccttccacagggaacctcccaagttcctgcggacctcagaattagcatcaacaccttctgtagagccttccctttccacttgatgtttgatcccagcatgtcagtccttcagttgggggaaggtctaaggaagcagcttcgatgtgacactcacaaagtgctcaagtttgaggactgcttcgagattgtatctccaaaggttaatgccacctttgaaagggtcctgctgcgactgtctaccccgtttgtgattagaaccaagcctgaggcttctggctctgaaaataaagacaaggtgatggaagtcaaaggacaaatgatccatgttccagaatcaaattccattttatttttgggctctccatgtgtggacaagttggatgaactcatgggccgagggctacatctctcagacatccctatccatgatgccacccgagatgtcattttggttggtgagcaggcaaaggcccaagatgggttgaagaaaaggatggataaattaaaggcaactttagaaagaactcaccaggccctggaagaagagaaaaagaagacagtggatcttctatattctattttccctggtgatgtagcccagcaattatggcaagggcagcaagtacaggccagaaagtttgatgatgtcaccatgctcttttcagacattgttggcttcacagccatatgtgcccagtgtactcccatgcaagtaatcagcatgctgaatgaactgtacaccagatttgaccaccagtgtggatttttggatatttataaggtggaaacaataggtgatgcctactgtgttgcagcagggctccacagaaaaagcctctgccatgctaaacccattgctctgatggccttgaagatgatggaactttcagaagaggtgctgacacctgatggaagaccgattcagccccagaggagtgaactccttttctcctttcctgtttccatccagctggttccagatcagcatcaaagtgaaacggatttgggtactgaaaagatgaggataggaattcactcaggctccgtgctggctggagttgttggggtgcgaatgccacgttattgcctgtttggaaataatgtcacactggcaagcaaattcgagtcgggaagtcaccctcggcgcatcaatgtcagcccaaccacttaccaattattaaaacgagaagaaagtttcacattcattccgcggtctcgtgaagagcttccagacaactttccaaaggaaattcctgggatctgctatttcctggaggtaaggactggtccaaagccaccaaagccttctctttcttcgtcgagaataaaaaaggtttcctacaacatcggcaccatgttcctccgggagacaagcctctgagacctgctacagatcaaagactcctccaaaaagcacaagcccagaacatgggtcaccaatggggggtggaaagagattgtgtctctttcattgctttgttgagaacaagcagcaaaatttctgtattatgtcaggcaataatcctactaaaaggtggaggtgaccgctgtcaataaaaagccggaggatgagggaaataagatgtgtccattcatatgagtggttttggtcatatatatacacatatattttaattacaagtgtgggtcccctttcagaactaaccaataaatagattccatgttttcttgtttatcacacatacaagtatctttccctatatatttgtaccacttttgagagcc

SEQ ID NO: 60329 - DNA, 496 bp, Homo sapiens
gacacctggccttctgtggtcctagagtaactgaaaagtaagcaaagacttggctgcttccaaatattagggcactttgacaccatggaacctggtcagttaattccccagcagaagcttataagaaaaagtaaaggcgcctcctcccactgcagcagttcattggctgtccagtgtcagctccctccagaaccagagccagggattatctgcctttgagaacctctggggccttgtgacaatccaatgcagcatcctcaccagccggatcgggcgctgtgcagtgtggtcagcatggtgaagaaagtcatttcctcggtgggcagtattcctctttatctctcattacactggaaatgttatttctgctgtatcatccgtgctcaacgttttagtctgtcaggctcaccttctctctggaaagaatttgcttaacttgacattccatgtgccgctaataaaatatattttgaaagaataagggtgtggttgggag

SEQ ID NO: 60330 - DNA, 2229 bp, Homo sapiens
  misc_feature (6)..(6): n is a, c, g, or t
aacttngctagtacgaggctggtttaaatcggccgaggcggtggcgggctgagcggtttcgagccggcgtcggggagcggcggtaccgggcggctgcggggctggctcgacccagcttgaggtctcggcgtccgcgtcctgcggtgccctgggatccgccgacatgaatcccatcgtagtggtccacggcggcggagccggtcccatctccaaggatcggaaggagcgagtgcaccagggcatggtcagagccgccaccgtgggctacggcatcctccgggagggcgggagcgccgtggatgccgtagagggagctgtcgtcgccctggaagacgatcccgagttcaacgcaggttgtgggtctgtcttgaacacaaatggtgaggttgaaatggatgctagtatcatggatggaaaagacctgtctgcaggagcagtgtccgcagtccagtgtatagcaaatcccattaaacttgctcggcttgtcatggaaaagacacctcattgctttctgactgaccaaggcgcagcgcagtttgcagcagctatgggggttccagagattcctggagaaaaactggtgacagagagaaacaaaaagcgcctggaaaaagagaagcatgaaaaaggtgctcagaaaacagattgtcaaaaaaacttgggaaccgtgggtgctgttgccttggactgcaaagggaatgtagcctacgcaacctccacaggcggtatcgttaataaaatggtcggccgcgttggggactcaccgtgtctaggagctggaggttatgccgacaatgacatcggagccgtctcaaccacagggcatggggaaagcatcctgaaggtgaacctggctagactcaccctgttccacatagaacaaggaaagacggtagaagaggctgcggacctatcgttgggttatatgaagtcaagggttaaaggtttaggtggcctcatcgtggttagcaaaacaggagactgggtggcaaagtggacctccacctccatgccctgggcagccgccaaggacggcaagctgcacttcggaattgatcctgacgatactactatcaccgaccttccctaagccgctggaagattgtattccagatgctagcttagaggtcaagtacagtctcctcatgagacatagcctaatcaattagatctagaattggaaaaattgtcccgtctgtcacttgttttgttgccttaataagcatctgaatgtttggttgtggggcgggttctgaagcgatgagagaaatgcccgtattaggaggattacttgagccctggaggtcaaagctgaggtgagccatgattactccactgcactccagcctgggcaacagagccaggccctgtatcaaaaaaaaaagaaaagggaaaaaagaaagaaagcagcagcatgatcctgacatgacagatgtgggagacccacagcctgcagacactgtgggctggaaggtgggaagggaggggccggtggaggtggagctgtttgaaagtgacacagcagcagtagaagcagtggtgggcgaagcccaggtgaccctcagaacgttgcacaagaacatcagggaaaagaaccagaatcctttaaggaaaatgttcttcatgtatgagagactaaagtgatttttctaagaaagttcagcccttctctgacttacctggacatttctagatacttccaaaggaccctctgggaatccatagcttcctaatctggagatgggaggtcataagggagacgctgtggggttccttgaagtttcttgggttcacagaggagccccctcacttggtgttctcccgtgagccagcctccacctgccaaagacactctggtcctcgtatagtgagtaatggggctcagggcctctccaacaacagagaggagctgatgctgtagggctgaccccgtgacttcctgagtcctcaccctgtccagtgctttgagattcttcccacctccccatcctcaccagccggatcgggcgctgtgcagtgtggtcagcatggtgaagaaagtcatttcctcggtgggcagtattcctctttatctctcattacactggaaatgttatttctgctgtatcatccgtgctcaacgttttagtctgtcaggctcaccttctctctggaaagaatttgcttaacttgacattccatgtgccgctaataaaatatattttgaaagaataagggtgtggttgggag

SEQ ID NO: 60331 - DNA, 2202 bp, Homo sapiens
  misc_feature (6)..(6): n is a, c, g, or t
aacttngctagtacgaggctggtttaaatcggccgaggcggtggcgggctgagcggtttcgagccggcgtcggggagcggcggtaccgggcggctgcggggctggctcgacccagcttgaggtctcggcgtccgcgtcctgcggtgccctggtggtccacggcggcggagccggtcccatctccaaggatcggaaggagcgagtgcaccagggcatggtcagagccgccaccgtgggctacggcatcctccgggagggcgggagcgccgtggatgccgtagagggagctgtcgtcgccctggaagacgatcccgagttcaacgcaggttgtgggtctgtcttgaacacaaatggtgaggttgaaatggatgctagtatcatggatggaaaagacctgtctgcaggagcagtgtccgcagtccagtgtatagcaaatcccattaaacttgctcggcttgtcatggaaaagacacctcattgctttctgactgaccaaggcgcagcgcagtttgcagcagctatgggggttccagagattcctggagaaaaactggtgacagagagaaacaaaaagcgcctggaaaaagagaagcatgaaaaaggtgctcagaaaacagattgtcaaaaaaacttgggaaccgtgggtgctgttgccttggactgcaaagggaatgtagcctacgcaacctccacaggcggtatcgttaataaaatggtcggccgcgttggggactcaccgtgtctaggagctggaggttatgccgacaatgacatcggagccgtctcaaccacagggcatggggaaagcatcctgaaggtgaacctggctagactcaccctgttccacatagaacaaggaaagacggtagaagaggctgcggacctatcgttgggttatatgaagtcaagggttaaaggtttaggtggcctcatcgtggttagcaaaacaggagactgggtggcaaagtggacctccacctccatgccctgggcagccgccaaggacggcaagctgcacttcggaattgatcctgacgatactactatcaccgaccttccctaagccgctggaagattgtattccagatgctagcttagaggtcaagtacagtctcctcatgagacatagcctaatcaattagatctagaattggaaaaattgtcccgtctgtcacttgttttgttgccttaataagcatctgaatgtttggttgtggggcgggttctgaagcgatgagagaaatgcccgtattaggaggattacttgagccctggaggtcaaagctgaggtgagccatgattactccactgcactccagcctgggcaacagagccaggccctgtatcaaaaaaaaaagaaaagggaaaaaagaaagaaagcagcagcatgatcctgacatgacagatgtgggagacccacagcctgcagacactgtgggctggaaggtgggaagggaggggccggtggaggtggagctgtttgaaagtgacacagcagcagtagaagcagtggtgggcgaagcccaggtgaccctcagaacgttgcacaagaacatcagggaaaagaaccagaatcctttaaggaaaatgttcttcatgtatgagagactaaagtgatttttctaagaaagttcagcccttctctgacttacctggacatttctagatacttccaaaggaccctctgggaatccatagcttcctaatctggagatgggaggtcataagggagacgctgtggggttccttgaagtttcttgggttcacagaggagccccctcacttggtgttctcccgtgagccagcctccacctgccaaagacactctggtcctcgtatagtgagtaatggggctcagggcctctccaacaacagagaggagctgatgctgtagggctgaccccgtgacttcctgagtcctcaccctgtccagtgctttgagattcttcccacctccccatcctcaccagccggatcgggcgctgtgcagtgtggtcagcatggtgaagaaagtcatttcctcggtgggcagtattcctctttatctctcattacactggaaatgttatttctgctgtatcatccgtgctcaacgttttagtctgtcaggctcaccttctctctggaaagaatttgcttaacttgacattccatgtgccgctaataaaatatattttgaaagaataagggtgtggttgggag

SEQ ID NO: 60332 - DNA, 1637 bp, Homo sapiens
gatacagggcctggctctgttgcccaggctggagtgcagtggagtaatcatggctactaacctgacctttgtctgtacttgagcacccttcgcgatttaactttcatgtagtgtccgacttctaatatggatttgaatttcttgactgttactgctcagaacaatcaccctttttgagcaggagctggaggttatgccgacaatgacatcggagccgtctcaaccacagggcatggggaaagcatcctgaaggtgaacctggctagactcaccctgttccacatagaacaaggaaagacggtagaagaggctgcggacctatcgttgggttatatgaagtcaagggttaaaggtttaggtggcctcatcgtggttagcaaaacaggagactgggtggcaaagtggacctccacctccatgccctgggcagccgccaaggacggcaagctgcacttcggaattgatcctgacgatactactatcaccgaccttccctaagccgctggaagattgtattccagatgctagcttagaggtcaagtacagtctcctcatgagacatagcctaatcaattagatctagaattggaaaaattgtcccgtctgtcacttgttttgttgccttaataagcatctgaatgtttggttgtggggcgggttctgaagcgatgagagaaatgcccgtattaggaggattacttgagccctggaggtcaaagctgaggtgagccatgattactccactgcactccagcctgggcaacagagccaggccctgtatcaaaaaaaaaagaaaagggaaaaaagaaagaaagcagcagcatgatcctgacatgacagatgtgggagacccacagcctgcagacactgtgggctggaaggtgggaagggaggggccggtggaggtggagctgtttgaaagtgacacagcagcagtagaagcagtggtgggcgaagcccaggtgaccctcagaacgttgcacaagaacatcagggaaaagaaccagaatcctttaaggaaaatgttcttcatgtatgagagactaaagtgatttttctaagaaagttcagcccttctctgacttacctggacatttctagatacttccaaaggaccctctgggaatccatagcttcctaatctggagatgggaggtcataagggagacgctgtggggttccttgaagtttcttgggttcacagaggagccccctcacttggtgttctcccgtgagccagcctccacctgccaaagacactctggtcctcgtatagtgagtaatggggctcagggcctctccaacaacagagaggagctgatgctgtagggctgaccccgtgacttcctgagtcctcaccctgtccagtgctttgagattcttcccacctccccatcctcaccagccggatcgggcgctgtgcagtgtggtcagcatggtgaagaaagtcatttcctcggtgggcagtattcctctttatctctcattacactggaaatgttatttctgctgtatcatccgtgctcaacgttttagtctgtcaggctcaccttctctctggaaagaatttgcttaacttgacattccatgtgccgctaataaaatatattttgaaagaataagggtgtggttgggag

SEQ ID NO: 60333 - DNA, 2235 bp, Homo sapiens
ttacttacttgcttgcctgcttgcttagagacagggtctccctttgtctcccaggctggagtgcagtggcatgatcatagctcactgcaggttcaaacttctgggctcaagtaatcctaccgcctcagcctcatgagtagctgggactacaggtgtgggtgtccacgcccagctaattttttttttctttagtagagatgaggtcttgctatgttgcccaggctggtcttgaacttctagactcaagcaatcctcttgcctcggcctcccaaagtgctgggattacaggcatgagccactgcacaggcccctttccttttttctccattttctttcttttttctcccccttttctgggaggcaggccagcctcacagccagacaccagctgtgggagttgtcttacgcatatgctctgccccttagaaggattcagtctgtgccctggaggggcctacggtcccgcctggttgtgggtctgtcttgaacacaaatggtgaggttgaaatggatgctagtatcatggatggaaaagacctgtctgcaggagcagtgtccgcagtccagtgtatagcaaatcccattaaacttgctcggcttgtcatggaaaagacacctcattgctttctgactgaccaaggcgcagcgcagtttgcagcagctatgggggttccagagattcctggagaaaaactggtgacagagagaaacaaaaagcgcctggaaaaagagaagcatgaaaaaggtgctcagaaaacagattgtcaaaaaaacttgggaaccgtgggtgctgttgccttggactgcaaagggaatgtagcctacgcaacctccacaggcggtatcgttaataaaatggtcggccgcgttggggactcaccgtgtctaggagctggaggttatgccgacaatgacatcggagccgtctcaaccacagggcatggggaaagcatcctgaaggtgaacctggctagactcaccctgttccacatagaacaaggaaagacggtagaagaggctgcggacctatcgttgggttatatgaagtcaagggttaaaggtttaggtggcctcatcgtggttagcaaaacaggagactgggtggcaaagtggacctccacctccatgccctgggcagccgccaaggacggcaagctgcacttcggaattgatcctgacgatactactatcaccgaccttccctaagccgctggaagattgtattccagatgctagcttagaggtcaagtacagtctcctcatgagacatagcctaatcaattagatctagaattggaaaaattgtcccgtctgtcacttgttttgttgccttaataagcatctgaatgtttggttgtggggcgggttctgaagcgatgagagaaatgcccgtattaggaggattacttgagccctggaggtcaaagctgaggtgagccatgattactccactgcactccagcctgggcaacagagccaggccctgtatcaaaaaaaaaagaaaagggaaaaaagaaagaaagcagcagcatgatcctgacatgacagatgtgggagacccacagcctgcagacactgtgggctggaaggtgggaagggaggggccggtggaggtggagctgtttgaaagtgacacagcagcagtagaagcagtggtgggcgaagcccaggtgaccctcagaacgttgcacaagaacatcagggaaaagaaccagaatcctttaaggaaaatgttcttcatgtatgagagactaaagtgatttttctaagaaagttcagcccttctctgacttacctggacatttctagatacttccaaaggaccctctgggaatccatagcttcctaatctggagatgggaggtcataagggagacgctgtggggttccttgaagtttcttgggttcacagaggagccccctcacttggtgttctcccgtgagccagcctccacctgccaaagacactctggtcctcgtatagtgagtaatggggctcagggcctctccaacaacagagaggagctgatgctgtagggctgaccccgtgacttcctgagtcctcaccctgtccagtgctttgagattcttcccacctccccatttgttgatagactcttggttctctttatacttttcatcacatttggaaatttttaaaaaaattgttttctgctcctcctttctaagaattcaattaccatgtgctatacttttatgctcacccatataggt

SEQ ID NO: 60334 - DNA, 1143 bp, Homo sapiens
  misc_feature (6)..(6): n is a, c, g, or t
aacttngctagtacgaggctggtttaaatcggccgaggcggtggcgggctgagcggtttcgagccggcgtcggggagcggcggtaccgggcggctgcggggctggctcgacccagcttgaggtctcggcgtccgcgtcctgcggtgccctgggatccgccgacatgaatcccatcgtagtggtccacggcggcggagccggtcccatctccaaggatcggaaggagcgagtgcaccagggcatggtcagagccgccaccgtgggctacggcatcctccgggagggcgggagcgccgtggatgccgtagagggagctgtcgtcgccctggaagacgatcccgagttcaacgcaggttgtgggtctgtcttgaacacaaatggtgaggttgaaatggatgctagtatcatggatggaaaagacctgtctgcaggagcagtgtccgcagtccagtgtatagcaaatcccattaaacttgctcggcttgtcatggaaaagacacctcattgctttctgactgaccaaggcgcagcgcagtttgcagcagctatgggggttccagagattcctggagaaaaactggtgacagagagaaacaaaaagcgcctggaaaaagagaagcatgaaaaaggtgctcagaaaacagattgtcaaaaaaacttgggaaccgtgggtgctgttgccttggactgcaaagggaatgtagcctacgcaacctccacaggcggtatcgttaataaaatggtcggccgcgttggggactcaccgtgtctaggagctggaggttatgccgacaatgacatcggagccgtctcaaccacagggcatggggaaagcatcctgaaggtgaacctggctagactcacccctgtccagtgctttgagattcttcccacctccccatcctcaccagccggatcgggcgctgtgcagtgtggtcagcatggtgaagaaagtcatttcctcggtgggcagtattcctctttatctctcattacactggaaatgttatttctgctgtatcatccgtgctcaacgttttagtctgtcaggctcaccttctctctggaaagaatttgcttaacttgacattccatgtgccgctaataaaatatattttgaaagaataagggtgtggttgggag

SEQ ID NO: 60335 - DNA, 792 bp, Homo sapiens
  misc_feature (6)..(6): n is a, c, g, or t
aacttngctagtacgaggctggtttaaatcggccgaggcggtggcgggctgagcggtttcgagccggcgtcggggagcggcggtaccgggcggctgcggggctggctcgacccagcttgaggtctcggcgtccgcgtcctgcggtgccctggggtctcccgaggaccttgtacccgcgcggtttccttgggctggctttggacgacgctttcgccttcctgctgcctaggatccgccgacatgaatcccatcgtagtggtccacggcggcggagccggtcccatctccaaggatcggaaggagcgagtgcaccagggcatggtcagagccgccaccgtgggctacggcatcctccgggagggcgggagcgccgtggatgccgtagagggagctgtcgtcgccctggaagacgatcccgagttcaacgcaggttgtgggtctgtcttgaacacaaatggtgaggttgaaatggatgctagtatcatggatggaaaagacctgtctgcaggagcagtgtccgcagtccagtgtatagcaaatcccattaaacttgctcggcttgtcatggaaaagacacctcattgctttctgactgaccaaggcgcagcgcagtttgcagcagctatgggggttccagagattcctggagaaaaactggtgacagagagaaacaaaaagcgcctggaaaaagagaagcatgaaaaaggtgctcagaaaacagattgtcaaaagtaagtcttacctgtggctcgcattatttgggagttattaaaatatgaaagtttggcaaat

SEQ ID NO: 60336 - DNA, 1380 bp, Homo sapiens
tactactactaaattcgcggccgcgtcgacacatagaacaaggaaagacggtagaagaggctgcggacctatcgttgggttatatgaagtcaagggttaaaggtttaggtggcctcatcgtggttagcaaaacaggagactgggtggcaaagtggacctccacctccatgccctgggcagccgccaaggacggcaagctgcacttcggaattgatcctgacgatactactatcaccgaccttccctaagccgctggaagattgtattccagatgctagcttagaggtcaagtacagtctcctcatgagacatagcctaatcaattagatctagaattggaaaaattgtcccgtctgtcacttgttttgttgccttaataagcatctgaatgtttggttgtggggcgggttctgaagcaatgagagaaatgcccgtattaggaggattacttgagccctggaggtcaaagctgaggtgagccatgattactccactgcactccagcctgggcaacagagccaggccctgtatcaaaaaaaaaagaaaagggaaaaaagaaagaaagcagcagcatgatcctgacatgacagatgtgggagacccacagcctgcagacactgtgggctggaaggtgggaagggaggggccggtggaggtggagctgtttgaaagtgacacagcagcagtagaagcagtggtgggcgaagcccaggtgaccctcagaacgttgcacaagaacatcagggaaaagaaccagaatcctttaaggaaaatgttcttcatgtatgagagactaaagtgatttttctaagaaagttcagcccttctctgacttacctggacatttctagatacttccaaaggaccctctgggaatccatagcttcctaatctggagatgggaggtcataagggagacgctgtggggttccttgaagtttcttgggttcacagaggagccccctcacttggtgttctcccgtgagccagcctccacctgccaaagacactctggtcctcgtatagtgagtaatggggctcagggcctctccaacaacagagaggagctgatgctgtagggctgaccccgtgacttcctgagtcctcaccctgtccagtgctttgagattcttcccacctccccatcctcaccagccggatcgggcgctgtgcagtgtggtcagcatggtgaagaaagtcatttccttggtggacagtattcctctttatctctcattacactggaaatgttatttctgctgtatcatccgtgctcaacgttttagtctgtcaggctcaccttctctctggaaagaatttgcttaacttgacattccatgtgccgctaataaaatatattttgaaagaataaaggagagg

SEQ ID NO: 60337 - DNA, 901 bp, Homo sapiens
  misc_feature (6)..(6): n is a, c, g, or t
aacttngctagtacgaggctggtttaaatcggccgaggcggtggcgggctgagcggtttcgagccggcgtcggggagcggcggtaccgggcggctgcggggctggctcgacccagcttgaggtctcggcgtccgcgtcctgcggtgccctgggatccgccgacatgaatcccatcgtagtggtccacggcggcggagccggtcccatctccaaggatcggaaggagcgagtgcaccagggcatggtcagagccgccaccgtgggctacggcatcctccgggagggcgggagcgccgtggatgccgtagagggagctgtcgtcgccctggaagacgatcccgagttcaacgcaggttgtgggtctgtcttgaacacaaatggtgaggttgaaatggatgctagtatcatggatggaaaagacctgtctgcaggagcagtgtccgcagtccagtgtatagcaaatcccattaaacttgctcggcttgtcatggaaaagacacctcattgctttctgactgaccaaggcgcagcgcagtttgcagcagctatgggggttccagagattcctggagaaaaactggtgacagagagaaacaaaaagcgcctggaaaaagagaagcatgaaaaaggtgctcagaaaacagattgtcaaaagttcttccgagggcacaagcttaccacaagactgactgtagacgtactcgggaatctctcatcaacttgtcctcaaatgaccacgctctagctcaccttcaccctagagaaaagcacccacgttgggcaccagatgaaggggtggccagcccctctacaccttgtgggcgtttctcatcaggtgggacgagagactgagaaaagaaagaagaggctgggtgcggtggggtcaacgccttgtattccc

SEQ ID NO: 60338 - DNA, 2345 bp, Homo sapiens
ttacttacttgcttgcctgcttgcttagagacagggtctccctttgtctcccaggctggagtgcagtggcatgatcatagctcactgcaggttcaaacttctgggctcaagtaatcctaccgcctcagcctcatgagtagctgggactacaggtgtgggtgtccacgcccagctaattttttttttctttagtagagatgaggtcttgctatgttgcccaggctggtcttgaacttctagactcaagcaatcctcttgcctcggcctcccaaagtgctgggattacaggcatgagccactgcacaggcccctttccttttttctccattttctttcttttttctcccccttttctgggaggcaggccagcctcacagccagacaccagctgtgggagttgtcttacgcatatgctctgccccttagaaggattcagtctgtgccctggaggggcctacggtcccgcctggttgtgggtctgtcttgaacacaaatggtgaggttgaaatggatgctagtatcatggatggaaaagacctgtctgcaggagcagtgtccgcagtccagtgtatagcaaatcccattaaacttgctcggcttgtcatggaaaagacacctcattgctttctgactgaccaaggcgcagcgcagtttgcagcagctatgggggttccagagattcctggagaaaaactggtgacagagagaaacaaaaagcgcctggaaaaagagaagcatgaaaaaggtgctcagaaaacagattgtcaaaaaaacttgggaaccgtgggtgctgttgccttggactgcaaagggaatgtagcctacgcaacctccacaggcggtatcgttaataaaatggtcggccgcgttggggactcaccgtgtctaggagctggaggttatgccgacaatgacatcggagccgtctcaaccacagggcatggggaaagcatcctgaaggtgaacctggctagactcaccctgttccacatagaacaaggaaagacggtagaagaggctgcggacctatcgttgggttatatgaagtcaagggttaaaggtttaggtggcctcatcgtggttagcaaaacaggagactgggtggcaaagtggacctccacctccatgccctgggcagccgccaaggacggcaagctgcacttcggaattgatcctgacgatactactatcaccgaccttccctaagccgctggaagattgtattccagatgctagcttagaggtcaagtacagtctcctcatgagacatagcctaatcaattagatctagaattggaaaaattgtcccgtctgtcacttgttttgttgccttaataagcatctgaatgtttggttgtggggcgggttctgaagcgatgagagaaatgcccgtattaggaggattacttgagccctggaggtcaaagctgaggtgagccatgattactccactgcactccagcctgggcaacagagccaggccctgtatcaaaaaaaaaagaaaagggaaaaaagaaagaaagcagcagcatgatcctgacatgacagatgtgggagacccacagcctgcagacactgtgggctggaaggtgggaagggaggggccggtggaggtggagctgtttgaaagtgacacagcagcagtagaagcagtggtgggcgaagcccaggtgaccctcagaacgttgcacaagaacatcagggaaaagaaccagaatcctttaaggaaaatgttcttcatgtatgagagactaaagtgatttttctaagaaagttcagcccttctctgacttacctggacatttctagatacttccaaaggaccctctgggaatccatagcttcctaatctggagatgggaggtcataagggagacgctgtggggttccttgaagtttcttgggttcacagaggagccccctcacttggtgttctcccgtgagccagcctccacctgccaaagacactctggtcctcgtatagtgagtaatggggctcagggcctctccaacaacagagaggagctgatgctgtagggctgaccccgtgacttcctgagtcctcaccctgtccagtgctttgagattcttcccacctccccatcctcaccagccggatcgggcgctgtgcagtgtggtcagcatggtgaagaaagtcatttcctcggtgggcagtattcctctttatctctcattacactggaaatgttatttctgctgtatcatccgtgctcaacgttttagtctgtcaggctcaccttctctctggaaagaatttgcttaacttgacattccatgtgccgctaataaaatatattttgaaagaataagggtgtggttgggag

SEQ ID NO: 60339 - DNA, 2306 bp, Homo sapiens
  misc_feature (6)..(6): n is a, c, g, or t
aacttngctagtacgaggctggtttaaatcggccgaggcggtggcgggctgagcggtttcgagccggcgtcggggagcggcggtaccgggcggctgcggggctggctcgacccagcttgaggtctcggcgtccgcgtcctgcggtgccctggggtctcccgaggaccttgtacccgcgcggtttccttgggctggctttggacgacgctttcgccttcctgctgcctaggatccgccgacatgaatcccatcgtagtggtccacggcggcggagccggtcccatctccaaggatcggaaggagcgagtgcaccagggcatggtcagagccgccaccgtgggctacggcatcctccgggagggcgggagcgccgtggatgccgtagagggagctgtcgtcgccctggaagacgatcccgagttcaacgcaggttgtgggtctgtcttgaacacaaatggtgaggttgaaatggatgctagtatcatggatggaaaagacctgtctgcaggagcagtgtccgcagtccagtgtatagcaaatcccattaaacttgctcggcttgtcatggaaaagacacctcattgctttctgactgaccaaggcgcagcgcagtttgcagcagctatgggggttccagagattcctggagaaaaactggtgacagagagaaacaaaaagcgcctggaaaaagagaagcatgaaaaaggtgctcagaaaacagattgtcaaaaaaacttgggaaccgtgggtgctgttgccttggactgcaaagggaatgtagcctacgcaacctccacaggcggtatcgttaataaaatggtcggccgcgttggggactcaccgtgtctaggagctggaggttatgccgacaatgacatcggagccgtctcaaccacagggcatggggaaagcatcctgaaggtgaacctggctagactcaccctgttccacatagaacaaggaaagacggtagaagaggctgcggacctatcgttgggttatatgaagtcaagggttaaaggtttaggtggcctcatcgtggttagcaaaacaggagactgggtggcaaagtggacctccacctccatgccctgggcagccgccaaggacggcaagctgcacttcggaattgatcctgacgatactactatcaccgaccttccctaagccgctggaagattgtattccagatgctagcttagaggtcaagtacagtctcctcatgagacatagcctaatcaattagatctagaattggaaaaattgtcccgtctgtcacttgttttgttgccttaataagcatctgaatgtttggttgtggggcgggttctgaagcgatgagagaaatgcccgtattaggaggattacttgagccctggaggtcaaagctgaggtgagccatgattactccactgcactccagcctgggcaacagagccaggccctgtatcaaaaaaaaaagaaaagggaaaaaagaaagaaagcagcagcatgatcctgacatgacagatgtgggagacccacagcctgcagacactgtgggctggaaggtgggaagggaggggccggtggaggtggagctgtttgaaagtgacacagcagcagtagaagcagtggtgggcgaagcccaggtgaccctcagaacgttgcacaagaacatcagggaaaagaaccagaatcctttaaggaaaatgttcttcatgtatgagagactaaagtgatttttctaagaaagttcagcccttctctgacttacctggacatttctagatacttccaaaggaccctctgggaatccatagcttcctaatctggagatgggaggtcataagggagacgctgtggggttccttgaagtttcttgggttcacagaggagccccctcacttggtgttctcccgtgagccagcctccacctgccaaagacactctggtcctcgtatagtgagtaatggggctcagggcctctccaacaacagagaggagctgatgctgtagggctgaccccgtgacttcctgagtcctcaccctgtccagtgctttgagattcttcccacctccccatcctcaccagccggatcgggcgctgtgcagtgtggtcagcatggtgaagaaagtcatttcctcggtgggcagtattcctctttatctctcattacactggaaatgttatttctgctgtatcatccgtgctcaacgttttagtctgtcaggctcaccttctctctggaaagaatttgcttaacttgacattccatgtgccgctaataaaatatattttgaaagaataagggtgtggttgggag

SEQ ID NO: 60340 - DNA, 2086 bp, Homo sapiens
  misc_feature (6)..(6): n is a, c, g, or t
aacttngctagtacgaggctggtttaaatcggccgaggcggtggcgggctgagcggtttcgagccggcgtcggggagcggcggtaccgggcggctgcggggctggctcgacccagcttgaggtctcggcgtccgcgtcctgcggtgccctgggatccgccgacatgaatcccatcgtagtggtccacggcggcggagccggtcccatctccaaggatcggaaggagcgagtgcaccagggcatggtcagagccgccaccgtgggctacggcatcctccgggagggcgggagcgccgtggatgccgtagagggagctgtcgtcgccctggaagacgatcccgagttcaacgcagacacctcattgctttctgactgaccaaggcgcagcgcagtttgcagcagctatgggggttccagagattcctggagaaaaactggtgacagagagaaacaaaaagcgcctggaaaaagagaagcatgaaaaaggtgctcagaaaacagattgtcaaaaaaacttgggaaccgtgggtgctgttgccttggactgcaaagggaatgtagcctacgcaacctccacaggcggtatcgttaataaaatggtcggccgcgttggggactcaccgtgtctaggagctggaggttatgccgacaatgacatcggagccgtctcaaccacagggcatggggaaagcatcctgaaggtgaacctggctagactcaccctgttccacatagaacaaggaaagacggtagaagaggctgcggacctatcgttgggttatatgaagtcaagggttaaaggtttaggtggcctcatcgtggttagcaaaacaggagactgggtggcaaagtggacctccacctccatgccctgggcagccgccaaggacggcaagctgcacttcggaattgatcctgacgatactactatcaccgaccttccctaagccgctggaagattgtattccagatgctagcttagaggtcaagtacagtctcctcatgagacatagcctaatcaattagatctagaattggaaaaattgtcccgtctgtcacttgttttgttgccttaataagcatctgaatgtttggttgtggggcgggttctgaagcgatgagagaaatgcccgtattaggaggattacttgagccctggaggtcaaagctgaggtgagccatgattactccactgcactccagcctgggcaacagagccaggccctgtatcaaaaaaaaaagaaaagggaaaaaagaaagaaagcagcagcatgatcctgacatgacagatgtgggagacccacagcctgcagacactgtgggctggaaggtgggaagggaggggccggtggaggtggagctgtttgaaagtgacacagcagcagtagaagcagtggtgggcgaagcccaggtgaccctcagaacgttgcacaagaacatcagggaaaagaaccagaatcctttaaggaaaatgttcttcatgtatgagagactaaagtgatttttctaagaaagttcagcccttctctgacttacctggacatttctagatacttccaaaggaccctctgggaatccatagcttcctaatctggagatgggaggtcataagggagacgctgtggggttccttgaagtttcttgggttcacagaggagccccctcacttggtgttctcccgtgagccagcctccacctgccaaagacactctggtcctcgtatagtgagtaatggggctcagggcctctccaacaacagagaggagctgatgctgtagggctgaccccgtgacttcctgagtcctcaccctgtccagtgctttgagattcttcccacctccccatcctcaccagccggatcgggcgctgtgcagtgtggtcagcatggtgaagaaagtcatttcctcggtgggcagtattcctctttatctctcattacactggaaatgttatttctgctgtatcatccgtgctcaacgttttagtctgtcaggctcaccttctctctggaaagaatttgcttaacttgacattccatgtgccgctaataaaatatattttgaaagaataagggtgtggttgggag

SEQ ID NO: 60341 - DNA, 2275 bp, Homo sapiens
  misc_feature (6)..(6): n is a, c, g, or t
aacttngctagtacgaggctggtttaaatcggccgaggcggtggcgggctgagcggtttcgagccggcgtcggggagcggcggtaccgggcggctgcggggctggctcgacccagcttgaggtctcggcgtccgcgtcctgcggtgccctgggatccgccgacatgaatcccatcgtagtggtccacggcggcggagccggtcccatctccaaggatcggaaggagcgagtgcaccagggcatggtcagagccgccaccgtgggctacggcatcctccgggagggcgggagcgccgtggatgccgtagagggagctgtcgtcgccctggaagacgatcccgagttcaacgcaggttgtgggtctgtcttgaacacaaatggtgaggttgaaatggatgctagtatcatggatggaaaagacctgtctgcaggagcagtgtccgcagtccagtgtatagcaaatcccattaaacttgctcggcttgtcatggaaaagacacctcattgctttctgactgaccaaggcgcagcgcagtttgcagcagctatgggggttccagagattcctggagaaaaactggtgacagagagaaacaaaaagcgcctggaaaaagagaagcatgaaaaaggtgctcagaaaacagattgtcaaaaaaacttgggaaccgtgggtgctgttgccttggactgcaaagggaatgtagcctacgcaacctccacaggcggtatcgttaataaaatggtcggccgcgttggggactcaccgtgtctaggagctggaggttatgccgacaatgacatcggagccgtctcaaccacagggcatggggaaagcatcctgaaggtgaacctggctagactcaccctgttccacatagaacaaggaaagacggtagaagaggctgcggacctatcgttgggttatatgaagtcaagggttaaaggtttaggtggcctcatcgtggttagcaaaacaggagactgggtggcaaagtggacctccacctccatgccctgggcagccgccaaggacggcaagctgcacttcggaattgatcctgacgatactactatcaccgaccttccctaagccgctggaagattgtattccagatgctagcttagaggtcaagtacagtctcctcatgagacatagcctaatcaattagatctagaattggaaaaattgtcccgtctgtcacttgttttgttgccttaataagcatctgaatgtttggttgtggggcgggttctgaagcgatgagagaaatgcccgtattaggaggattacttgagccctggaggtcaaagctgaggtgagccatgattactccactgcactccagcctgggcaacagagccaggccctgtgagccatgattactccactgcactccagcctgggcaacagagccaggccctgtatcaaaaaaaaaagaaaagggaaaaaagaaagaaagcagcagcatgatcctgacatgacagatgtgggagacccacagcctgcagacactgtgggctggaaggtgggaagggaggggccggtggaggtggagctgtttgaaagtgacacagcagcagtagaagcagtggtgggcgaagcccaggtgaccctcagaacgttgcacaagaacatcagggaaaagaaccagaatcctttaaggaaaatgttcttcatgtatgagagactaaagtgatttttctaagaaagttcagcccttctctgacttacctggacatttctagatacttccaaaggaccctctgggaatccatagcttcctaatctggagatgggaggtcataagggagacgctgtggggttccttgaagtttcttgggttcacagaggagccccctcacttggtgttctcccgtgagccagcctccacctgccaaagacactctggtcctcgtatagtgagtaatggggctcagggcctctccaacaacagagaggagctgatgctgtagggctgaccccgtgacttcctgagtcctcaccctgtccagtgctttgagattcttcccacctccccatcctcaccagccggatcgggcgctgtgcagtgtggtcagcatggtgaagaaagtcatttccttggtggacagtattcctctttatctctcattacactggaaatgttatttctgctgtatcatccgtgctcaacgttttagtctgtcaggctcaccttctctctggaaagaatttgcttaacttgacattccatgtgccgctaataaaatatattttgaaagaataaaggagagg

SEQ ID NO: 60342 - DNA, 1100 bp, Homo sapiens
  misc_feature (6)..(6): n is a, c, g, or t
aacttngctagtacgaggctggtttaaatcggccgaggggtaccgggcggctgcggggctggctcgacccagcttgaggtctcggcgtccgcgtcctgcggtgccctgggatccgccgacatgaatcccatcgtagtggtccacggcggcggagccggtcccatctccaaggatcggaaggagcgagtgcaccagggcatggtcagagccgccaccgtgggctacggcatcctccgggagggcgggagcgccgtggatgccgtagagggagctgtcgtcgccctggaagacgatcccgagttcaacgcaggttgtgggtctgtcttgaacacaaatggtgaggttgaaatggatgctagtatcatggatggaaaagacctgtctgcaggagcagtgtccgcagtccagtgtatagcaaatcccattaaacttgctcggcttgtcatggaaaagacacctcattgctttctgactgaccaaggcgcagcgcagtttgcagcagctatgggggttccagagattcctggagaaaaactggtgacagagagaaacaaaaagcgcctggaaaaagagaagcatgaaaaaggtgctcagaaaacagattgtcaaaaaaacttgggaaccgtgggtgctgttgccttggactgcaaagggaatgtagcctacgcaacctccacaggcggtatcgttaataaaatggtcggccgcgttggggactcaccgtgtctaggagctggaggttatgccgacaatgacatcggagccgtctcaaccacagggcatggggaaagcatcctgaaggtgaacctggctagactcacccctgtccagtgctttgagattcttcccacctccccatcctcaccagccggatcgggcgctgtgcagtgtggtcagcatggtgaagaaagtcatttcctcggtgggcagtattcctctttatctctcattacactggaaatgttatttctgctgtatcatccgtgctcaacgttttagtctgtcaggctcaccttctctctggaaagaatttgcttaacttgacattccatgtgccgctaataaaatatattttgaaagaataagggtgtggttgggag

SEQ ID NO: 60343 - DNA, 688 bp, Homo sapiens
  misc_feature (6)..(6): n is a, c, g, or t
aacttngctagtacgaggctggtttaaatcggccgaggcggtggcgggctgagcggtttcgagccggcgtcggggagcggcggtaccgggcggctgcggggctggctcgacccagcttgaggtctcggcgtccgcgtcctgcggtgccctggtggtccacggcggcggagccggtcccatctccaaggatcggaaggagcgagtgcaccagggcatggtcagagccgccaccgtgggctacggcatcctccgggagggcgggagcgccgtggatgccgtagagggagctgtcgtcgccctggaagacgatcccgagttcaacgcaggttgtgggtctgtcttgaacacaaatggtgaggttgaaatggatgctagtatcatggatggaaaagacctgtctgcaggagcagtgtccgcagtccagtgtatagcaaatcccattaaacttgctcggcttgtcatggaaaagacacctcattgctttctgactgaccaaggcgcagcgcagtttgcagcagctatgggggttccagagattcctggagaaaaactggtgacagagagaaacaaaaagcgcctggaaaaagagaagcatgaaaaaggtgctcagaaaacagattgtcaaaagtaagtcttacctgtggctcgcattatttgggagttattaaaatatgaaagtttggcaaat

SEQ ID NO: 60344 - DNA, 311 bp, Homo sapiens
ggcggcggagccggtcccatctccaaggatcggaaggagcgagtgcaccagggcatggtcagagccgccaccgtgggctacggcatcctccgggagggcgggagcgccgtggatgccgtagagggagctgtcgtcgccctggaagacgatcccgagttcaacgcaggtaaatgtgcctttcagctagtaaataatgtgagtcaggtcaagctccttcttcagaataaatagaacctacatagtgttagggaatctaatgagctttggggtgaaactaagtatgtaaaaaagaaacaatatttaatttttct

SEQ ID NO: 60345 - DNA, 472 bp, Homo sapiens
caccgcgcccggcctaaataatgttttttagatttgccaaatttgtactgaactctagaatgactagttaatctttttctcctattgcaaccttctaaataatcattcagcaaaatagcctaatagctcaactaacagtagatgtttcataacagttgtcacctattgggcaacactagacggcaggcagcatctggttaattttttttatattgcaggtagcagggatagtggagtggtgtctcagattctttttttctaagttgtccttttaacactgagaagaatctatatttgcagggactagttgcagagatgggggaaacttttcttaggggaccattcatggaagaaagttaaaggaaaaacttcaggttgatagaatttcctcatttagcaaaattcaaattacaggaacatggaaagtagcacatcatagttcttgctgagttatgccatctttcagattgag

SEQ ID NO: 60346 - DNA, 115 bp, Homo sapiens
ccagaactaggactgggtgctggtgtccctgcaccacgtcatgtctccataccctcacctggtacagagcaagtgcctgctgcttgtccatgctggctggtgtctcaccgcttcc

SEQ ID NO: 60347 - DNA, 1428 bp, Homo sapiens
ttttttttcacattttatagttgtgggtccaaagaaatattctcaataattcaaaaaaaaaaaaaaagataaaccttggcaataaatggctactgatatttggcccttgttgttagtgacaacagtgaatggtggggactgtggtaagttgaagagcccttgtcctattgaaaggggaaaaccactactcttctctagccagttgtttctgtatgacggtttggccaaatactgcccaatctttatattttggggatgggaggtgggggagaaagctgaaatgtctagtttgttatgtgacatctgagttttaaatgttggattacatatttttaatactatagaagctaaacagaaagtatcttcaggcctcatcctgtccaagggctaccagttttaagcctttgaattaagataatagagtttttattgatcaaatggcttacatattaaacttgagctaataataaatggtagtcttcataggataagttacatctgtttttccttccttctggtggaatcaattttgaagaacaaatgccctaaatataaatatgagaaacagaaaggacagagcctgagaaatccacaaaataaatacatatttcctaaataattgaaatttaaccacaatacataggtgtctgaattgcattaagaaatcattggtcagattttcatattgttttctttgcttttaactgcatttgggcttggacatttgaggaagtaggaagaacactaaatgggaaaaagttttagaaatataaatgaaagaaattttaagaagttattccagttttggaagtagtagaattagtcttgttatgcatctaacctagctgttagttctttgaggaagctgttaaaaaaaaatctgtatagaggtattaatatatcagatggctggtcttcaaaagcatcactatttccaatccaaagcagtgattgagtcccataatattatagggtatcccagtgtgtagagaagtgttctgagaaagaagattataattaacagcatgtggagtgcacagtctaactgtataatatatatattttttgaagagtaggcttttttctagagctcaggcattcccaagaaataacttagagactttagaaagctatattaacttttctctgaatattattagacaaatggtctttttcttcctttatttcaaaagctgcagtttgcagcttttaaaacttatcgaataaaaaagacataatcttgagtatttttaagaaacaaatgcgaaacttgtaactatcatcatctttcctctacttcctttttacattttgtctgtcacgagtgtcttaatttgtgaagtgattctttttcttctaatgttcactgaaattatatccttttatgtatgtttggcataattattaaagcgtctttattgttttgtc

SEQ ID NO: 60348 - DNA, 396 bp, Homo sapiens
gaatgaggcaaatagaagagctaacccagtactctgtgcgcctcagtcaggcctctcaaatgacaggctctacttcagcagggtgagcgggtaaggaactggctgtcatgtggggcaccctgaaccctgccagaatgaagacggttttattttgtgtcactttcaccccagctttcttattcatttggttcaggttttggcttggcggtaagtgcctggctgccaaccaggagtgagaagtgtggatgactgcttcctacatagatcattagttaaaggccctgttttcctccctcccctcctttcttgtgatatgccgccattgtccttgcaggtctaagtcctctctggatgctgctggcgggggcctcctttgtcagctgagtcccatctgct

SEQ ID NO: 60349 - DNA, 342 bp, Homo sapiens
cagtttcatctttaaaatgaagataataacgcttacctcagagtggctgtgaggattaaatgaaataatgtatgtaaagcctctatttggtgcctggcacacacagtaagctacaatttttttaaaagttttttgtgttttttgttttgttttgttttgtttttttgagcggagtttcgctcttgttgcccaggctggagtttcgctcttgttgcccaggctggagtgcaatggcgtgatctcggctcactacaacctccgcctcctatgttcaagcaattctcctgcctcagcctcccgagtagctgggattacaggcatgtgccaccatgcccggctaat

SEQ ID NO: 60350 - DNA, 284 bp, Homo sapiens
acaatggagcaggatctacacaattctaaagaaaagcaagcatgactcaaggatttcctcttcatcctgtgttcttcatgtagagagacagcagagaggcagtcagagaatactgtctgataagcccttgaaaaagctgtagggccaagatgagatacagagatgactcaaaacagagaatccaggaatgcatagatcctggtaaaaaaggtgggagatgagtaataaattcatttgtgtaggattaagactaatcaactaacaattatattatagaacataac

SEQ ID NO: 60351 - DNA, 516 bp, Homo sapiens
  misc_feature (487)..(487): n is a, c, g, or t
cctgaatcaaacattcttaagttataaacccttaaaggaaatcagtgtaaccatgagcaattgcatattatcatcctctcatatagtctccataaatctatgtgcactcattttactcatatctttgtgtctcaggctcaccatctaaatgcagaagcaagatcaagaacacggaataaccacagaggtgcctctactgaagagcaaatggtaggaaaattgagtatagtatgtatcatctttggttcaaaagcatcttattccgtgtgaagaagttattcttccatcattcctcctctccaacttcttgtaaatcagattcaaattcttcttaatgccatactcaaagcagctgtgtttgcatgacgacccttttgcaatatgttaataactaaatgcaagaaatctgtacaaattccaaaactaatggttaggcaatacttttttgggggataatttataattactttgaaaaatgtaaaattanattttaataattaacaaaattaggactcc

SEQ ID NO: 60352 - DNA, 296 bp, Homo sapiens
caggaaggatctatgctgagcaccgcctatcctgagaacacagtcagtgaggagactgtctatactgagaaccactgttgctaggaagagctgtagtatcaagattcaccaatgctgagtccacctgtgtcaaaacagcgaagagtaatgacatcgactgtgaacttcagtgacaagccatctataacaagatccatcaatggcaaaaccatctgtagtcagcagcatcctggtgggaccccctgtaccaaaactcatcagtggcgacagatgttctcgatggcaaacgctgacga

SEQ ID NO: 60353 - DNA, 715 bp, Homo sapiens
ctagagaccctcctatcatcggcacctcgctatcatcggcaccccccccatttccatgaactttgaggtgccattcgcgccctctggcctcaaggtgcgctacttgaaggtgtttgaaccgaagctgaactacagcgaccatgatgtcatcaaatgggtgcgctacattggccgcagtggcatttatgaaactcgctgctagctgccactaggcagctagcccacctccccagccaccctcctccacaggtccaggtgccgctccctcccccaccacacatcagtgtctcctccctcctgctttgctgccttccctttgcaccagcccgagtctaggtctgggccaagcacattacaagtgggaccggtggagcagcccctgggctccctgggcaggggagttctgaggctcctgctctcccatccacctgtctgtcctggcctaatgccaggctctgagttctgtgaccaaagccaggtgggttccctttccttcccacccctgtggccacagctctggagtgggagggttggttgcccctcacctcagagctcccccaaaggccagtaatggatccccggcctcagtccctactctgctttgggatagtgtgagcttcattttgtacacgtgtgacttcgtccagttacaaacccaataaactctgtagagtggaaaaaaaaagtcgacgcgccgcgaatttagtagtagtag

SEQ ID NO: 60354 - DNA, 500 bp, Homo sapiens
gccttgggcctcagcaaggatgtgtacaacagtgagtactacacttccgccaggcctgggtgccgctgcgctggatgtgtgccgctccctcccccaccacacatcagtgtctcctccctcctgctttgctgccttccctttgcaccagcccgagtctaggtctgggccaagcacattacaagtgggaccggtggagcagcccctgggctccctgggcaggggagttctgaggctcctgctctcccatccacctgtctgtcctggcctaatgccaggctctgagttctgtgaccaaagccaggtgggttccctttccttcccacccctgtggccacagctctggagtgggagggttggttgcccctcacctcagagctcccccaaaggccagtaatggatccccggcctcagtccctactctgctttgggatagtgtgagcttcattttgtacacgtgtgacttcgtccagttacaaacccaataaactctgtagagtgga

SEQ ID NO: 60355 - DNA, 1940 bp, Homo sapiens
  misc_feature (16)..(16): n is a, c, g, or t
  misc_feature (24)..(24): n is a, c, g, or t
acagctggtacgcccncggggtantggatagcgggcagacgagcagggggcgggcggacatcttgggatccggagagtggccgggccggcagagcagggggccgaggacaccaggtctgttctcagagcgatgggccgcggagactgatctgccgccatgattggaggcttattcatctataatcacaagggggaggtgctcatctcccgagtctaccgagatgacatcgggaggaacgcagtggatgcctttcgggtcaatgttatccatgcccggcagcaggtgcgcagccccgtcaccaacattgctcgcaccagcttcttccacgttaagcggtccaacatttggctggcagcagtcaccaagcagaatgtcaacgctgccatggtcttcgaattcctctataagatgtgtgacgtgatggctgcctactttggcaagatcagcgaggaaaacatcaagaacaattttgtgctcatatatgagctgctggatgagattctagactttggctacccacagaattccgagacaggcgcgctgaaaaccttcatcacgcagcagggcatcaagagtcagcatcagacaaaagaagagcagtcacagatcaccagccaggtaactgggcagattggctggcggcgagagggtatcaagtatcgtcggaatgagctcttcctggatgtgctggagagtgtgaacctgctcatgtccccacaagggcaggtgctgagtgcccatgtgtcgggccgggtggtgatgaagagctacctgagtggcatgcctgaatgcaagtttgggatgaatgacaagattgttattgaaaagcagggcaaaggcacagctgatgaaacaagcaagagcgggaagcaatcaattgccattgatgactgcaccttccaccagtgtgtgcgactcagcaagtttgactctgaacgcagcatcagctttatcccgccagatggagagtttgagcttatgaggtatcgcacaaccaaggacatcatccttcccttccgggtgatcccgctagtgcgagaagtgggacgcaccaaactggaggtcaaggtggtcatcaagtccaactttaaaccctcactgctggctcagaagatcgaggtgaggatcccaaccccactgaacacaagcggggtgcaggtgatctgcatgaaggggaaggccaagtacaaggccagcgagaatgccatcgtgtggaagatcaagcgcatggcaggcatgaaggaatcgcagatcagcgcagagattgagcttctgcctaccaacgacaagaagaaatgggctcgaccccccatttccatgaactttgaggtgccattcgcgccctctggcctcaaggtgcgctacttgaaggtgtttgaaccgaagctgaactacagcgaccatgatgtcatcaaatgggtgcgctacattggccgcagtggcatttatgaaactcgctgctagctgccactaggcagctagcccacctccccagccaccctcctccacaggtccaggtgccgctccctcccccaccacacatcagtgtctcctccctcctgctttgctgccttccctttgcaccagcccgagtctaggtctgggccaagcacattacaagtgggaccggtggagcagcccctgggctccctgggcaggggagttctgaggctcctgctctcccatccacctgtctgtcctggcctaatgccaggctctgagttctgtgaccaaagccaggtgggttccctttccttcccacccctgtggccacagctctggagtgggagggttggttgcccctcacctcagagctcccccaaaggccagtaatggatccccggcctcagtccctactctgctttgggatagtgtgagcttcattttgtacacgtgtgacttcgtccagttacaaacccaataaactctgtagagtgga

SEQ ID NO: 60356 - DNA, 1550 bp, Homo sapiens
  misc_feature (20)..(20): n is a, c, g, or t
ctaggtcgagcctcggtgantcggacgagtgatggctgcctactttggcaagatcagcgaggaaaacatcaagaacaattttgtgctcatatatgagctgctggatgagattctagactttggctacccacagaattccgagacaggcgcgctgaaaaccttcatcacgcagcagggcatcaagagtcagcatcagacaaaagaagagcagtcacagatcaccagccaggtaactgggcagattggctggcggcgagagggtatcaagtatcgtcggaatgagctcttcctggatgtgctggagagtgtgaacctgctcatgtccccacaagggcaggtgctgagtgcccatgtgtcgggccgggtggtgatgaagagctacctgagtggcatgcctgaatgcaagtttgggatgaatgacaagattgttattgaaaagcagggcaaaggcacagctgatgaaacaagcaagagcgggaagcaatcaattgccattgatgactgcaccttccaccagtgtgtgcgactcagcaagtttgactctgaacgcagcatcagctttatcccgccagatggagagtttgagcttatgaggtatcgcacaaccaaggacatcatccttcccttccgggtgatcccgctagtgcgagaagtgggacgcaccaaactggaggtcaaggtggtcatcaagtccaactttaaaccctcactgctggctcagaagatcgaggtgaggatcccaaccccactgaacacaagcggggtgcaggtgatctgcatgaaggggaaggccaagtacaaggccagcgagaatgccatcgtgtggaagatcaagcgcatggcaggcatgaaggaatcgcagatcagcgcagagattgagcttctgcctaccaacgacaagaagaaatgggctcgaccccccatttccatgaactttgaggtgccattcgcgccctctggcctcaaggtgcgctacttgaaggtgtttgaaccgaagctgaactacagcgaccatgatgtcatcaaatgggtgcgctacattggccgcagtggcatttatgaaactcgctgctagctgccactaggcagctagcccacctccccagccaccctcctccacaggtccaggtgccgctccctcccccaccacacatcagtgtctcctccctcctgctttgctgccttccctttgcaccagcccgagtctaggtctgggccaagcacattacaagtgggaccggtggagcagcccctgggctccctgggcaggggagttctgaggctcctgctctcccatccacctgtctgtcctggcctaatgccaggctctgagttctgtgaccaaagccaggtgggttccctttccttcccacccctgtggccacagctctggagtgggagggttggttgcccctcacctcagagctcccccaaaggccagtaatggatccccggcctcagtccctactctgctttgggatagtgtgagcttcattttgtacacgtgtgacttcgtccagttacaaacccaataaactctgtagagtgga

SEQ ID NO: 60357 - DNA, 1588 bp, Homo sapiens
  misc_feature (20)..(20): n is a, c, g, or t
ctaggtcgagcctcggtgantcggacgagtgatggctgcctactttggcaagatcagcgaggaaaacatcaagaacaattttgtgctcatatatgagctgctggatgagattctagactttggctacccacagaattccgagacaggcgcgctgaaaaccttcatcacgcagcagggcatcaagagtcagcatcagacaaaagaagagcagtcacagatcaccagccaggtaactgggcagattggctggcggcgagagggtatcaagtatcgtcggaatgagctcttcctggatgtgctggagagtgtgaacctgctcatgtccccacaagggcaggtgctgagtgcccatgtgtcgggccgggtggtgatgaagagctacctgagtggcatgcctgaatgcaagtttgggatgaatgacaagattgttattgaaaagcagggcaaaggcacagctgatgaaacaagcaagagcgggaagcaatcaattgccattgatgactgcaccttccaccagtgtgtgcgactcagcaagtttgactctgaacgcagcatcagctttatcccgccagatggagagtttgagcttatgaggtatcgcacaaccaaggacatcatccttcccttccgggtgatcccgctagtgcgagaagtgggacgcaccaaactggaggtcaaggtggtcatcaagtccaactttaaaccctcactgctggctcagaagatcgaggtgaggatcccaaccccactgaacacaagcggggtgcaggtgatctgcatgaaggggaaggccaagtacaaggccagcgagaatgccatcgtgtggaagatcaagcgcatggcaggcatgaaggaatcgcagatcagcgcagagattgagcttctgcctaccaacgacaagaagaaatgggctcgaccccccatttccatgaactttgaggtgccattcgcgccctctggcctcaaggtgcgctacttgaaggtgtttgaaccgaagctgaactacagcgaccatgatgtcatcaaatgggtgcgctacattggccgcagtggcatttatgaaactcgctgctagctgccactaggcagctagcccacctccccagccaccctcctccacaggtccaggtgccgctccctcccccaccacacatcagtgtctcctccctcctgctttgctgccttccctttgcaccagcccgagtctaggtctgggccaagcacattacaagtgggaccggtggagcagcccctgggctccctgggcaggggagttctgaggctcctgctctcccatccacctgtctgtcctggcctaatgccaggctctgagttctgtgaccaaagccaggtgggttccctttccttcccacccctgtggccacagctctggagtgggagggttggttgcccctcacctcagagctcccccaaaggccagtaatggatccccggcctcagtccctactctgctttgggatagtgtgagcttcattttgtacacgtgtgacttcgtccagttacaaacccaataaactctgtagagtggaaaaaaaaagtcgacgcgccgcgaatttagtagtagtag

SEQ ID NO: 60358 - DNA, 1741 bp, Homo sapiens
  misc_feature (20)..(20): n is a, c, g, or t
ctaggtcgagcctcggtgantcggacgagtgatggctgcctactttggcaagatcagcgaggaaaacatcaagaacaattttgtgctcatatatgagctgctggatgagattctagactttggctacccacagaattccgagacaggcgcgctgaaaaccttcatcacgcagcagggcatcaagagtcagcatcagacaaaagaagagcagtcacagatcaccagccaggtaactgggcagattggctggcggcgagagggtatcaagtatcgtcggaatgagctcttcctggatgtgctggagagtgtgaacctgctcatgtccccacaagggcaggtgctgagtgcccatgtgtcgggccgggtggtgatgaagagctacctgagtggcatgcctgaatgcaagtttgggatgaatgacaagattgttattgaaaagcagggcaaaggcacagctgatgaaacaagcaagagcgggaagcaatcaattgccattgatgactgcaccttccaccagtgtgtgcgactcagcaagtttgactctgaacgcagcatcagctttatcccgccagatggagagtttgagcttatgaggtatcgcacaaccaaggacatcatccttcccttccgggtgatcccgctagtgcgagaagtgggacgcaccaaactggaggtcaaggtggtcatcaagtccaactttaaaccctcactgctggctcagaagatcgaggtgaggatcccaaccccactgaacacaagcggggtgcaggtgatctgcatgaaggggaaggccaagtacaaggccagcgagaatgccatcgtgtggaagatcaagcgcatggcaggcatgaaggaatcgcagatcagcgcagagattgagcttctgcctaccaacgacaagaagaaatgggctcgaccccccatttccatgaactttgaggtgccattcgcgccctctggcctcaaggtgcgctacttgaaggtgtttgaaccgaagctgaactacagcgaccatgatgtcatcaaatgggtgcgctacattggccgcagtggcatttatgaaactcgctgctagctgccactaggcagctagcccacctccccagccaccctcctccacaggtccaggtgccgctccctcccccaccacacatcagtgtctcctccctcctgctttgctgccttccctttgcaccagcccgagtctaggtctgggccaagcacattacaagtgggaccggtggagcagcccctgggctccctgggcaggggagttctgaggctcctgctctcccatccacctgtctgtcctggcctaatgccaggctctgagttctgtgaccaaagccaggtgggttccctttccttcccacccctgtggccacagctctggagtgggagggttggttgcccctcacctcagagctcccccaaaggccagtaatggatccccggcctcagtccctactctgctttgggatagtgtgagcttcattttgtacacgtgtgacttcgtccagttacaaacccaataaactctgtagagtggagttgctggcttagtgttgatgtgggagctacatggggagggaactggtgttgctctccgtgcagttttctgtactgaatactctaaaggctctttccttgtcttgtcccagttaggcccctcctgggccatccaagcccttatccttgtgggttctgggcccaggtttcctggctcctcttagaaagcctc

SEQ ID NO: 60359 - DNA, 1511 bp, Homo sapiens
  misc_feature (20)..(20): n is a, c, g, or t
ctaggtcgagcctcggtgantcggacgagtgatggctgcctactttggcaagatcagcgaggaaaacatcaagaacaattttgtgctcatatatgagctgctggatgagattctagactttggctacccacagaattccgagacaggcgcgctgaaaaccttcatcacgcagcagggcatcaagagtcagcatcagacaaaagaagagcagtcacagatcaccagccaggtaactgggcagattggctggcggcgagagggtatcaagtatcgtcggaatgagctcttcctggatgtgctggagagtgtgaacctgctcatgtccccacaagggcaggtgctgagtgcccatgtgtcgggccgggtggtgatgaagagctacctgagtggcatgcctgaatgcaagtttgggatgaatgacaagattgttattgacgggaagcaatcaattgccattgatgactgcaccttccaccagtgtgtgcgactcagcaagtttgactctgaacgcagcatcagctttatcccgccagatggagagtttgagcttatgaggtatcgcacaaccaaggacatcatccttcccttccgggtgatcccgctagtgcgagaagtgggacgcaccaaactggaggtcaaggtggtcatcaagtccaactttaaaccctcactgctggctcagaagatcgaggtgaggatcccaaccccactgaacacaagcggggtgcaggtgatctgcatgaaggggaaggccaagtacaaggccagcgagaatgccatcgtgtggaagatcaagcgcatggcaggcatgaaggaatcgcagatcagcgcagagattgagcttctgcctaccaacgacaagaagaaatgggctcgaccccccatttccatgaactttgaggtgccattcgcgccctctggcctcaaggtgcgctacttgaaggtgtttgaaccgaagctgaactacagcgaccatgatgtcatcaaatgggtgcgctacattggccgcagtggcatttatgaaactcgctgctagctgccactaggcagctagcccacctccccagccaccctcctccacaggtccaggtgccgctccctcccccaccacacatcagtgtctcctccctcctgctttgctgccttccctttgcaccagcccgagtctaggtctgggccaagcacattacaagtgggaccggtggagcagcccctgggctccctgggcaggggagttctgaggctcctgctctcccatccacctgtctgtcctggcctaatgccaggctctgagttctgtgaccaaagccaggtgggttccctttccttcccacccctgtggccacagctctggagtgggagggttggttgcccctcacctcagagctcccccaaaggccagtaatggatccccggcctcagtccctactctgctttgggatagtgtgagcttcattttgtacacgtgtgacttcgtccagttacaaacccaataaactctgtagagtgga

SEQ ID NO: 60360 - DNA, 2164 bp, Homo sapiens
  misc_feature (20)..(20): n is a, c, g, or t
ctaggtcgagcctcggtgantcggacgagtgatggctgcctactttggcaagatcagcgaggaaaacatcaagaacaattttgtgctcatatatgagctgctggatgagattctagactttggctacccacagaattccgagacaggcgcgctgaaaaccttcatcacgcagcagggcatcaagagtcagcatcagacaaaagaagagcagtcacagatcaccagccaggtaactgggcagattggctggcggcgagagggtatcaagtatcgtcggaatgagctcttcctggatgtgctggagagtgtgaacctgctcatgtccccacaagggcaggtgctgagtgcccatgtgtcgggccgggtggtgatgaagagctacctgagtggcatgcctgaatgcaagtttgggatgaatgacaagattgttattgaaaagcagggcaaaggcacagctgatgaaacaagcaagagcgggaagcaatcaattgccattgatgactgcaccttccaccagtgtgtgcgactcagcaagtttgactctgaacgcagcatcagctttatcccgccagatggagagtttgagcttatgaggtatcgcacaaccaaggacatcatccttcccttccgggtgatcccgctagtgcgagaagtgggacgcaccaaactggaggtcaaggtggtcatcaagtccaactttaaaccctcactgctggctcagaagatcgaggtgaggatcccaaccccactgaacacaagcggggtgcaggtgatctgcatgaaggggaaggccaagtacaaggccagcgagaatgccatcgtgtggaagatcaagcgcatggcaggcatgaaggaatcgcagatcagcgcagagattgagcttctgcctaccaacgacaagaagaaatgggctcgaccccccatttccatgaactttgagggtatggcagaggaggggcctagagtcatgccagggtatgctggaagacctcttagagatcattccgataaaccgctgcaccttagaggtgaggaaactgaggcctagaaagaagaactggctttaattcatagatccattcttcccctttcaagcctcttagtagaaattactatttgtgatgaggcaaatcttttacttctctcggcttgtcctaacacagttctttcaaaaaacttagattgtttaaatgccaggtaagacacaaagtttacttacagacaggataatgggctgactttgctttgcgcatgttagacataattttctccaccttatttttaagttcataatattgagcaggataagtatgttctaaagcagttctttggttgctgtctcctgctgattaaaggaactgattcaaggtgtcacaggtagggctttcttctttagtcacctcttagaaggtcccacgccgccccagcttctttcaggaccccagccatacaaacacctgtagtagcgatgaagtagggcagggcaacgggacttcccagaggagagcggctgtaagaggaaggccacatttctaactagctctccttgcccaggtgccattcgcgccctctggcctcaaggtgcgctacttgaaggtgtttgaaccgaagctgaactacagcgaccatgatgtcatcaaatgggtgcgctacattggccgcagtggcatttatgaaactcgctgctagctgccactaggcagctagcccacctccccagccaccctcctccacaggtccaggtgccgctccctcccccaccacacatcagtgtctcctccctcctgctttgctgccttccctttgcaccagcccgagtctaggtctgggccaagcacattacaagtgggaccggtggagcagcccctgggctccctgggcaggggagttctgaggctcctgctctcccatccacctgtctgtcctggcctaatgccaggctctgagttctgtgaccaaagccaggtgggttccctttccttcccacccctgtggccacagctctggagtgggagggttggttgcccctcacctcagagctcccccaaaggccagtaatggatccccggcctcagtccctactctgctttgggatagtgtgagcttcattttgtacacgtgtgacttcgtccagttacaaacccaataaactctgtagagtgga

SEQ ID NO: 60361 - DNA, 2672 bp, Homo sapiens
  misc_feature (20)..(20): n is a, c, g, or t
ctaggtcgagcctcggtgantcggacgagtgatggctgcctactttggcaagatcagcgaggaaaacatcaagaacaattttgtgctcatatatgagctgctggatgagattctagactttggctacccacagaattccgagacaggcgcgctgaaaaccttcatcacgcagcagggcatcaagagtcagcatcagacaaaagaagagcagtcacagatcaccagccaggtaactgggcagattggctggcggcgagagggtatcaagtatcgtcggaatgagctcttcctggatgtgctggagagtgtgaacctgctcatgtccccacaagggcaggtgctgagtgcccatgtgtcgggccgggtggtgatgaagagctacctgagtggcatgcctgaatgcaagtttgggatgaatgacaagattgttattgaaaagcagggcaaaggcacagctgatgaaacaagcaagagcgggaagcaatcaattgccattgatgactgcaccttccaccagtgtgtgcgactcagcaagtttgactctgaacgcagcatcagctttatcccgccagatggagagtttgagcttatgaggtatcgcacaaccaaggacatcatccttcccttccgggtgatcccgctagtgcgagaagtgggacgcaccaaactggaggtcaaggtggtcatcaagtccaactttaaaccctcactgctggctcagaagatcgaggtgaggatcccaaccccactgaacacaagcggggtgcaggtgatctgcatgaaggggaaggccaagtacaaggccagcgagaatgccatcgtgtggaagtgagtctttccttcattaggccacagcagggctcaagatcccagtataccctcttgttttcagctttgatccttctgaatgaggggcaggggagtgtgcctgtttgcttttctaggagcctctgcttgtactgtcagtctttatacctccatgtgagtatgtacacgcctgcatttgggttcatgcacgtgcttattttttaagatgctttggcatttccctttgtaatgtatacattacaaagggaatacattgcctttgtaatgtatctgtgaagcagacaaagcaaacgatagcatgcccaagtgtctaggcagaaactgcatcctgttgttctaaagaagtagacccaagtttccatagcaagtggttagcagggtcctgaccacttctccttgttctggcacctcctgcaagctcctgggctctctccttgcttgaaatgggcaactgcccttgaaactcctccaagccccaatgggctgcccattgtccctgtgttcccaggatcaagcgcatggcaggcatgaaggaatcgcagatcagcgcagagattgagcttctgcctaccaacgacaagaagaaatgggctcgaccccccatttccatgaactttgagggtatggcagaggaggggcctagagtcatgccagggtatgctggaagacctcttagagatcattccgataaaccgctgcaccttagaggtgaggaaactgaggcctagaaagaagaactggctttaattcatagatccattcttcccctttcaagcctcttagtagaaattactatttgtgatgaggcaaatcttttacttctctcggcttgtcctaacacagttctttcaaaaaacttagattgtttaaatgccaggtaagacacaaagtttacttacagacaggataatgggctgactttgctttgcgcatgttagacataattttctccaccttatttttaagttcataatattgagcaggataagtatgttctaaagcagttctttggttgctgtctcctgctgattaaaggaactgattcaaggtgtcacaggtagggctttcttctttagtcacctcttagaaggtcccacgccgccccagcttctttcaggaccccagccatacaaacacctgtagtagcgatgaagtagggcagggcaacgggacttcccagaggagagcggctgtaagaggaaggccacatttctaactagctctccttgcccaggtgccattcgcgccctctggcctcaaggtgcgctacttgaaggtgtttgaaccgaagctgaactacagcgaccatgatgtcatcaaatgggtgcgctacattggccgcagtggcatttatgaaactcgctgctagctgccactaggcagctagcccacctccccagccaccctcctccacaggtccaggtgccgctccctcccccaccacacatcagtgtctcctccctcctgctttgctgccttccctttgcaccagcccgagtctaggtctgggccaagcacattacaagtgggaccggtggagcagcccctgggctccctgggcaggggagttctgaggctcctgctctcccatccacctgtctgtcctggcctaatgccaggctctgagttctgtgaccaaagccaggtgggttccctttccttcccacccctgtggccacagctctggagtgggagggttggttgcccctcacctcagagctcccccaaaggccagtaatggatccccggcctcagtccctactctgctttgggatagtgtgagcttcattttgtacacgtgtgacttcgtccagttacaaacccaataaactctgtagagtgga

SEQ ID NO: 60362 - DNA, 1430 bp, Homo sapiens
  misc_feature (20)..(20): n is a, c, g, or t
ctaggtcgagcctcggtgantcggacgagtgatggctgcctactttggcaagatcagcgaggaaaacatcaagaacaattttgtgctcatatatgagctgctggatgagattctagactttggctacccacagaattccgagacaggcgcgctgaaaaccttcatcacgcagcagggcatcaagagtcagcatcagacaaaagaagagcagtcacagatcaccagccaggtaactgggcagattggctggcggcgagagggtatcaagtatcgtcggaatgagctcttcctggatgtgctggagagtgtgaacctgctcatgtccccacaagggcaggtgctgagtgcccatgtgtcgggccgggtggtgatgaagagctacctgagtggcatgcctgaatgcaagtttgggatgaatgacaagattgttattgaaaagcagggcaaaggcacagctgatgaaacaagcaagaggtatcgcacaaccaaggacatcatccttcccttccgggtgatcccgctagtgcgagaagtgggacgcaccaaactggaggtcaaggtggtcatcaagtccaactttaaaccctcactgctggctcagaagatcgaggtgaggatcccaaccccactgaacacaagcggggtgcaggtgatctgcatgaaggggaaggccaagtacaaggccagcgagaatgccatcgtgtggaagatcaagcgcatggcaggcatgaaggaatcgcagatcagcgcagagattgagcttctgcctaccaacgacaagaagaaatgggctcgaccccccatttccatgaactttgaggtgccattcgcgccctctggcctcaaggtgcgctacttgaaggtgtttgaaccgaagctgaactacagcgaccatgatgtcatcaaatgggtgcgctacattggccgcagtggcatttatgaaactcgctgctagctgccactaggcagctagcccacctccccagccaccctcctccacaggtccaggtgccgctccctcccccaccacacatcagtgtctcctccctcctgctttgctgccttccctttgcaccagcccgagtctaggtctgggccaagcacattacaagtgggaccggtggagcagcccctgggctccctgggcaggggagttctgaggctcctgctctcccatccacctgtctgtcctggcctaatgccaggctctgagttctgtgaccaaagccaggtgggttccctttccttcccacccctgtggccacagctctggagtgggagggttggttgcccctcacctcagagctcccccaaaggccagtaatggatccccggcctcagtccctactctgctttgggatagtgtgagcttcattttgtacacgtgtgacttcgtccagttacaaacccaataaactctgtagagtgga

SEQ ID NO: 60363 - DNA, 2781 bp, Homo sapiens
  misc_feature (20)..(20): n is a, c, g, or t
ctaggtcgagcctcggtgantcggacgagtgatggctgcctactttggcaagatcagcgaggaaaacatcaagaacaattttgtgctcatatatgagctgctggatgagattctagactttggctacccacagaattccgagacaggcgcgctgaaaaccttcatcacgcagcagggcatcaagagtcagcatcagacaaaagaagagcagtcacagatcaccagccaggtaactgggcagattggctggcggcgagagggtatcaagtatcgtcggaatgagctcttcctggatgtgctggagagtgtgaacctgctcatgtccccacaagggcaggtgctgagtgcccatgtgtcgggccgggtggtgatgaagagctacctgagtggcatgcctgaatgcaagtttgggatgaatgacaagattgttattgaaaagcagggcaaaggcacagctgatgaaacaagcaagagcgggaagcaatcaattgccattgatgactgcaccttccaccagtgtgtgcgactcagcaagtttgactctgaacgcagcatcagctttatcccgccagatggagagtttgagcttatgaggtatcgcacaaccaaggacatcatccttcccttccgggtgatcccgctagtgcgagaagtgggacgcaccaaactggaggtcaaggtggtcatcaagtccaactttaaaccctcactgctggctcagaagatcgagtcgaggtgaaggacagggggctcaaggaggaggaagaacttgtccctaggaataaaggtagctgatgtcacagcttgacagagctccctgacaggtgtgtcacttctaggtgaggatcccaaccccactgaacacaagcggggtgcaggtgatctgcatgaaggggaaggccaagtacaaggccagcgagaatgccatcgtgtggaagtgagtctttccttcattaggccacagcagggctcaagatcccagtataccctcttgttttcagctttgatccttctgaatgaggggcaggggagtgtgcctgtttgcttttctaggagcctctgcttgtactgtcagtctttatacctccatgtgagtatgtacacgcctgcatttgggttcatgcacgtgcttattttttaagatgctttggcatttccctttgtaatgtatacattacaaagggaatacattgcctttgtaatgtatctgtgaagcagacaaagcaaacgatagcatgcccaagtgtctaggcagaaactgcatcctgttgttctaaagaagtagacccaagtttccatagcaagtggttagcagggtcctgaccacttctccttgttctggcacctcctgcaagctcctgggctctctccttgcttgaaatgggcaactgcccttgaaactcctccaagccccaatgggctgcccattgtccctgtgttcccaggatcaagcgcatggcaggcatgaaggaatcgcagatcagcgcagagattgagcttctgcctaccaacgacaagaagaaatgggctcgaccccccatttccatgaactttgagggtatggcagaggaggggcctagagtcatgccagggtatgctggaagacctcttagagatcattccgataaaccgctgcaccttagaggtgaggaaactgaggcctagaaagaagaactggctttaattcatagatccattcttcccctttcaagcctcttagtagaaattactatttgtgatgaggcaaatcttttacttctctcggcttgtcctaacacagttctttcaaaaaacttagattgtttaaatgccaggtaagacacaaagtttacttacagacaggataatgggctgactttgctttgcgcatgttagacataattttctccaccttatttttaagttcataatattgagcaggataagtatgttctaaagcagttctttggttgctgtctcctgctgattaaaggaactgattcaaggtgtcacaggtagggctttcttctttagtcacctcttagaaggtcccacgccgccccagcttctttcaggaccccagccatacaaacacctgtagtagcgatgaagtagggcagggcaacgggacttcccagaggagagcggctgtaagaggaaggccacatttctaactagctctccttgcccaggtgccattcgcgccctctggcctcaaggtgcgctacttgaaggtgtttgaaccgaagctgaactacagcgaccatgatgtcatcaaatgggtgcgctacattggccgcagtggcatttatgaaactcgctgctagctgccactaggcagctagcccacctccccagccaccctcctccacaggtccaggtgccgctccctcccccaccacacatcagtgtctcctccctcctgctttgctgccttccctttgcaccagcccgagtctaggtctgggccaagcacattacaagtgggaccggtggagcagcccctgggctccctgggcaggggagttctgaggctcctgctctcccatccacctgtctgtcctggcctaatgccaggctctgagttctgtgaccaaagccaggtgggttccctttccttcccacccctgtggccacagctctggagtgggagggttggttgcccctcacctcagagctcccccaaaggccagtaatggatccccggcctcagtccctactctgctttgggatagtgtgagcttcattttgtacacgtgtgacttcgtccagttacaaacccaataaactctgtagagtgga

SEQ ID NO: 60364 - DNA, 1264 bp, Homo sapiens
  misc_feature (20)..(20): n is a, c, g, or t
ctaggtcgagcctcggtgantcggacgagtgatggctgcctactttggcaagatcagcgaggaaaacatcaagaacaattttgtgctcatatatgagctgctggatgagattctagactttggctacccacagaattccgagacaggcgcgctgaaaaccttcatcacgcagcagggcatcaagagtcagcatcagacaaaagaagagcagtcacagatcaccagccaggtaactgggcagattggctggcggcgagagggtatcaagtatcgtcggaatgagctcttcctggatgtgctggagagtgtgaacctgctcatgtccccacaagggcaggtgctgagtgcccatgtgtcgggccgggtggtgatgaagagctacctgagtggcatgcctgaatgcaagtttgggatgaatgacaagattgttattgaaaagcagggcaaaggcacagctgatgaaacaagcaagagcgggaagcaatcaattgccattgatgactgcaccttccaccagtgtgtgcgactcagcaagtttgactctgaacgcagcatcagctttatcccgccagatggagagtttgagcttatgaggtatcgcacaaccaaggacatcatccttcccttccgggtgatcccgctagtgcgagaagtgggacgcaccaaactggaggtcaaggtggtcatcaagtccaactttaaaccctcactgctggctcagaagatcgaggtgaggatcccaaccccactgaacacaagcggggtgcaggtgatctgcatgaaggggaaggccaagtacaaggccagcgagaatgccatcgtgtggaagatcaagcgcatggcaggcatgaaggaatcgcagatcagcgcagagattgagcttctgcctaccaacgacaagaagaaatgggctcgaccccccatttccatgaactttgaggtgccattcgcgccctctggcctcaaggtgcgctacttgaaggtgtttgaaccgaagctgaactacagcgaccatgatgtcatcaaatgggtgcgctacattggccgcagtggcatttatgaaactcgctgctagctgccactaggcagctagcccacctccccagccaccctcctccacaggtccaggtgccgctccctcccccaccacacatcagtgtctcctccctcctgctttgctgccttgctttgggatagtgtgagcttcattttgtacacgtgtgacttcgtccagttacaaacccaataaactctgtagagtgga

SEQ ID NO: 60365 - DNA, 1096 bp, Homo sapiens
  misc_feature (20)..(20): n is a, c, g, or t
ctaggtcgagcctcggtgantcggacgagtgatggctgcctactttggcaagatcagcgaggaaaacatcaagaacaattttgtgctcatatatgagctgctggatgagattctagactttggctacccacagaattccgagacaggcgcgctgaaaaccttcatcacgcagcagggcatcaagagtcagcatcagacaaaagaagagcagtcacagatcaccagccaggtaactgggcagattggctggcggcgagagggtatcaatcgaggtgagtgaggatcccaaccccactgaacacaagcggggtgcaggtgatctgcatgaaggggaaggccaagtacaaggccagcgagaatgccatcgtgtggaagatcaagcgcatggcaggcatgaaggaatcgcagatcagcgcagagattgagcttctgcctaccaacgacaagaagaaatgggctcgaccccccatttccatgaactttgaggtgccattcgcgccctctggcctcaaggtgcgctacttgaaggtgtttgaaccgaagctgaactacagcgaccatgatgtcatcaaatgggtgcgctacattggccgcagtggcatttatgaaactcgctgctagctgccactaggcagctagcccacctccccagccaccctcctccacaggtccaggtgccgctccctcccccaccacacatcagtgtctcctccctcctgctttgctgccttccctttgcaccagcccgagtctaggtctgggccaagcacattacaagtgggaccggtggagcagcccctgggctccctgggcaggggagttctgaggctcctgctctcccatccacctgtctgtcctggcctaatgccaggctctgagttctgtgaccaaagccaggtgggttccctttccttcccacccctgtggccacagctctggagtgggagggttggttgcccctcacctcagagctcccccaaaggccagtaatggatccccggcctcagtccctactctgctttgggatagtgtgagcttcattttgtacacgtgtgacttcgtccagttacaaacccaataaactctgtagagtgga

SEQ ID NO: 60366 - DNA, 1066 bp, Homo sapiens
  misc_feature (20)..(20): n is a, c, g, or t
ctaggtcgagcctcggtgantcggacgagtgatggctgcctactttggcaagatcagcgaggaaaacatcaagaacaattttgtgctcatatatgagctgctggatgagattctagactttggctacccacagaattccgagacaggcgcgctgaaaaccttcatcacgcagcagggcatcaagagtcagcatcagacaaaagaagagcagtcacagatcaccagccaggtaactgggcagattggctggcggcgagagggtatcaagtatcgtcggaatgagctcttcctggatgtgctggagagtgtgaacctgctcatgtccccacaagggcaggtgctgagtgcccatgtgtcgggccgggtggtgatgaagagctacctgagtggcatgcctgaatgcaagtttgggatgaatgacaagattgttattgaaaagcagggcaaaggcacagctgatgaaacaagcaagagcgggaagcaatcaattgccattgatgactgcaccttccaccagtgtgtgcgactcagcaagtttgactctgaacgcagcatcagctttatcccgccagatggagagtttgagcttatgaggtatcgcacaaccaaggacatcatccttcccttccgggtgatcccgctagtgcgagaagtgggacgcaccaaactggaggtcaaggtggtcatcaagtccaactttaaaccctcactgctggctcagaagatcgaggtgaggatcccaaccccactgaacacaagcggggtgcaggtgatctgcatgaaggggaaggccaagtacaaggccagcgagaatgccatcgtgtggaagatcaagcgcatggcaggcatgaaggaatcgcagatcagcgcagagattgagcttctgcctaccaacgacaagaagaaatgggctcgaccccccatttccatgaactttgaggtgccattcgcgccctctggcctcaaggtgcgctacttgaaggtgtttgaaccgaagctgaactacagcgaccatgatgtcatcaaatggccactgcggccaatgtagcgcacccatttgatgcgg

SEQ ID NO: 60367 - DNA, 1101 bp, Homo sapiens
  misc_feature (20)..(20): n is a, c, g, or t
ctaggtcgagcctcggtgantcggacgagtgatggctgcctactttggcaagatcagcgaggaaaacatcaagaacaattttgtgctcatatatgagctgctggatgagattctagactttggctacccacagaattccgagacaggcgcgctgaaaaccttcatcacgcagcagggcatcaagagtcagcatcagacaaaagaagagcagtcacagatcaccagccaggtaactgggcagattggctggcggcgagagggtatcaagtatcgtcggaatgagctcttcctggatgtgctggagagtgtgaacctgctcatgtccccacaagggcaggtgctgagtgcccatgtgtcgggccgggtggtgatgaagagctacctgagtggcatgcctgaatgcaagtttgggatgaatgacaagattgttattgaaaagcagggcaaaggcacagctgatgaaacaagcaagagcgggaagcaatcaattgccattgatgactgcaccttccaccagtgtgtgcgactcagcaagtttgactctgaacgcagcatcagctttatcccgccagatggagagtttgagcttatgaggtatcgcacaaccaaggacatcatccttcccttccgggtgatcccgctagtgcgagaagtgggacgcaccaaactggaggtcaaggtggtcatcaagtccaactttaaaccctcactgctggctcagaagatcgaggtgaggatcccaaccccactgaacacaagcggggtgcaggtgatctgcatgaaggggaaggccaagtacaaggccagcgagaatgccatcgtgtggaagatcaagcgcatggcaggcatgaaggaatcgcagatcagcgcagagattgagcttctgcctaccaacgacaagaagaaatgggctcgaccccccatttccatgaactttgaggtgccattcgcgccctctggcctcaaggtgcgctacttgaaggtgtttgaaccgaagctgaactacagcgaccatgatgtcatcaaatggcccagtccgcagttggtaaaatgaatcagtagccagcctcgcgctatgcttctagtacatcgccgctgctg

SEQ ID NO: 60368 - DNA, 1048 bp, Homo sapiens
  misc_feature (20)..(20): n is a, c, g, or t
  misc_feature (945)..(945): n is a, c, g, or t
ctaggtcgagcctcggtgantcggacgagtgatggctgcctactttggcaagatcagcgaggaaaacatcaagaacaattttgtgctcatatatgagctgctggatgagattctagactttggctacccacagaattccgagacaggcgcgctgaaaaccttcatcacgcagcagggcatcaagagtcagcatcagacaaaagaagagcagtcacagatcaccagccaggtaactgggcagattggctggcggcgagagggtatcaagtatcgtcggaatgagctcttcctggatgtgctggagagtgtgaacctgctcatgtccccacaagggcaggtgctgagtgcccatgtgtcgggccgggtggtgatgaagagctacctgagtggcatgcctgaatgcaagtttgggatgaatgacaagattgttattgaaaagcagggcaaaggcacagctgatgaaacaagcaagagcgggaagcaatcaattgccattgatgactgcaccttccaccagtgtgtgcgactcagcaagtttgactctgaacgcagcatcagctttatcccgccagatggagagtttgagcttatgaggtatcgcacaaccaaggacatcatccttcccttccgggtgatcccgctagtgcgagaagtgggacgcaccaaactggaggtcaaggtggtcatcaagtccaactttaaaccctcactgctggctcagaagatcgaggtgaggatcccaaccccactgaacacaagcggggtgcaggtgatctgcatgaaggggaaggccaagtacaaggccagcgagaatgccatcgtgtggaagatcaagcgcatggcaggcatgaaggaatcgcagatcagcgcagagattgagcttctgcctaccaacgacaagaagaaatgggctcgaccccccatttccatgaactttgagcaggntcaagaagcatcctgagttcttgcctcctccttttggggacacccaaaacactgcttgtgagaaggaagatggaaggtaagttctgtcgttctttccccaaat

SEQ ID NO: 60369 - DNA, 1049 bp, Homo sapiens
  misc_feature (20)..(20): n is a, c, g, or t
ctaggtcgagcctcggtgantcggacgagtgatggctgcctactttggcaagatcagcgaggaaaacatcaagaacaattttgtgctcatatatgagctgctggatgagattctagactttggctacccacagaattccgagacaggcgcgctgaaaaccttcatcacgcagcagggcatcaagagtcagcatcagacaaaagaagagcagtcacagatcaccagccaggtaactgggcagattggctggcggcgagagggtatcaagtatcgtcggaatgagctcttcctggatgtgctggagagtgtgaacctgctcatgtccccacaagggcaggtgctgagtgcccatgtgtcgggccgggtggtgatgaagagctacctgagtggcatgcctgaatgcaagtttgggatgaatgacaagattgttattgaaaagcagggcaaaggcacagctgatgaaacaagcaagagcgggaagcaatcaattgccattgatgactgcaccttccaccagtgtgtgcgactcagcaagtttgactctgaacgcagcatcagctttatcccgccagatggagagtttgagcttatgaggtatcgcacaaccaaggacatcatccttcccttccgggtgatcccgctagtgcgagaagtgggacgcaccaaactggaggtcaaggtggtcatcaagtccaactttaaaccctcactgctggctcagaagatcgaggtgaggatcccaaccccactgaacacaagcggggtgcaggtgatctgcatgaaggggaaggccaagtacaaggccagcgagaatgccatcgtgtggaagatcaagcgcatggcaggcatgaaggaatcgcagatcagcgcagagattgagcttctgcctaccaacgacaagaagaaatgggccaggggaggagaatggagggagtcaggaggctggggaagagaggggaggcacccctaccagacacagacagatgcagctgcaccatggtcacagggctgctggccacgtgtagctggcctggagaaagcgcaggtgg

SEQ ID NO: 60370 - DNA, 1688 bp, Homo sapiens
  misc_feature (20)..(20): n is a, c, g, or t
ctaggtcgagcctcggtgantcggacgagtgatggctgcctactttggcaagatcagcgaggaaaacatcaagaacaattttgtgctcatatatgagctgctggatgagattctagactttggctacccacagaattccgagacaggcgcgctgaaaaccttcatcacgcagcagggcatcaagagtcagcatcagacaaaagaagagcagtcacagatcaccagccaggtaactgggcagattggctggcggcgagagggtatcaagtatcgtcggaatgagctcttcctggatgtgctggagagtgtgaacctgctcatgtccccacaagggcaggtgctgagtgcccatgtgtcgggccgggtggtgatgaagagctacctgagtggcatgcctgaatgcaagtttgggatgaatgacaagattgttattgaaaagcagggcaaaggcacagctgatgaaacaagcaagagcgggaagcaatcaattgccattgatgactgcaccttccaccagtgtgtgcgactcagcaagtttgactctgaacgcagcatcagctttatcccgccagatggagagtttgagcttatgaggtatcgcacaaccaaggacatcatccttcccttccgggtgatcccgctagtgcgagaagtgggacgcaccaaactggaggtcaaggtggtcatcaagtccaactttaaaccctcactgctggctcagaagatcgaggtgaggatcccaaccccactgaacacaagcggggtgcaggtgatctgcatgaaggggaaggccaagtacaaggccagcgagaatgccatcgtgtggaagtgagtctttccttcattaggccacagcagggctcaagatcccagtataccctcttgttttcagctttgatccttctgaatgaggggcaggggagtgtgcctgtttgcttttctaggagcctctgcttgtactgtcagtctttatacctccatgtgagtatgtacacgcctgcatttgggttcatgcacgtgcttattttttaagatgctttggcatttccctttgtaatgtatacattacaaagggaatacattgcctttgtaatgtatctgtgaagcagacaaagcaaacgatagcatgcccaagtgtctaggcagaaactgcatcctgttgttctaaagaagtagacccaagtttccatagcaagtggttagcagggtcctgaccacttctccttgttctggcacctcctgcaagctcctgggctctctccttgcttgaaatgggcaactgcccttgaaactcctccaagccccaatgggctgcccattgtccctgtgttcccaggatcaagcgcatggcaggcatgaaggaatcgcagatcagcgcagagattgagcttctgcctaccaacgacaagaagaaatgggctcgaccccccatttccatgaactttgagggtatggcagaggaggggcctagagtcatgccagggtatgctggaagacctcttagagatcattccgataaaccgctgcaccttagaggtgaggaaactgaggcctagaaagaagaactggctttaattcatagatccattcttcccctttcaagcctcttagtagaaattactatttgtgatgaggcaaatcttttacttctctcggcgtctaccttgtctttctgggataacacggtc

SEQ ID NO: 60371 - DNA, 1014 bp, Homo sapiens
  misc_feature (20)..(20): n is a, c, g, or t
ctaggtcgagcctcggtgantcggacgagtgatggctgcctactttggcaagatcagcgaggaaaacatcaagaacaattttgtgctcatatatgagctgctggatgagattctagactttggctacccacagaattccgagacaggcgcgctgaaaaccttcatcacgcagcagggcatcaagagtcagcatcagacaaaagaagagcagtcacagatcaccagccaggtaactgggcagattggctggcggcgagagggtatcaagtatcgtcggaatgagctcttcctggatgtgctggagagtgtgaacctgctcatgtccccacaagggcaggtgctgagtgcccatgtgtcgggccgggtggtgatgaagagctacctgagtggcatgcctgaatgcaagtttgggatgaatgacaagattgttattgaaaagcagggcaaaggcacagctgatgaaacaagcaagagcgggaagcaatcaattgccattgatgactgcaccttccaccagtgtgtgcgactcagcaagtttgactctgaacgcagcatcagctttatcccgccagatggagagtttgagcttatgaggtatcgcacaaccaaggacatcatccttcccttccgggtgatcccgctagtgcgagaagtgggacgcaccaaactggaggtcaaggtggtcatcaagtccaactttaaaccctcactgctggctcagaagatcgagtcgaggtgatcccaacccatgaacacagcggggtgcggtgatctgctgaggggaggccagttacagcagcgagatgcatcggtgggagatcaagcgctgcagctgagatcgaaacaggcaagagggttgctacaagaagagaaagggtcaccccttcggatgggggctcgcctggcaagggctgagggggcagggcacggccaggttcaacgggcggggcaacacgggagggaccccccacgggggccacaactggcaccgagagctggcagcagggcacggaa

SEQ ID NO: 60372 - DNA, 806 bp, Homo sapiens
  misc_feature (20)..(20): n is a, c, g, or t
ctaggtcgagcctcggtgantcggacgagtgatggctgcctactttggcaagatcagcgaggaaaacatcaagaacaattttgtgctcatatatgagctgctggatgagattctagactttggctacccacagaattccgagacaggcgcgctgaaaaccttcatcacgcagcagggcatcaagagtcagcatcagacaaaagaagagcagtcacagatcaccagccaggtaactgggcagattggctggcggcgagagggtatcaagtatcgtcggaatgagctcttcctggatgtgctggagagtgtgaacctgctcatgtccccacaagggcaggtgctgagtgcccatgtgtcgggccgggtggtgatgaagagctacctgagtggcatgcctgaatgcaagtttgggatgaatgacaagattgttattgaaaagcagggcaaaggcacagctgatgaaacaagcaagagcgggaagcaatcaattgccattgatgactgcaccttccaccagtgtgtgcgactcagcaagtttgactctgaacgcagcatcagctttatcccgccagatggagagtttgagcttatgaggtatcgcacaaccaaggacatcatccttcccttccgggtgatcccgctagtgcgagaagtgggacgcaccaaactggaggtcaaggtggtcatcaagtccaactttaaaccctcactgctggctcagaagatcgagtcgaggtgatccccaccccactgacacacgcggggagtgccgatgatagcgagggacctctagaacagccacccac

SEQ ID NO: 60373 - DNA, 862 bp, Homo sapiens
  misc_feature (20)..(20): n is a, c, g, or t
ctaggtcgagcctcggtgantcggacgagtgatggctgcctactttggcaagatcagcgaggaaaacatcaagaacaattttgtgctcatatatgagctgctggatgagattctagactttggctacccacagaattccgagacaggcgcgctgaaaaccttcatcacgcagcagggcatcaagagtcagcatcagacaaaagaagagcagtcacagatcaccagccaggtaactgggcagattggctggcggcgagagggtatcaagtatcgtcggaatgagctcttcctggatgtgctggagagtgtgaacctgctcatgtccccacaagggcaggtgctgagtgcccatgtgtcgggccgggtggtgatgaagagctacctgagtggcatgcctgaatgcaagtttgggatgaatgacaagattgttattgaaaagcagggcaaaggcacagctgatgaaacaagcaagagcgggaagcaatcaattgccattgatgactgcaccttccaccagtgtgtgcgactcagcaagtttgactctgaacgcagcatcagctttatcccgccagatggagagtttgagcttatgaggtatcgcacaaccaaggacatcatccttcccttccgggtgatcccgctagtgcgagaagtgggacgcaccaaactggaggtcaaggtggtcatcaagtccaactttaaaccctcactgctggctcagaagatcgagctcagagctcccccaaaggccagtaatggatccccggcctcagtccctactctgctttgggatagtgtgagcttcattttgtacacgtgtgacttcgtccagttacaaacccaataaactctgtagagtgga

SEQ ID NO: 60374 - DNA, 883 bp, Homo sapiens
  misc_feature (20)..(20): n is a, c, g, or t
  misc_feature (829)..(829): n is a, c, g, or t
ctaggtcgagcctcggtgantcggacgagtgatggctgcctactttggcaagatcagcgaggaaaacatcaagaacaattttgtgctcatatatgagctgctggatgagattctagactttggctacccacagaattccgagacaggcgcgctgaaaaccttcatcacgcagcagggcatcaagagtcagcatcagacaaaagaagagcagtcacagatcaccagccaggtaactgggcagattggctggcggcgagagggtatcaagtatcgtcggaatgagctcttcctggatgtgctggagagtgtgaacctgctcatgtccccacaagggcaggtgctgagtgcccatgtgtcgggccgggtggtgatgaagagctacctgagtggcatgcctgaatgcaagtttgggatgaatgacaagattgttattgaaaagcagggcaaaggcacagctgatgaaacaagcaagagcgggaagcaatcaattgccattgatgactgcaccttccaccagtgtgtgcgactcagcaagtttgactctgaacgcagcatcagctttatcccgccagatggagagtttgagcttatgagatcgcacaaccaaggcttattcatctataatcacaagggggaggtgctcatctcccgagtctaccgagatgacatcgggaggaacgcagtggatgcctttcgggtcaatgttatccatgcccggcagcaggtgcgcagccccgtcaccaacattgctcgcaccagcttcttccacgttaagcggtccaacatttggctgcagcagtcaccaagcagaatgtcaacgctgccatgntcttcgaattcctctataagatgtgtgacgtgatgcgcctactaagcgatcagc

SEQ ID NO: 60375 - DNA, 336 bp, Homo sapiens
  misc_feature (20)..(20): n is a, c, g, or t
ctaggtcgagcctcggtgantcggacgagtgatggctgcctactttggcaagatcagcgaggaaaacatcaagaacaattttgtgctcatatatgagctgctggatgagattctagactttggctacccacagaattccgagacaggcgcgctgaaaaccttcatcacgcagcagggcatcaagagtcagcatcagacaaaagaagagcagtcacagatcaccagccaggtaactgggcagattggctggcggcgagagggtatcaagtatcgtcggaatgagctcagaggatgtgcggaagttttactggttaatgaaaagtagcctgaatggag

SEQ ID NO: 60376 - DNA, 677 bp, Homo sapiens
ctagagaccctcctatcatcggcacctcgctatcatcggcaccccccccatttccatgaactttgaggtgccattcgcgccctctggcctcaaggtgcgctacttgaaggtgtttgaaccgaagctgaactacagcgaccatgatgtcatcaaatgggtgcgctacattggccgcagtggcatttatgaaactcgctgctagctgccactaggcagctagcccacctccccagccaccctcctccacaggtccaggtgccgctccctcccccaccacacatcagtgtctcctccctcctgctttgctgccttccctttgcaccagcccgagtctaggtctgggccaagcacattacaagtgggaccggtggagcagcccctgggctccctgggcaggggagttctgaggctcctgctctcccatccacctgtctgtcctggcctaatgccaggctctgagttctgtgaccaaagccaggtgggttccctttccttcccacccctgtggccacagctctggagtgggagggttggttgcccctcacctcagagctcccccaaaggccagtaatggatccccggcctcagtccctactctgctttgggatagtgtgagcttcattttgtacacgtgtgacttcgtccagttacaaacccaataaactctgtagagtgga

SEQ ID NO: 60377 - DNA, 864 bp, Homo sapiens
  misc_feature (817)..(819): n is a, c, g, or t
  misc_feature (827)..(827): n is a, c, g, or t
  misc_feature (832)..(833): n is a, c, g, or t
  misc_feature (844)..(844): n is a, c, g, or t
  misc_feature (848)..(848): n is a, c, g, or t
  misc_feature (850)..(851): n is a, c, g, or t
  misc_feature (861)..(861): n is a, c, g, or t
gacccacgcgtccggacccacgcgtccgggaagatcaagcgcatggcaggcatgaaggaatcgcagatcagcgcagagattgagcttctgcctaccaacgacaagaagaaatgggctcgaccccccatttccatgaactttgaggtgccattcgcgccctctggcctcaaggtgcgctacttgaaggtgtttgaaccgaagctgaactacagcgaccatgatgtcatcaaatgggtgcgctacattggccgcagtggcatttatgaaactcgctgctagctgccactaggcagctagcccacctccccagccaccctcctccacaggtccaggtgccgctccctcccccaccacacatcagtgtctcctccctcctgctttgctgccttccctttgcaccagcccgagtctaggtctgggccaagcacattacaagtgggaccggtggagcagcccctgggctccctgggcaggggagttctgaggctcctgctctcccatccacctgtctgtcctggcctaatgccaggctctgagttctgtgaccaaagccaggtgggttccctttccttcccacccctgtggccacagctctggagtgggagggttggttgcccctcacctcagagctcccccaaaggccagtaatggatccccggcctcagtccctactctgctttgggatagtgtgagcttcattttgtacacgtgtgacttcgtccagttacaaacccaataaactctgtagagtggaaaaaaaaaaaaaaaaaaaaaaaaaaaaaaaaaaaaaaaaaaaaaaaaaaaaagggggggcgcnnnaaaaaatnccccnnggggggccccntagngnncccgtttttntga

SEQ ID NO: 60378 - DNA, 1660 bp, Homo sapiens
  misc_feature (20)..(20): n is a, c, g, or t
  misc_feature (1613)..(1615): n is a, c, g, or t
  misc_feature (1623)..(1623): n is a, c, g, or t
  misc_feature (1628)..(1629): n is a, c, g, or t
  misc_feature (1640)..(1640): n is a, c, g, or t
  misc_feature (1644)..(1644): n is a, c, g, or t
  misc_feature (1646)..(1647): n is a, c, g, or t
  misc_feature (1657)..(1657): n is a, c, g, or t
ctaggtcgagcctcggtgantcggacgagtgatggctgcctactttggcaagatcagcgaggaaaacatcaagaacaattttgtgctcatatatgagctgctggatgagattctagactttggctacccacagaattccgagacaggcgcgctgaaaaccttcatcacgcagcagggcatcaagagtcagcatcagacaaaagaagagcagtcacagatcaccagccaggtaactgggcagattggctggcggcgagagggtatcaagtatcgtcggaatgagctcttcctggatgtgctggagagtgtgaacctgctcatgtccccacaagggcaggtgctgagtgcccatgtgtcgggccgggtggtgatgaagagctacctgagtggcatgcctgaatgcaagtttgggatgaatgacaagattgttattgaaaagcagggcaaaggcacagctgatgaaacaagcaagagcgggaagcaatcaattgccattgatgactgcaccttccaccagtgtgtgcgactcagcaagtttgactctgaacgcagcatcagctttatcccgccagatggagagtttgagcttatgaggtatcgcacaaccaaggacatcatccttcccttccgggtgatcccgctagtgcgagaagtgggacgcaccaaactggaggtcaaggtggtcatcaagtccaactttaaaccctcactgctggctcagaagatcgaggtgaggatcccaaccccactgaacacaagcggggtgcaggtgatctgcatgaaggggaaggccaagtacaaggccagcgagaatgccatcgtgtggaagatcaagcgcatggcaggcatgaaggaatcgcagatcagcgcagagattgagcttctgcctaccaacgacaagaagaaatgggctcgaccccccatttccatgaactttgaggtgccattcgcgccctctggcctcaaggtgcgctacttgaaggtgtttgaaccgaagctgaactacagcgaccatgatgtcatcaaatgggtgcgctacattggccgcagtggcatttatgaaactcgctgctagctgccactaggcagctagcccacctccccagccaccctcctccacaggtccaggtgccgctccctcccccaccacacatcagtgtctcctccctcctgctttgctgccttccctttgcaccagcccgagtctaggtctgggccaagcacattacaagtgggaccggtggagcagcccctgggctccctgggcaggggagttctgaggctcctgctctcccatccacctgtctgtcctggcctaatgccaggctctgagttctgtgaccaaagccaggtgggttccctttccttcccacccctgtggccacagctctggagtgggagggttggttgcccctcacctcagagctcccccaaaggccagtaatggatccccggcctcagtccctactctgctttgggatagtgtgagcttcattttgtacacgtgtgacttcgtccagttacaaacccaataaactctgtagagtggaaaaaaaaaaaaaaaaaaaaaaaaaaaaaaaaaaaaaaaaaaaaaaaaaaaaagggggggcgcnnnaaaaaatnccccnnggggggccccntagngnncccgtttttntga

SEQ ID NO: 60379 - DNA, 1502 bp, Homo sapiens
  misc_feature (20)..(20): n is a, c, g, or t
ctaggtcgagcctcggtgantcggacgagtgatggctgcctactttggcaagatcagcgaggaaaacatcaagaacaattttgtgctcatatatgagctgctggatgagattctagactttggctacccacagaattccgagacaggcgcgctgaaaaccttcatcacgcagcagggcatcaagagtcagcatcagacaaaagaagagcagtcacagatcaccagccaggtaactgggcagattggctggcggcgagagggtatcaagtatcgtcggaatgagctcttcctggatgtgctggagagtgtgaacctgctcatgtccccacaagggcaggtgctgagtgcccatgtgtcgggccgggtggtgatgaagagctacctgagtggcatgcctgaatgcaagtttgggatgaatgacaagattgttattgaaaagcagggcaaaggcacagctgatgaaacaagcaagagcgggaagcaatcaattgccattgatgactgcaccttccaccagtgtgtgcgactcagcaagtttgactctgaacgcagcatcagctttatcccgccagatggagagtttgagcttatgaggtatcgcacaaccaaggacatcatccttcccttccgggtgatcccgctagtgcgagaagtgggacgcaccaaactggaggtcaaggtggtcatcaagtccaactttaaaccctcactgctggctcagaagatcgaggtgaggatcccaaccccactgaacacaagcggggtgcaggtgatctgcatgaaggggaaggccaagtacaaggccagcgagaatgccatcgtgtggaagatcaagcgcatggcaggcatgaaggaatcgcagatcagcgcagagattgagcttctgcctaccaacgacaagaagaaatgggctcgaccccccatttccatgaactttgaggtgccattcgcgccctctggcctcaaggtgcgctacttgaaggtgtttgaaccgaagctgaactacagcgaccatgatgtcatcaaatgggtgcgctacattggccgcagtggcatttatgaaactcgctgctagctgccactaggcagctagcccacctccccagccaccctcctccacaggtccaggtgccgctccctcccccaccacacatcagtgtctcctccctcctgctttgctgccttccctttgcaccagcccgagtctaggtctgggccaagcacattacaagtgggaccggtggagcagcccctgggctccctgggcaggggagttctgaggctcctgctctcccatccacctgtctgtcctggcctaatgccaggctctgagttctgtgaccaaagccaggtgggttccctttccttcccacccctgtggccacagctctggagtgggagggttggttgcccctcacctcagagctcccccaaaggccagtaatggatccccggcctcagtccctactctggactgcgcgtcacaggggatcctctcagat

SEQ ID NO: 60380 - DNA, 1559 bp, Homo sapiens
  misc_feature (20)..(20): n is a, c, g, or t
ctaggtcgagcctcggtgantcggacgagtgatggctgcctactttggcaagatcagcgaggaaaacatcaagaacaattttgtgctcatatatgagctgctggatgagattctagactttggctacccacagaattccgagacaggcgcgctgaaaaccttcatcacgcagcagggcatcaagagtcagcatcagacaaaagaagagcagtcacagatcaccagccaggtaactgggcagattggctggcggcgagagggtatcaagtatcgtcggaatgagctcttcctggatgtgctggagagtgtgaacctgctcatgtccccacaagggcaggtgctgagtgcccatgtgtcgggccgggtggtgatgaagagctacctgagtggcatgcctgaatgcaagtttgggatgaatgacaagattgttattgaaaagcagggcaaaggcacagctgatgaaacaagcaagagcgggaagcaatcaattgccattgatgactgcaccttccaccagtgtgtgcgactcagcaagtttgactctgaacgcagcatcagctttatcccgccagatggagagtttgagcttatgaggtatcgcacaaccaaggacatcatccttcccttccgggtgatcccgctagtgcgagaagtgggacgcaccaaactggaggtcaaggtggtcatcaagtccaactttaaaccctcactgctggctcagaagatcgagtcgaggtgagtgaggatcccaaccccactgaacacaagcggggtgcaggtgatctgcatgaaggggaaggccaagtacaaggccagcgagaatgccatcgtgtggaagatcaagcgcatggcaggcatgaaggaatcgcagatcagcgcagagattgagcttctgcctaccaacgacaagaagaaatgggctcgaccccccatttccatgaactttgaggtgccattcgcgccctctggcctcaaggtgcgctacttgaaggtgtttgaaccgaagctgaactacagcgaccatgatgtcatcaaatgggtgcgctacattggccgcagtggcatttatgaaactcgctgctagctgccactaggcagctagcccacctccccagccaccctcctccacaggtccaggtgccgctccctcccccaccacacatcagtgtctcctccctcctgctttgctgccttccctttgcaccagcccgagtctaggtctgggccaagcacattacaagtgggaccggtggagcagcccctgggctccctgggcaggggagttctgaggctcctgctctcccatccacctgtctgtcctggcctaatgccaggctctgagttctgtgaccaaagccaggtgggttccctttccttcccacccctgtggccacagctctggagtgggagggttggttgcccctcacctcagagctcccccaaaggccagtaatggatccccggcctcagtccctactctgctttgggatagtgtgagcttcattttgtacacgtgtgacttcgtccagttacaaacccaataaactctgtagagtgga

SEQ ID NO: 60381 - DNA, 1523 bp, Homo sapiens
  misc_feature (20)..(20): n is a, c, g, or t
ctaggtcgagcctcggtgantcggacgagtgatggctgcctactttggcaagatcagcgaggaaaacatcaagaacaattttgtgctcatatatgagctgctggatgagattctagactttggctacccacagaattccgagacaggcgcgctgaaaaccttcatcacgcagcagggcatcaagagtcagcatcagacaaaagaagagcagtcacagatcaccagccaggtaactgggcagattggctggcggcgagagggtatcaagtatcgtcggaatgagctcttcctggatgtgctggagagtgtgaacctgctcatgtccccacaagggcaggtgctgagtgcccatgtgtcgggccgggtggtgatgaagagctacctgagtggcatgcctgaatgcaagtttgggatgaatgacaagattgttattgaaaagcagggcaaaggcacagctgatgaaacaagcaagagcgggaagcaatcaattgccattgatgactgcaccttccaccagtgtgtgcgactcagcaagtttgactctgaacgcagcatcagctttatcccgccagatggagagtttgagcttatgaggtatcgcacaaccaaggacatcatccttcccttccgggtgatcccgctagtgcgagaagtgggacgcaccaaactggaggtcaaggtggtcatcaagtccaactttaaaccctcactgctggctcagaagatcgaggtgaggatcccaaccccactgaacacaagcggggtgcaggtgatctgcatgaaggggaaggccaagtacaaggccagcgagaatgccatcgtgtggaagatcaagcgcatggcaggcatgaaggaatcgcagatcagcgcagagattgagcttctgcctaccaacgacaagaagaaatgggctcgaccccccatttccatgaactttgaggtgcgctacttgaaggtgtttgaaccgaagctgaactacagcgaccatgatgtcatcaaatgggtgcgctacattggccgcagtggcatttatgaaactcgctgctagctgccactaggcagctagcccacctccccagccaccctcctccacaggtccaggtgccgctccctcccccaccacacatcagtgtctcctccctcctgctttgctgccttccctttgcaccagcccgagtctaggtctgggccaagcacattacaagtgggaccggtggagcagcccctgggctccctgggcaggggagttctgaggctcctgctctcccatccacctgtctgtcctggcctaatgccaggctctgagttctgtgaccaaagccaggtgggttccctttccttcccacccctgtggccacagctctggagtgggagggttggttgcccctcacctcagagctcccccaaaggccagtaatggatccccggcctcagtccctactctgctttgggatagtgtgagcttcattttgtacacgtgtgacttcgtccagttacaaacccaataaactctgtagagtgga

SEQ ID NO: 60382 - DNA, 1680 bp, Homo sapiens
  misc_feature (20)..(20): n is a, c, g, or t
ctaggtcgagcctcggtgantcggacgagtgatggctgcctactttggcaagatcagcgaggaaaacatcaagaacaattttgtgctcatatatgagctgctggatgagattctagactttggctacccacagaattccgagacaggcgcgctgaaaaccttcatcacgcagcagggcatcaagagtcagcatcagacaaaagaagagcagtcacagatcaccagccaggtaactgggcagattggctggcggcgagagggtatcaagtatcgtcggaatgagctcttcctggatgtgctggagagtgtgaacctgctcatgtccccacaagggcaggtgctgagtgcccatgtgtcgggccgggtggtgatgaagagctacctgagtggcatgcctgaatgcaagtttgggatgaatgacaagattgttattgaaaagcagggcaaaggcacagctgatgaaacaagcaagagcgggaagcaatcaattgccattgatgactgcaccttccaccagtgtgtgcgactcagcaagtttgactctgaacgcagcatcagctttatcccgccagatggagagtttgagcttatgaggtatcgcacaaccaaggacatcatccttcccttccgggtgatcccgctagtgcgagaagtgggacgcaccaaactggaggtcaaggtggtcatcaagtccaactttaaaccctcactgctggctcagaagatcgaggtgaggatcccaaccccactgaacacaagcggggtgcaggtgatctgcatgaaggggaaggccaagtacaaggccagcgagaatgccatcgtgtggaagatcaagcgcatggcaggcatgaaggaatcgcagatcagcgcagagattgagcttctgcctaccaacgacaagaagaaatgggctcgaccccccatttccatgaactttgaggtgccattcgcgccctctggcctcaaggtgcgctacttgaaggtgtttgaaccgaagctgaactacagcgaccatgatgtcatcaaatgggtgcgctacattggccgcagtggcatttatgaaactcgctgctagctgccactaggcagctagcccacctccccagccaccctcctccacaggtccaggtgccgctccctcccccaccacacatcagtgtctcctccctcctgctttgctgccttcagcccctgggctccctgggcaggggagttctgaggctcctgctctcccatccacctgtctgtcctggcctaatgccaggctctgagttctgtgaccaaagccaggtgggttccctttccttcccacccctgtggccacagctctggagtgggagggttggttgcccctcacctcagagctcccccaaaggccagtaatggatccccggcctcagtccctactctgctttgggatagtgtgagcttcattttgtacacgtgtgacttcgtccagttacaaacccaataaactctgtagagtggagttgctggcttagtgttgatgtgggagctacatggggagggaactggtgttgctctccgtgcagttttctgtactgaatactctaaaggctctttccttgtcttgtcccagttaggcccctcctgggccatccaagcccttatccttgtgggttctgggcccaggtttcctggctcctcttagaaagcctc

SEQ ID NO: 60383 - DNA, 1306 bp, Homo sapiens
  misc_feature (20)..(20): n is a, c, g, or t
ctaggtcgagcctcggtgantcggacgagtgatggctgcctactttggcaagatcagcgaggaaaacatcaagaacaattttgtgctcatatatgagctgctggatgagattctagactttggctacccacagaattccgagacaggcgcgctgaaaaccttcatcacgcagcagggcatcaagagtcagcatcagacaaaagaagagcagtcacagatcaccagccaggtaactgggcagattggctggcggcgagagggtatcaagtatcgtcggaatgagctcttcctggatgtgctggagagtgtgaacctgctcatgtccccacaagggcaggtgctgagtgcccatgtgtcgggccgggtggtgatgaagagctacctgagtggcatgcctgaatgcaagtttgggatgaatgacaagattgttattgaaaagcagggcaaaggcacagctgatgaaacaagcaagagcgggaagcaatcaattgccattgatgactgcaccttccaccagtgtgtgcgactcagcaagtttgactctgaacgcagcatcagctttatcccgccagatggagagtttgagcttatgaggtatcgcacaaccaaggacatcatccttcccttccgggtgatcccgctagtgcgagaagtgggacgcaccaaactggaggtcaaggtggtcatcaagtccaactttaaaccctcactgctggctcagaagatcgaggtgaggatcccaaccccactgaacacaagcggggtgcaggtgatctgcatgaaggggaaggccaagtacaaggccagcgagaatgccatcgtgtggaagatcaagcgcatggcaggcatgaaggaatcgcagatcagcgcagagattgagcttctgcctaccaacgacaagaagaaatgggctcgaccccccatttccatgaactttgaggtgccattcgcgccctctggcctcaaggtgcgctacttgaaggtgtttgaaccgaagctgaactacagcgaccatgatgtcatcaaatgggtgcgctacattggccgcagtggcatttatgaaactcgctgctagctgccactaggcagctagcccacctccccagccaccctcctccacaggtccagacgcatgcatacctgggcgtatgcctaaccgctaacattactgcaggccacctactcatgcacctaattggaagcgccaccctagcaatatcaaccattaaccttccctctacacttatcatcttcacaattctaattctactgactatcctagaaatcgctgtcgcctaatctgcag

SEQ ID NO: 60384 - DNA, 1257 bp, Homo sapiens
  misc_feature (20)..(20): n is a, c, g, or t
ctaggtcgagcctcggtgantcggacgagtgatggctgcctactttggcaagatcagcgaggaaaacatcaagaacaattttgtgctcatatatgagctgctggatgagattctagactttggctacccacagaattccgagacaggcgcgctgaaaaccttcatcacgcagcagggcatcaagagtcagcatcagacaaaagaagagcagtcacagatcaccagccaggtaactgggcagattggctggcggcgagagggtatcaagtatcgtcggaatgagctcttcctggatgtgctggagagtgtgaacctgctcatgtccccacaagggcaggtgctgagtgcccatgtgtcgggccgggtggtgatgaagagctacctgagtggcatgcctgaatgcaagtttgggatgaatgacaagattgttattgaaaagcagggcaaaggcacagctgatgaaacaagcaagagcgggaagcaatcaattgccattgatgactgcaccttccaccagtgtgtgcgactcagcaagtttgactctgaacgcagcatcagctttatcccgccagatggagagtttgagcttatgaggtatcgcacaaccaaggacatcatccttcccttccgggtgatcccgctagtgcgagaagtgggacgcaccaaactggaggtcaaggtggtcatcaagtccaactttaaaccctcactgctggctcagaagatcgaggtgaggatcccaaccccactgaacacaagcggggtgcaggtgatctgcatgaaggggaaggccaagtacaaggccagcgagaatgccatcgtgtggaagatcaagcgcatggcaggcatgaaggaatcgcagatcagcgcagagattgagcttctgcctaccaacgacaagaagaaatgggctcgaccccccatttccatgaactttgaggtgccattcgcgccctctggcctcaaggtgcgctacttgaaggtgtttgaaccgaagctgaactacagcgaccatgatgtcatcaaatggtgcccatggcaagttgcccaacttcccagccacccttctccacagggtcaagtcgcggttccttcccaaccacacatcagcggctccttccttctgctttggtggctttccttttgaccaagccccggctaggcttcggcccagcacctttcccagtcggaacccgtcgacgcagcccctaggcgtccttggcaagggaaagcttatgcgtcctgttttcccactcc

SEQ ID NO: 60385 - DNA, 1843 bp, Homo sapiens
  misc_feature (20)..(20): n is a, c, g, or t
ctaggtcgagcctcggtgantcggacgagtgatggctgcctactttggcaagatcagcgaggaaaacatcaagaacaattttgtgctcatatatgagctgctggatgagattctagactttggctacccacagaattccgagacaggcgcgctgaaaaccttcatcacgcagcagggcatcaagagtcagcatcagacaaaagaagagcagtcacagatcaccagccaggtaactgggcagattggctggcggcgagagggtatcaagtatcgtcggaatgagctcttcctggatgtgctggagagtgtgaacctgctcatgtccccacaagggcaggtgctgagtgcccatgtgtcgggccgggtggtgatgaagagctacctgagtggcatgcctgaatgcaagtttgggatgaatgacaagattgttattgaaaagcagggcaaaggcacagctgatgaaacaagcaagagcgggaagcaatcaattgccattgatgactgcaccttccaccagtgtgtgcgactcagcaagtttgactctgaacgcagcatcagctttatcccgccagatggagagtttgagcttatgaggtatcgcacaaccaaggacatcatccttcccttccgggtgatcccgctagtgcgagaagtgggacgcaccaaactggaggtcaaggtggtcatcaagtccaactttaaaccctcactgctggctcagaagatcgaggtgaggatcccaaccccactgaacacaagcggggtgcaggtgatctgcatgaaggggaaggccaagtacaaggccagcgagaatgccatcgtgtggaagatcaagcgcatggcaggcatgaaggaatcgcagatcagcgcagagattgagcttctgcctaccaacgacaagaagaaatgggctcgaccccccatttccatgaactttgagggtatggcagaggaggggcctagagtcatgccagggtatgctggaagacctcttagagatcattccgataaaccgctgcaccttagaggtgaggaaactgaggcctagaaagaagaactggctttaattcatagatccattcttcccctttcaagcctcttagtagaaattactatttgtgatgaggcaaatcttttacttctctcggcttgtcctaacacagttctttcaaaaaacttagattgtttaaatgccaggtaagacacaaagtttacttacagacaggataatgggctgactttgctttgcgcatgttagacataattttctccaccttatttttaagttcataatattgagcaggataagtatgttctaaagcagttctttggttgctgtctcctgctgattaaaggaactgattcaaggtgtcacaggtagggctttcttctttagtcacctcttagaaggtcccacgccgccccagcttctttcaggaccccagccatacaaacacctgtagtagcgatgaagtagggcagggcaacgggacttcccagaggagagcggctgtaagaggaaggccacatttctaactagctctccttgcccaggtgccattcgcgccctctggcctcaaggtgcgctacttgaaggtgtttgaaccgaagctgaactacagcgaccatgatgtcatcaaatgggtgcgctacattggccgcagtggcatttatgaaactcgctgctagctgccactaggcagctagcccacctccccagccaccctcctccacaggtccagtcagaactcccctgcccagggagcccaggggctgctccaccggtcccacttgtaatgtgcttggcccagacctagactcgggctggtgcaaagggaaggca

SEQ ID NO: 60386 - DNA, 984 bp, Homo sapiens
  misc_feature (20)..(20): n is a, c, g, or t
ctaggtcgagcctcggtgantcggacgagtgatggctgcctactttggcaagatcagcgaggaaaacatcaagaacaattttgtgctcatatatgagctgctggatgagattctagactttggctacccacagaattccgagacaggcgcgctgaaaaccttcatcacgcagcagggcatcaagagtcagcatcagacaaaagaagagcagtcacagatcaccagccaggtaactgggcagattggctggcggcgagagggtatcaagtatcgtcggaatgagctcttcctggatgtgctggagagtgtgaacctgctcatgtccccacaagggcaggtgctgagtgcccatgtgtcgggccgggtggtgatgaagagctacctgagtggcatgcctgaatgcaagtttgggatgaatgacaagattgttattgaaaagcagggcaaaggcacagctgatgaaacaagcaagagcgggaagcaatcaattgccattgatgactgcaccttccaccagtgtgtgcgactcagcaagtttgactctgaacgcagcatcagctttatcccgccagatggagagtttgagcttatgaggtatcgcacaaccaaggacatcatccttcccttccgggtgatcccgctagtgcgagaagtgggacgcaccaaactggaggtcaaggtggtcatcaagtccaactttaaaccctcactgctggctcagaagatcgaggtgaggatcccaaccccactgaacacaagcggggtgcaggtgatctgcatgaaggggaaggccaagtacaaggccagcgagaatgccatcgtgtggaagatcaagcgcatggcaggcatgaaggaatcgcagatcagcgcagagattgagcttctgcctaccaacgacaagaagaaatgggctcgaccccccatttccatgaactttgaggccattcgcgccctctggccttgtacttggccttccccttcatg

SEQ ID NO: 60387 - DNA, 1091 bp, Homo sapiens
  misc_feature (20)..(20): n is a, c, g, or t
ctaggtcgagcctcggtgantcggacgagtgatggctgcctactttggcaagatcagcgaggaaaacatcaagaacaattttgtgctcatatatgagctgctggatgagattctagactttggctacccacagaattccgagacaggcgcgctgaaaaccttcatcacgcagcagggcatcaagagtcagcatcagacaaaagaagagcagtcacagatcaccagccaggtaactgggcagattggctggcggcgagagggtatcaagtatcgtcggaatgagctcttcctggatgtgctggagagtgtgaacctgctcatgtccccacaagggcaggtgctgagtgcccatgtgtcgggccgggtggtgatgaagagctacctgagtggcatgcctgaatgcaagtttgggatgaatgacaagattgttattgaaaagcagggcaaaggcacagctgatgaaacaagcaagagcgggaagcaatcaattgccattgatgactgcaccttccaccagtgtgtgcgactcagcaagtttgactctgaacgcagcatcagctttatcccgccagatggagagtttgagcttatgaggtatcgcacaaccaaggacatcatccttcccttccgggtgatcccgctagtgcgagaagtgggacgcaccaaactggaggtcaaggtggtcatcaagtccaactttaaaccctcactgctggctcagaagatcgaggtgccgctccctcccccaccacacatcagtgtctcctccctcctgctttgctgccttcagcccctgggctccctgggcaggggagttctgaggctcctgctctcccatccacctgtctgtcctggcctaatgccaggctctgagttctgtgaccaaagccaggtgggttccctttccttcccacccctgtggccacagctctggagtgggagggttggttgcccctcacctcagagctcccccaaaggccagtaatggatccccggcctcagtccctactctgctttgggatagtgtgagcttcattttgtacacgtgtgacttcgtccagttacaaacccaataaactctgtagagtgga

SEQ ID NO: 60388 - DNA, 911 bp, Homo sapiens
  misc_feature (20)..(20): n is a, c, g, or t
ctaggtcgagcctcggtgantcggacgagtgatggctgcctactttggcaagatcagcgaggaaaacatcaagaacaattttgtgctcatatatgagctgctggatgagattctagactttggctacccacagaattccgagacaggcgcgctgaaaaccttcatcacgcagcagggcatcaagagtcagcatcagacaaaagaagagcagtcacagatcaccagccaggtaactgggcagattggctggcggcgagagggtatcaagtatcgtcggaatgagctcttcctggatgtgctggagagtgtgaacctgctcatgtccccacaagggcaggtgctgagtgcccatgtgtcgggccgggtggtgatgaagagctacctgagtggcatgcctgaatgcaagtttgggatgaatgacaagattgttattgaaaagcagggcaaaggcacagctgatgaaacaagcaagagcgggaagcaatcaattgccattgatgactgcaccttccaccagtgtgtgcgactcagcaagtttgactctgaacgcagcatcagctttatcccgccagatggagagtttgagcttatgagatcgcacaaccaaggacatcatccttcccttcccaacctctcctaactataaaactaggtgctgcagcccctgggaccaggcacccccagaatgacctggccgcagtgaggcggattgagaaggagctcccaggaggggcttctgggcagactctggtcaagaagcatcgtgtctggcgttgtggggatgaactttttgttttgtttcttccttttttagttcttcaaagatagggagggaagggggaacatgagcctttgttgctatcaatccaagaacttatttgtacattttttttttcaataaaacttttcca

SEQ ID NO: 60389 - DNA, 884 bp, Homo sapiens
gaagaggaaccgcgccatatgacccagatgataactatttacataattgttaaatacacagctgactcataaacatgtcttacaaagagatcaataacaggaagtaaacactattttaatatgactttgagggtgggtttgattctttttttcttggcatatcctaaataactccctctgtttcttcctgttaggatttaatatacacaagagaaaggtttcaggacttctaaattatgcagtagcaatgtcatttaactagcacttacaaattactgccacatctgcaggtcacctgtactgttatgtaattaccatttttctttagtcaactttaattcaacttacttataaaacttacccttcttctaagcaatggcagtgatgaaaattgggtttggtgtgctaattctattttactccagtactcactaaaagaaatacatgcttgttcaaataaaaaaaaacaaactttgtatttgtgttctgtgtaaaaccatctgcttatctagggtgacatctatcccaccatacaaaacactgtacaggtatctcagcttgttgagtattccaaaccaatccttctcatcattttcaaaatgtaaaattgcaaataagctttttgatatggtttgggtctcatgttgaattgtaatcctccagtgtcggaagaggggcctggtgggaggcgattaaatcatgggggtggatttcccccttgctgttctcataatagtgagtgagctttcacatgatctggttgtttataaaagtgcgtaacgccttcccgctctttctcttcctcctgctccagccatgtaaaacgtgcctcctgcctcttcaccttccgccacgattttaagtttcctgaaacctccccagcc

SEQ ID NO: 60390 - DNA, 874 bp, Homo sapiens
ctgggactttggtggtgctacccttggcctcccagagtcctgccaccctgctgccgccaccatgctgccccctgggactgcgaccctcttgactctgctcctggcagctggctcgctgggccagaagcctcagaggccacgccggcccgcatcccccatcagcaccatccagcccaaggccaattttgatgctcagcagtttgcagggacctggctccttgtggctgtgggctccgcttgccgtttcctgcaggagcagggccaccgggccgaggccaccacactgcatgtggctccccagggcacagccatggctgtcagtaccttccgaaagctggatgggatctgctggcaggtgcgccagctctatggagacacaggggtcctcggccgcttcctgcttcaagcccgaggcgcccgaggggctgtgcacgtggttgtcgctgagaccgactaccagagtttcgctgtcctgtacctggagcgggcggggcagctgtcagtgaagctctacgcccgctcgctccctgtgagcgactcggtcctgagtgggtttgagcagcgggtccaggaggcccacctgactgaggaccagatcttctacttccccaagtacggcttctgcgaggctgcagaccagttccacgtcctggacgaagtgaggaggtgaggccggcacacagctccagtgctgagaagtcagtgccccgagagacgaccccaccagtggggtgcccgctgcctgtcctccgtgaaaccagcctcagatcagggccctgccacccagggcaggggatcttctgccggctgccccagaggacagtgggtggagtggtacctacttattaaatgtctcagaccccaaaaaaactct

SEQ ID NO: 60391 - DNA, 743 bp, Homo sapiens
ccagcccgaggcgcccgaggggctgtgcacgtggttgtcgctgagaccgactaccagagtttcgctgtcctgtacctggagcgggcggggcagctgtcagtgaagctctacggtatgtgggggccagcctctgtgaccaggcaggcgctcaagctctgcacactcactgggccaccccgaggggctgggtgagcccatggggacacacttcctttctcccatcctgatcctcctgctaagcaggggcccagggagtagtgacagacaggcctggtgtgggagcagggagagggccccgagggggcaggggacacacagaccccgttcccagagccctccacgccgcctggtgccaggaccccaggaaccctgtctgccctgcagcccgctcgctccctgtgagcgactcggtcctgagtgggtttgagcagcgggtccaggaggcccacctgactgaggaccagatcttctacttccccaagtacggcttctgcgaggctgcagaccagttccacgtcctggacgaagtgaggaggtgaggccggcacacagctccagtgctgagaagtcagtgccccgagagacgaccccaccagtggggtgcccgctgcctgtcctccgtgaaaccagcctcagatcagggccctgccacccagggcaggggatcttctgccggctgccccagaggacagtgggtggagtggtacctacttattaaatgtctcagaccccaaaaaaactct

SEQ ID NO: 60392 - DNA, 821 bp, Homo sapiens
ccagcccgaggcgcccgaggggctgtgcacgtggttgtcgctgagaccgactaccagagtttcgctgtcctgtacctggagcgggcggggcagctgtcagtgaagctctacggtatgtgggggccagcctctgtgaccaggcaggcgctcaagctctgcacactcactgggccaccccgaggggctgggtgagcccatggggacacacttcctttctcccatcctgatcctcctgctaagcaggggcccagggagtagtgacagacaggcctggtgtgggagcagggagagggccccgagggggcaggggacacacagaccccgttcccagagccctccacgccgcctggtgccaggaccccaggaaccctgtctgccctgcagcccgctcgctccctgtgagcgactcggtcctgagtgggtttgagcagcgggtccaggaggcccacctgactgaggaccagatcttctacttccccaagtacggcttctgcgaggctgcagaccagttccacgtcctggacggtgagtgcacagcggggcaagcatggcggcgtggtgaggggggccactgccaccggctgagtctcgtctctgctgcagaagtgaggaggtgaggccggcacacagctccagtgctgagaagtcagtgccccgagagacgaccccaccagtggggtgcccgctgcctgtcctccgtgaaaccagcctcagatcagggccctgccacccagggcaggggatcttctgccggctgccccagaggacagtgggtggagtggtacctacttattaaatgtctcagaccccaaaaaaactct

SEQ ID NO: 60393 - DNA, 902 bp, Homo sapiens
ctgggactttggtggtgctacccttggcctcccagagtcctgccaccctgctgccgccaccatgctgccccctgggactgcgaccctcttgactctgctcctggcagctggctcgctgggccagaagcctcagaggccacgccggcccgcatcccccatcagcaccatccagcccaaggccaattttgatgctcagcagtttgcagggacctggctccttgtggctgtgggctccgcttgccgtttcctgcaggagcagggccaccgggccgaggccaccacactgcatgtggctccccagggcacagccatggctgtcagtaccttccgaaagctggatgggatctgctggcaggtgcgccagctctatggagacacaggggtcctcggccgcttcctgcttcaagcccgaggcgcccgaggggctgtgcacgtggttgtcgctgagaccgactaccagagtttcgctgtcctgtacctggagcgggcggggcagctgtcagtgaagctctacggaccccaggaaccctgtctgccctgcagcccgctcgctccctgtgagcgactcggtcctgagtgggtttgagcagcgggtccaggaggcccacctgactgaggaccagatcttctacttccccaagtacggcttctgcgaggctgcagaccagttccacgtcctggacgaagtgaggaggtgaggccggcacacagctccagtgctgagaagtcagtgccccgagagacgaccccaccagtggggtgcccgctgcctgtcctccgtgaaaccagcctcagatcagggccctgccacccagggcaggggatcttctgccggctgccccagaggacagtgggtggagtggtacctacttattaaatgtctcagaccccaaaaaaactct

SEQ ID NO: 60394 - DNA, 775 bp, Homo sapiens
cccaccccggctgtggcctggactaggattcctggttggggtctcccagcctgtggtgcctcctccccgcccccccagggatgggatctgctggcaggtgcgccagctctatggagacacaggggtcctcggccgcttcctgcttcaaggtgaggcaggggctgcagggcatgtgggtgggggatgacgcagccactgtggctctctgacatggctactgtggctctgccccagcccgaggcgcccgaggggctgtgcacgtggttgtcgctgagaccgactaccagagtttcgctgtcctgtacctggagcgggcggggcagctgtcagtgaagctctacggtatgtgggggccagcctctgtgaccaggcaggcgctcaagctctgcacactcactgggccaccccgaggggctgggtgagcccatggggacacacttcctttctcccatcctgatcctcctgctaagcaggggcccagggagtagtgacagacaggcctggtgtgggagcagggagagggccccgagggggcaggggacacacagaccccgttcccagagccctccacgccgcctggtgccaggaccccaggaaccctgtctgccctgcagcccgctcgctccctgtgagcgactcggtcctgagtgggtttgagcagcgggtccaggaggcccacctgactgaggaccagatcttctacttccccaagtacggtgagtgtccccagcaggtccccagctcagccacccccactctctgggctgatgtccag

SEQ ID NO: 60395 - DNA, 279 bp, Homo sapiens
ccaggatcagaccctgggctcactgcctaggtgagaaactcccagagtgatgatgcgtcctgattcatgtggcacatagggtccatctgtcccattggtggtggtggtggtaacattgatcacttggtcaagatgatgtttgccagcttttctgtatacaaagttgtttttgactaggtagtggctcatgcctatagtcccaacagaggctgaagcaggaggatcacttgaggccaggtgtttgagaccagcctgggcaacatagcaagaccccatctc

SEQ ID NO: 60396 - DNA, 318 bp, Homo sapiens
agcagctctagctgcagaagcaaggatttggcatgcatttcaattctccgatatctaaaggcaaccacaaaaggttctgagattcttctggacctgacatctggagcccagagcccgggatttgccagcgtcattgtctgtctctcaagttcacccaccactcacataactggcatagctaggtacaaagaaccaactgagggggagacttggtattttccagaattcaggaaattgaattatccacataggaaatatcacagagtaaacaatccaactgctttttttaattaaaatattctgaaataaagattaggc

SEQ ID NO: 60397 - DNA, 384 bp, Homo sapiens
ataaatattgcctaactttgttctattaccaaacttgtggcaactttactgtgacgagatttgaggagaaagataaaatttaatacccaattgaaaatagatggttaaacaaacaagcaaaaattattattattatttcattattttttgagacacgatctctctgtatcatccaggctggagtgcagtggtgcaatcatggctcactgcagcctcaaactcccaggctcaggtgatcctcccacttcagcctcccaagtaactgggcctagagacatgcactaacacacctggctaatttttgtatattttgaagagacagggtttcaccatgttccccatggctagtcttgaactcctaagctcaagcgatccacccgcctc

SEQ ID NO: 60398 - DNA, 496 bp, Homo sapiens
tcccgccccaccagttaccctgtgacccagcaccgtgaagaagccgagcctccatccccaatctgagcatgctatctggcctcgcctttgattggcagggcccacgctgctgcttctccctcaccccactgctctgcaggaaaaaagtgcaacgttctgctgcttacagcccctcggccttggaaagcgcggttcctctccacgtggatcaccaaatgccagtccagagccatttgcctaggggtgtccctgcgggccttgcaggtcaccacatgaaacacgcaggagcaactcacaggccagcgatggaagttgagttactattttgtggggccaaccagaatgtcaatttttttggatgctgggtagatagaatgaggtatagtaaaccaagggtctaacacagtgcctggccccaggtaggtgcaaaatgcatgcttgtttctgtttcttatctttatgtgcacccaccccagttctttgctctctctttcct

SEQ ID NO: 60399 - DNA, 457 bp, Homo sapiens
  misc_feature (448)..(448): n is a, c, g, or t
  misc_feature (451)..(451): n is a, c, g, or t
tgcaacattgaatcagataaagtcaaaaattttcattactcttttctcatagggactgttatcttgtggagcctgggcttgctttgatgagtttaacagaattgatttggaagtactctctgtggttgctcaacaaatccttactatccaaagaggtattaatgcaggtgctgatatactgatgtttgaaggaactgaactaaaacttgaccccacatgtgctgtctttataacaatgaaccctgggtatgctgggcgatcagaactgccagataacctgaaggctctctttcggacagtagcaatgatggtacctgactatgccatgattgctgaaatagtcctatactcctgtgggtttgtcactgctcgaccactgtctgtaaaaattgtggctacgtatcgcttgtgttcagagcagctgtcatctcaacatcactacgactanggntgagag

SEQ ID NO: 60400 - DNA, 642 bp, Homo sapiens
  misc_feature (3)..(3): n is a, c, g, or t
  misc_feature (6)..(6): n is a, c, g, or t
  misc_feature (8)..(9): n is a, c, g, or t
  misc_feature (12)..(12): n is a, c, g, or t
  misc_feature (633)..(633): n is a, c, g, or t
  misc_feature (636)..(636): n is a, c, g, or t
tanggntnngantatctgggtaattcccctaggctggttattacaccactcacggatagatgttacagaaccttatttggagcccttcatttgcaccttggaggagcacctgagggtccagctggcactgggaagactgaaactaccaaggatttggcaaaagctgtagccaaacaatgtgttgttttcaactgctctgatgggttggattatttggctttgggaaaattctttaagggactgttatcttgtggagcctgggcttgctttgatgagtttaacagaattgatttggaagtactctctgtggttgctcaacaaatccttactatccaaagaggtattaatgcaggtgctgatatactgatgtttgaaggaactgaactaaaacttgaccccacatgtgctgtctttataacaatgaaccctgggtatgctgggcgatcagaactgccagataacctgaaggctctctttcggacagtagcaatgatggtacctgactatgccatgattgctgaaatagtcctatactcctgtgggtttgtcactgctcgaccactgtctgtaaaaattgtggctacgtatcgcttgtgttcagagcagctgtcatctcaacatcactacgactanggntgagag

SEQ ID NO: 60401 - DNA, 278 bp, Homo sapiens
agtcagacaaccctgtgctcaaatctgccaccgcttgctgtgaccttggacaagttacttatcttccatatgcctcaatttcctccgctgtaaaatggcaatagtaactgtattctcaaggttgttgtgaagatccaaagagctaatatatgtagtgcttacacctgcctgcagcatggtaggtgctttgtaaagtttagtgattactgtccctgcattccctgcaaaaactagcacctgtcagatgctcaataaatatatatacaaattatccataa

SEQ ID NO: 60402 - DNA, 300 bp, Homo sapiens
gctattattatcatcagtagcattactcttctgaaggatggacatttatgaatgttcgaataactcattcatcttgtaacagtcacaccatcctcatatgtaatattctccttacaaatagttttatctaagtttaaatccataaatagatcattttgttttttgaagctcttacctaccacaaaattttgacttattacaaaatctcaaaatgaattttgacactagcctttttacacttatatatatgagcagcattaattgggtgtctaaattgtgtatttttttaagaaacagtga

SEQ ID NO: 60403 - DNA, 165 bp, Homo sapiens
  misc_feature (156)..(156): n is a, c, g, or t
  misc_feature (159)..(162): n is a, c, g, or t
  misc_feature (164)..(164): n is a, c, g, or t
ttgatttgaaacccaatctttttgactctgaaacatcttccttgtcacaggtggagatggagtgggtgaaacaatatgcaatctcttattatccccttttattaccagcatcttcattcagtgagtatattccaaggacagccctggcgtggtccntannnnana

SEQ ID NO: 60404 - DNA, 481 bp, Homo sapiens
attttcattttaaacaaagtcattgagggtaattgaataagctccagcaatatgtgggtgtgaaatagcagttgcttagtcgcacaaagaaaagcaggtttttattacaactttgatgtgtcgtggatgaagaatagaggcctgcactttttccaaaccccgtagttcctcagagagcattctgtgggcaaaggaactgctaatggaggctcgattgtttttcaaccactggtggtggagatttcagctttttgtgtgtaatttgtcccagtccattttctccaaggaaaagaatgtcttgtcagttttctcaaatagaattggatttcctttttagtctgtgaagagaatcaggtcaagtagttaaaccaaagactgtcaagggtaggcatttgagtttttccatctgtgctgtaatacttttggagtccttgtgtttctaaggagtttggcatgctttgttctgtggttcgtagaaagt

SEQ ID NO: 60405 - DNA, 874 bp, Homo sapiens
caaaggggcagctacatgccacaacttttcctgcaaggcctacagagacagagctataggaaggcctctggctctgccttggaccagacaattcctggacagagacctgtttgaagggaaggtctgaataagcttacctgttttgctgctgctgaggccaaatcactctgcttcaaatacgaaggggcagctacattccacgacttttcctgcaaggcctacacagacaaatcaggagggaacagaataccgacgtcacaaagactggcatatcatttggaatttacatttttgttttcctttgaaagtctaccatgaacaggacttctcaattaatcttattcttttaacccaataagctgtatctattatggagaaagatgagactaatggtttgggctaaatgaattcccatccatttgatccaattcttggcccaaaggctctgtgtcccagatcagtgcttctggaagcagaggacaggaaccatgaaaccttcaccagaatgcgcaggcaagccagcttccgggctctaggcactccttgttcccagagccactggactaacccaagccacctagatacttcttccttgactgtggttcttttttcttttcccctatgctcattatgttataagccccaaccactttaccaacatattcaactagaaatcaagcagctttcctagatttctccctctttcaatcttctacattcaaaaccaccactaagagccacgattttaccttccatctctctcctcacctatccatccacatgacctcatctcttgcacaaacttctgtgacagcctcttattttctcagtccttctgaattacagatgtaatcaaatgacattacagaaaacc

SEQ ID NO: 60406 - DNA, 375 bp, Homo sapiens
cctgggagatagaggctacagtaagccgtgtttgtgccacagcattccagcctgagtgacggaaccacactctgcctcaaaaataattttgtaaagagtcacagcctacaaggtggcaatcctgatagctgggaagcatcctcccgcagagcacagaaacagaccttcaagggaggatagaacagggatttatgctgaacgggttggccaagtttatatatttaacaggttataggaggagctatgaatattcacaaagtgggggaggtcatgcacatgcaggctgaataaacatgtatgttacatacttatccatattcacttgtgggtggagacttaacatctaaaaggattacaatgaggccctgtagtcag

SEQ ID NO: 60407 - DNA, 509 bp, Homo sapiens
gcttgaggtcacacattaatgggcaactgaaccagccttgatgctgaaagatcctaatttccagtctagaaatctctccagaaagaaatctctctctgttctgcaaggtactttgtgcttatatgtgtgttgggtccccgcagacctgaaccagaatgtgggtagaattcacccctggcaaaaagagctcctctcttgtaaccacggacttaaccagtctttatctagaatggaatccccttttctagagattgtaggtacctagggtcactgttacctcacaaagggtggaaaaaagaggggaaaaggccctgggctcagaaacacccctgttctcatccctgcgctggcccttgataagctttgtggccttgggcaaatcatgagagctgtctaaactctctgagaaatgtggacgggcacaaccactttgtcgggaagctgaaagcattagcaatgacacgtcgtaggcatcaaggaggcgttcaataaatggtagtttaaaaaca

SEQ ID NO: 60408 - DNA, 2137 bp, Homo sapiens
ggcggccgtcgcgcatgcggggctcacacggctgcagccggcgccgctgccactcccgggagcatgaaggaccgaacccaggagctccgcacggccaaggacagcgatgatgatgatgatgtcgctgtcaccgtggaccgagaccgcttcatggatgagttctttgagcaggtggaggagattcgaggcttcattgacaagatcgcagagaacgtggaggaggtgaagcggaagcacagtgccatcctggcatcccccaaccccgatgagaagacgaaggaggagctggaagaactcatgtccgacataaagaagacagcaaacaaagttcgttccaagttaaagagcatcgagcagtccatcgagcaagaggaaggcctgaaccgctcctccgctgacctgaggatccggaagacacagcactccacgctgtccagaaagtttgtggaggtcatgtcggagtacaacgccacgcagtccgactaccgcgagcgctgcaaaggccgcatccagaggcagctggagatcaccggcaggaccacgaccagtgaggagctggaggacatgctggagagtgggaaccccgccatctttgcctctgggatcatcatggactccagcatctcgaagcaggctctgagcgagattgagacgcggcacagtgagatcatcaagctggagaacagcatccgtgagctacacgacatgttcatggacatggccatgctcgtggagagccagggagagatgattgacaggatcgagtacaatgtggaacacgcggtagactatgtggagagggccgtgtctgacaccaagaaggccgtcaagtaccagagcaaggcgcgccggaagaaaatcatgatcatcatctgctgtgtgatcctgggcatcgtcatcgcctccactgttgggggcatcttcgcctagaagccacccaaactgccactccactccaggtgggccactccaaggaggccctggctgctgccacctggctgggctgccctcccaacccccgcctctggctcagagcaccctccctcccggcccccatgctcccttctctgccatgggccctccgtccccgccccgtgtcgtgtgcatgatctctgtgagtgtgcgtctgtacgggaagaggcagagggaggcagccagcggggcgtgatgcagtgtgcacagcgaggagcagacccaggcagggccgccagggtgacacaggccacccttccttgccttcagtaactcggtgggcccaggttctgctcttccctggggaccctaacctcgcctccagctgacctgccctgtcctctccagctgtccccacaagcagagccctgaggggtggggaccagctggccacatggtgctgcttttcaggttaggggagaggtggccctgagggacagcccagctctgagtctcagtcgctgatcactgccagggaggctcaggctgccatggctccaggctccctcccctgcctaggggcaaagtccatcgggtcctgggcctcagcttcccttcccacattcctccggccccaggagcaaccccttgggctaggtctgaccccaggtgtccctctggaaggggctggctggtgccctatttccagccaccccagcagctagggaggcaaagcaggctgcagtcagtccctcaagccagcgttgcatgtttgggatggtggctcctgttgtcttgcgctctgggaagtcagatgtcatttcaggcctgcagtctcatcctgcccttgccatcctcccatcgatgtgccacgtgggtgtcacgtgtcccagatgcagtattcggcagccagccggggagggctacctcctcctcctcaccaccttggggcttctcatgggaaatgtgcccccgccccaggaccctctcccttgtggacaggcagggagatgcatgcgagtgcatgcagcaggggatggggccgtgtccgtgtgccccaccctccctcggctttactcctgcccagtgactgtgaccactgtccgtgttgccttcttgaacagcgattccccccaaccccttcaccaaaggtcttggtacaaccagctgcccattttgtgaaatttttatgtagaataaacatttgtaatctgtaaaaaaaaaa

SEQ ID NO: 60409 - DNA, 2091 bp, Homo sapiens
ggcggccgtcgcgcatgcggggctcacacggctgcagccggcgccgctgccactcccgggagcatgaaggaccgaacccaggagctccgcacggccaaggacagcgatgatgatgatgatgtcgctgtcaccgtggaccgagaccgcttcatggatgagttctttgagcaggtggaggagattcgaggcttcattgacaagatcgcagagaacgtggaggaggtgaagcggaagcacagtgccatcctggcatcccccaaccccgatgagaagacgaaggaggagctggaagaactcatgtccgacataaagaagacagcaaacaaagttcgttccaagttaaagagcatcgagcagtccatcgagcaagaggaaggcctgaaccgctcctccgctgacctgaggatccggaagacacagcactccacgctgtccagaaagtttgtggaggtcatgtcggagtacaacgccacgcagtccgactaccgcgagcgctgcaaaggccgcatccagaggcagctggagatcaccggcaggaccacgaccagtgaggagctggaggacatgctggagagtgggaaccccgccatctttgcctctgggatcatcatggactccagcatctcgaagcaggctctgagcgagattgagacgcggcacagtgagatcatcaagctggagaacagcatccgtgagctacacgacatgttcatggacatggccatgctcgtggagagccagactatgtggagagggccgtgtctgacaccaagaaggccgtcaagtaccagagcaaggcgcgccggaagaaaatcatgatcatcatctgctgtgtgatcctgggcatcgtcatcgcctccactgttgggggcatcttcgcctagaagccacccaaactgccactccactccaggtgggccactccaaggaggccctggctgctgccacctggctgggctgccctcccaacccccgcctctggctcagagcaccctccctcccggcccccatgctcccttctctgccatgggccctccgtccccgccccgtgtcgtgtgcatgatctctgtgagtgtgcgtctgtacgggaagaggcagagggaggcagccagcggggcgtgatgcagtgtgcacagcgaggagcagacccaggcagggccgccagggtgacacaggccacccttccttgccttcagtaactcggtgggcccaggttctgctcttccctggggaccctaacctcgcctccagctgacctgccctgtcctctccagctgtccccacaagcagagccctgaggggtggggaccagctggccacatggtgctgcttttcaggttaggggagaggtggccctgagggacagcccagctctgagtctcagtcgctgatcactgccagggaggctcaggctgccatggctccaggctccctcccctgcctaggggcaaagtccatcgggtcctgggcctcagcttcccttcccacattcctccggccccaggagcaaccccttgggctaggtctgaccccaggtgtccctctggaaggggctggctggtgccctatttccagccaccccagcagctagggaggcaaagcaggctgcagtcagtccctcaagccagcgttgcatgtttgggatggtggctcctgttgtcttgcgctctgggaagtcagatgtcatttcaggcctgcagtctcatcctgcccttgccatcctcccatcgatgtgccacgtgggtgtcacgtgtcccagatgcagtattcggcagccagccggggagggctacctcctcctcctcaccaccttggggcttctcatgggaaatgtgcccccgccccaggaccctctcccttgtggacaggcagggagatgcatgcgagtgcatgcagcaggggatggggccgtgtccgtgtgccccaccctccctcggctttactcctgcccagtgactgtgaccactgtccgtgttgccttcttgaacagcgattccccccaaccccttcaccaaaggtcttggtacaaccagctgcccattttgtgaaatttttatgtagaataaacatttgtaatctgtaaaaaaaaaa

SEQ ID NO: 60410 - DNA, 2100 bp, Homo sapiens
ccaggctggtacgccccgagttacgggatgaaggacgaacccaggagctccgcacggccaaggacagcgatgatgatgatgatgtcgctgtcaccgtggaccgagaccgcttcatggatgagttctttgagcaggtggaggagattcgaggcttcattgacaagatcgcagagaacgtggaggaggtgaagcggaagcacagtgccatcctggcatcccccaaccccgatgagaagacgaaggaggagctggaagaactcatgtccgacataaagaagacagcaaacaaagttcgttccaagttaaagagcatcgagcagtccatcgagcaagaggaaggcctgaaccgctcctccgctgacctgaggatccggaagacacagcactccacgctgtccagaaagtttgtggaggtcatgtcggagtacaacgccacgcagtccgactaccgcgagcgctgcaaaggccgcatccagaggcagctggagatcaccggcaggaccacgaccagtgaggagctggaggacatgctggagagtgggaaccccgccatctttgcctctgggatcatcatggactccagcatctcgaagcaggctctgagcgagattgagacgcggcacagtgagatcatcaagctggagaacagcatccgtgagctacacgacatgttcatggacatggccatgctcgtggagagccagggagagatgattgacaggatcgagtacaatgtggaacacgcggtagactatgtggagagggccgtgtctgacaccaagaaggccgtcaagtaccagagcaaggcgcgccggaagaaaatcatgatcatcatctgctgtgtgatcctgggcatcgtcatcgcctccactgttgggggcatcttcgcctagaagccacccaaactgccactccactccaggtgggccactccaaggaggccctggctgctgccacctggctgggctgccctcccaacccccgcctctggctcagagcaccctccctcccggcccccatgctcccttctctgccatgggccctccgtccccgccccgtgtcgtgtgcatgatctctgtgagtgtgcgtctgtacgggaagaggcagagggaggcagccagcggggcgtgatgcagtgtgcacagcgaggagcagacccaggcagggccgccagggtgacacaggccacccttccttgccttcagtaactcggtgggcccaggttctgctcttccctggggaccctaacctcgcctccagctgacctgccctgtcctctccagctgtccccacaagcagagccctgaggggtggggaccagctggccacatggtgctgcttttcaggttaggggagaggtggccctgagggacagcccagctctgagtctcagtcgctgatcactgccagggaggctcaggctgccatggctccaggctccctcccctgcctaggggcaaagtccatcgggtcctgggcctcagcttcccttcccacattcctccggccccaggagcaaccccttgggctaggtctgaccccaggtgtccctctggaaggggctggctggtgccctatttccagccaccccagcagctagggaggcaaagcaggctgcagtcagtccctcaagccagcgttgcatgtttgggatggtggctcctgttgtcttgcgctctgggaagtcagatgtcatttcaggcctgcagtctcatcctgcccttgccatcctcccatcgatgtgccacgtgggtgtcacgtgtcccagatgcagtattcggcagccagccggggagggctacctcctcctcctcaccaccttggggcttctcatgggaaatgtgcccccgccccaggaccctctcccttgtggacaggcagggagatgcatgcgagtgcatgcagcaggggatggggccgtgtccgtgtgccccaccctccctcggctttactcctgcccagtgactgtgaccactgtccgtgttgccttcttgaacagcgattccccccaaccccttcaccaaaggtcttggtacaaccagctgcccattttgtgaaatttttatgtagaataaacatttgtaatctgtaaaaaaaaaa

SEQ ID NO: 60411 - DNA, 2343 bp, Homo sapiens
ggcggccgtcgcgcatgcggggctcacacggctgcagccggcgccgctgccactcccgggagcatgaaggaccgaacccaggagctccgcacggccaaggacagcgatgatgatgatgatgtcgctgtcaccgtggaccgagaccgcttcatggatgagttctttgagcaggtggaggagattcgaggcttcattgacaagatcgcagagaacgtggaggaggtgaagcggaagcacagtgccatcctggcatcccccaaccccgatgagaagacgaaggaggagctggaagaactcatgtccgacataaagaagacagcaaacaaagttcgttccaagttaaagagcatcgagcagtccatcgagcaagaggaaggcctgaaccgctcctccgctgacctgaggatccggaagacacagcactccacgctgtccagaaagtttgtggaggtcatgtcggagtacaacgccacgcagtccgactaccgcgagcgctgcaaaggccgcatccagaggcagctggagatcaccggcaggaccacgaccagtgaggagctggaggacatgctggagagtgggaaccccgccatctttgcctctgggatcatcatggactccagcatctcgaagcaggctctgagcgagattgagacgcggcacagtgagatcatcaagctggagaacagcatccgtgagctacacgacatgttcatggacatggccatgctcgtggagagccaggtgagtgccgggcccccctgccctccactccagcccacaccagcacccagggctgcactaacctcgccctttctgcccgacacgctgccctgccggggagggaccaagttctcagcctcagggtgctttcctgaagtcctgccccgagccccaacccaaccctgaggagggggccctctggagctcgggtgcccccggccccgcagggagagatgattgacaggatcgagtacaatgtggaacacgcggtagactatgtggagagggccgtgtctgacaccaagaaggccgtcaagtaccagagcaaggcgcgccggaagaaaatcatgatcatcatctgctgtgtgatcctgggcatcgtcatcgcctccactgttgggggcatcttcgcctagaagccacccaaactgccactccactccaggtgggccactccaaggaggccctggctgctgccacctggctgggctgccctcccaacccccgcctctggctcagagcaccctccctcccggcccccatgctcccttctctgccatgggccctccgtccccgccccgtgtcgtgtgcatgatctctgtgagtgtgcgtctgtacgggaagaggcagagggaggcagccagcggggcgtgatgcagtgtgcacagcgaggagcagacccaggcagggccgccagggtgacacaggccacccttccttgccttcagtaactcggtgggcccaggttctgctcttccctggggaccctaacctcgcctccagctgacctgccctgtcctctccagctgtccccacaagcagagccctgaggggtggggaccagctggccacatggtgctgcttttcaggttaggggagaggtggccctgagggacagcccagctctgagtctcagtcgctgatcactgccagggaggctcaggctgccatggctccaggctccctcccctgcctaggggcaaagtccatcgggtcctgggcctcagcttcccttcccacattcctccggccccaggagcaaccccttgggctaggtctgaccccaggtgtccctctggaaggggctggctggtgccctatttccagccaccccagcagctagggaggcaaagcaggctgcagtcagtccctcaagccagcgttgcatgtttgggatggtggctcctgttgtcttgcgctctgggaagtcagatgtcatttcaggcctgcagtctcatcctgcccttgccatcctcccatcgatgtgccacgtgggtgtcacgtgtcccagatgcagtattcggcagccagccggggagggctacctcctcctcctcaccaccttggggcttctcatgggaaatgtgcccccgccccaggaccctctcccttgtggacaggcagggagatgcatgcgagtgcatgcagcaggggatggggccgtgtccgtgtgccccaccctccctcggctttactcctgcccagtgactgtgaccactgtccgtgttgccttcttgaacagcgattccccccaaccccttcaccaaaggtcttggtacaaccagctgcccattttgtgaaatttttatgtagaataaacatttgtaatctgtaaaaaaaaaa

SEQ ID NO: 60412 - DNA, 2228 bp, Homo sapiens
ggcggccgtcgcgcatgcggggctcacacggctgcagccggcgccgctgccactcccgggagcatgaaggaccgaacccaggagctccgcacggccaaggacagcgatgatgatgatgatgtcgctgtcaccgtggaccgagaccgcttcatggatgagttctttgagcaggtggaggagattcgaggcttcattgacaagatcgcagagaacgtggaggaggtgaagcggaagcacagtgccatcctggcatcccccaaccccgatgagaagacgaaggaggagctggaagaactcatgtccgacataaagaagacagcaaacaaagttcgttccaagttaaagagcatcgagcagtccatcgagcaagaggaaggcctgaaccgctcctccgctgacctgaggatccggaagacacagcactccacgctgtccagaaagtttgtggaggtcatgtcggagtacaacgccacgcagtccgactaccgcgagcgctgcaaaggccgcatccagaggcagctggagatcaccggcaggaccacgaccagtgaggagctggaggacatgctggagagtgggaaccccgccatctttgcctctgggatcatcatggactccagcatctcgaagcaggctctgagcgagattgagacgcggcacagtgagatcatcaagctggagaacagcatccgtgagctacacgacatgttcatggacatggccatgctcgtggagagccagcctcagggtgctttcctgaagtcctgccccgagccccaacccaaccctgaggagggggccctctggagctcgggtgcccccggccccgcagggagagatgattgacaggatcgagtacaatgtggaacacgcggtagactatgtggagagggccgtgtctgacaccaagaaggccgtcaagtaccagagcaaggcgcgccggaagaaaatcatgatcatcatctgctgtgtgatcctgggcatcgtcatcgcctccactgttgggggcatcttcgcctagaagccacccaaactgccactccactccaggtgggccactccaaggaggccctggctgctgccacctggctgggctgccctcccaacccccgcctctggctcagagcaccctccctcccggcccccatgctcccttctctgccatgggccctccgtccccgccccgtgtcgtgtgcatgatctctgtgagtgtgcgtctgtacgggaagaggcagagggaggcagccagcggggcgtgatgcagtgtgcacagcgaggagcagacccaggcagggccgccagggtgacacaggccacccttccttgccttcagtaactcggtgggcccaggttctgctcttccctggggaccctaacctcgcctccagctgacctgccctgtcctctccagctgtccccacaagcagagccctgaggggtggggaccagctggccacatggtgctgcttttcaggttaggggagaggtggccctgagggacagcccagctctgagtctcagtcgctgatcactgccagggaggctcaggctgccatggctccaggctccctcccctgcctaggggcaaagtccatcgggtcctgggcctcagcttcccttcccacattcctccggccccaggagcaaccccttgggctaggtctgaccccaggtgtccctctggaaggggctggctggtgccctatttccagccaccccagcagctagggaggcaaagcaggctgcagtcagtccctcaagccagcgttgcatgtttgggatggtggctcctgttgtcttgcgctctgggaagtcagatgtcatttcaggcctgcagtctcatcctgcccttgccatcctcccatcgatgtgccacgtgggtgtcacgtgtcccagatgcagtattcggcagccagccggggagggctacctcctcctcctcaccaccttggggcttctcatgggaaatgtgcccccgccccaggaccctctcccttgtggacaggcagggagatgcatgcgagtgcatgcagcaggggatggggccgtgtccgtgtgccccaccctccctcggctttactcctgcccagtgactgtgaccactgtccgtgttgccttcttgaacagcgattccccccaaccccttcaccaaaggtcttggtacaaccagctgcccattttgtgaaatttttatgtagaataaacatttgtaatctgtaaaaaaaaaa

SEQ ID NO: 60413 - DNA, 1685 bp, Homo sapiens
aaattagcttaggtcgagcccgggtggtaaatcggcgaggcgccatatttgccctctgggatcatcatggactccagcatctcgaagcaggctctgagcgagattgagacgcggcacagtgagatcatcaagctggagaacagcatccgtgagctacacgacatgttcatggacatggccatgctcgtggagagccagcctcagggtgctttcctgaagtcctgccccgagccccaacccaaccctgaggagggggccctctggagctcgggtgcccccggccccgcagggagagatgattgacaggatcgagtacaatgtggaacacgcggtagactatgtggagagggccgtgtctgacaccaagaaggccgtcaagtaccagagcaaggcgcgccggaagaaaatcatgatcatcatctgctgtgtgatcctgggcatcgtcatcgcctccactgttgggggcatcttcgcctagaagccacccaaactgccactccactccaggtgggccactccaaggaggccctggctgctgccacctggctgggctgccctcccaacccccgcctctggctcagagcaccctccctcccggcccccatgctcccttctctgccatgggccctccgtccccgccccgtgtcgtgtgcatgatctctgtgagtgtgcgtctgtacgggaagaggcagagggaggcagccagcggggcgtgatgcagtgtgcacagcgaggagcagacccaggcagggccgccagggtgacacaggccacccttccttgccttcagtaactcggtgggcccaggttctgctcttccctggggaccctaacctcgcctccagctgacctgccctgtcctctccagctgtccccacaagcagagccctgaggggtggggaccagctggccacatggtgctgcttttcaggttaggggagaggtggccctgagggacagcccagctctgagtctcagtcgctgatcactgccagggaggctcaggctgccatggctccaggctccctcccctgcctaggggcaaagtccatcgggtcctgggcctcagcttcccttcccacattcctccggccccaggagcaaccccttgggctaggtctgaccccaggtgtccctctggaaggggctggctggtgccctatttccagccaccccagcagctagggaggcaaagcaggctgcagtcagtccctcaagccagcgttgcatgtttgggatggtggctcctgttgtcttgcgctctgggaagtcagatgtcatttcaggcctgcagtctcatcctgcccttgccatcctcccatcgatgtgccacgtgggtgtcacgtgtcccagatgcagtattcggcagccagccggggagggctacctcctcctcctcaccaccttggggcttctcatgggaaatgtgcccccgccccaggaccctctcccttgtggacaggcagggagatgcatgcgagtgcatgcagcaggggatggggccgtgtccgtgtgccccaccctccctcggctttactcctgcccagtgactgtgaccactgtccgtgttgccttcttgaacagcgattccccccaaccccttcaccaaaggtcttggtacaaccagctgcccattttgtgaaatttttatgtagaataaacatttgtaatctgtaaaaaaaaaa

SEQ ID NO: 60414 - DNA, 1676 bp, Homo sapiens
gatagctaggtacgaggccgggtatcggccgaggcgcatctttgctctgggatcatcatggactccagcatctcgaagcaggctctgagcgagattgagacgcggcacagtgagatcatcaagctggagaacagcatccgtgagctacacgacatgttcatggacatggccatgctcgtggagagccagcctcagggtgctttcctgaagtcctgccccgagccccaacccaaccctgaggagggggccctctggagctcgggtgcccccggccccgcagggagagatgattgacaggatcgagtacaatgtggaacacgcggtagactatgtggagagggccgtgtctgacaccaagaaggccgtcaagtaccagagcaaggcgcgccggaagaaaatcatgatcatcatctgctgtgtgatcctgggcatcgtcatcgcctccactgttgggggcatcttcgcctagaagccacccaaactgccactccactccaggtgggccactccaaggaggccctggctgctgccacctggctgggctgccctcccaacccccgcctctggctcagagcaccctccctcccggcccccatgctcccttctctgccatgggccctccgtccccgccccgtgtcgtgtgcatgatctctgtgagtgtgcgtctgtacgggaagaggcagagggaggcagccagcggggcgtgatgcagtgtgcacagcgaggagcagacccaggcagggccgccagggtgacacaggccacccttccttgccttcagtaactcggtgggcccaggttctgctcttccctggggaccctaacctcgcctccagctgacctgccctgtcctctccagctgtccccacaagcagagccctgaggggtggggaccagctggccacatggtgctgcttttcaggttaggggagaggtggccctgagggacagcccagctctgagtctcagtcgctgatcactgccagggaggctcaggctgccatggctccaggctccctcccctgcctaggggcaaagtccatcgggtcctgggcctcagcttcccttcccacattcctccggccccaggagcaaccccttgggctaggtctgaccccaggtgtccctctggaaggggctggctggtgccctatttccagccaccccagcagctagggaggcaaagcaggctgcagtcagtccctcaagccagcgttgcatgtttgggatggtggctcctgttgtcttgcgctctgggaagtcagatgtcatttcaggcctgcagtctcatcctgcccttgccatcctcccatcgatgtgccacgtgggtgtcacgtgtcccagatgcagtattcggcagccagccggggagggctacctcctcctcctcaccaccttggggcttctcatgggaaatgtgcccccgccccaggaccctctcccttgtggacaggcagggagatgcatgcgagtgcatgcagcaggggatggggccgtgtccgtgtgccccaccctccctcggctttactcctgcccagtgactgtgaccactgtccgtgttgccttcttgaacagcgattccccccaaccccttcaccaaaggtcttggtacaaccagctgcccattttgtgaaatttttatgtagaataaacatttgtaatctgtaaaaaaaaaa

SEQ ID NO: 60415 - DNA, 1972 bp, Homo sapiens
ggcggccgtcgcgcatgcggggctcacacggctgcagccggcgccgctgccactcccgggagcatgaaggaccgaacccaggagctccgcacggccaaggacagcgatgatgatgatgatgtcgctgtcaccgtggaccgagaccgcttcatggatgagttctttgagcaggtggaggagattcgaggcttcattgacaagatcgcagagaacgtggaggaggtgaagcggaagcacagtgccatcctggcatcccccaaccccgatgagaagacgaaggaggagctggaagaactcatgtccgacataaagaagacagcaaacaaagttcgttccaagttaaagagcatcgagcagtccatcgagcaagaggaaggcctgaaccgctcctccgctgacctgaggatccggaagacacagcactccacgctgtccagaaagtttgtggaggtcatgtcggagtacaacgccacgcagtccgactaccgcgagcgctgcaaaggccgcatccagaggcagctggagatcaccggcaggaccacgaccagtgaggagctggaggacatgctggagagtgggaaccccgccatctttgcctctgggatcatcatggactccagcatctcgaagcaggctctgagcgagattgagacgcggcacagtgagatcatcaagctggagaacagcatccgtgagctacacgacatgttcatggacatggccatgctcgtggagagccagggagagatgattgacaggatcgagtacaatgtggaacacgcggtagactatgtggagagggccgtgtctgacaccaagaaggccgtcaagtaccagagcaaggcgcgccggaagaaaatcatgatcatcatctgctgtgtgatcctgggcatcgtcatcgcctccactgttgggggcatcttcgcctagaagccacccaaactgccactccactccaggtgggccactccaaggaggccctggctgctgccacctggctgggctgccctcccaacccccgcctctggctcagagcaccctccctcccggcccccatgctcccttctctgccatgggccctccgtccccgccccgtgtcgtgtgcatgatctctgtgagtgtgcgtctgtacgggaagaggcagagggaggcagccagcggggcgtgatgcagtgtgcacagcgaggagcagacccaggcagggccgccagggtgacacaggccacccttccttgccttcagtaactcggtgggcccaggttctgctcttccctggggaccctaacctcgcctccagctgacctgccctgtcctctccagctgtccccacaagcagagccctgaggggtggggaccagctggccacatggtgctgcttttcaggttaggggagaggtggccctgagggacagcccagctctgagtctcagtcgctgatcactgccagggaggctcaggctgccatggctccaggctccctcccctgcctaggggcaaagtccatcgggtcctgggcctcagcttcccttcccacattcctccggccccaggagcaaccccttgggctaggtctgaccccaggtgtccctctggaaggggctggctggtgccctatttccagccaccccagcagctagggaggcaaagcaggctgcagtcagtccctcaagccagcgttgcatgtttgggatggtggctcctgttgtcttgcgctctgggaagtcagatgtcatttcaggcctgcagtctcatcctgcccttgccatcctcccatcgatgtgccacgtgggtgtcacgtgtcccagatgcagtactcggctttactcctgcccagtgactgtgaccactgtccgtgttgccttcttgaacagcgattccccccaaccccttcaccaaaggtcttggtacaaccagctgcccattttgtgaaatttttatgtagaataaacatttgtaatctgtaaaaaaaaaa

SEQ ID NO: 60416 - DNA, 1260 bp, Homo sapiens
ggcggccgtcgcgcatgcggggctcacacggctgcagccggcgccgctgccactcccgggagcatgaaggaccgaacccaggagctccgcacggccaaggacagcgatgatgatgatgatgtcgctgtcaccgtggaccgagaccgcttcatggatgagttctttgagcaggtggaggagattcgaggcttcattgacaagatcgcagagaacgtggaggaggtgaagcggaagcacagtgccatcctggcatcccccaaccccgatgagaagacgaaggaggagctggaagaactcatgtccgacataaagaagacagcaaacaaagttcgttccaagttaaagagcatcgagcagtccatcgagcaagaggaaggcctgaaccgctcctccgctgacctgaggatccggaagacacagcactccacgctgtccagaaagtttgtggaggtcatgtcggagtacaacgccacgcagtccgactaccgcgagcgctgcaaaggccgcatccagaggcagctggagatcaccggcaggaccacgaccagtgaggagctggaggacatgctggagagtgggaaccccgccatctttgcctctgggatcatcatggactccagcatctcgaagcaggctctgagcgagattgagacgcggcacagtgagatcatcaagctggagaacagcatccgtgagctacacgacatgttcatggacatggccatgctcgtggagagccaggtgagtgccgggcccccctgccctccactccagcccacaccagcacccagggctgcactaacctcgccctttctgcccgacacgctgccctgccggggagggaccaagttctcagcctcagggtgctttcctgaagtcctgccccgagccccaacccaaccctgaggagggggccctctggagctcgggtgcccccggccccgcagggagagatgattgacaggatcgagtacaatgtggaacacgcggtagactatgtggagagggccgtgtctgacaccaagaaggccgtcaagtaccagagcaaggcgcgccggaaggaacagtcatgatcatacatctgctgtgtgatccatgggcaatcgacaatcgcactccaacatgtaggagggacatcataacagacatagaaagacgcacaccacaactgacacatccaactccagagtgaggcacaatcacaaaggaacgaaccatgacatgatgcacaacatggcatgcgacagcacaacacaaaaa

SEQ ID NO: 60417 - DNA, 588 bp, Homo sapiens
ggcggccgtcgcgcatgcggggctcacacggctgcagccggcgccgctgccactcccgggagcatgaaggaccgaacccaggagctccgcacggccaaggacagcgatgatgatgatgatgtcgctgtcaccgtggaccgagaccgcttcatggatgagttctttgagcaggtggaggagattcgaggcttcattgacaagatcgcagagaacgtggaggaggtgaagcggaagcacagtgccatcctggcatcccccaaccccgatgagaagacgaaggaggagctggaagaactcatgtccgacataaagaagacagcaaacaaagttcgttccaagttaaagagtgagtcaggcttgtctgggggtgggtggggggcattctaggcctgcttcctctgcggatcccatggggttttgctcgccctgagggggtgcgccggatcttgctttcctttctgagggtggcgtcatgtgcccattcactcagcagctacttggcaaggcccgttggtgccagactctggatgggcactgcccctcacctctgctaaagagggttgaagaagtggccagtacttcctggtc

SEQ ID NO: 60418 - DNA, 876 bp, Homo sapiens
ggcggccgtcgcgcatgcggggctcacacggctgcagccggcgccgctgccactcccgggagcatgaaggaccgaacccaggagctccgcacggccaaggacagcgatgatgatgatgatgtcgctgtcaccgtggaccgagaccgcttcatggatgagttctttgagcaggtggaggagattcgaggcttcattgacaagatcgcagagaacgtggaggaggtgaagcggaagcacagtgccatcctggcatcccccaaccccgatgagaagacgaaggaggagctggaagaactcatgtccgacataaagaagacagcaaacaaagttcgttccaagttaaagagcatcgagcagtccatcgagcaagaggaaggcctgaaccgctcctccgctgacctgaggatccggaagacacagcactccacgctgtccagaaagtttgtggaggtcatgtcggagtacaacgccacgcagtccgactaccgcgagcgctgcaaaggccgcatccagaggcagctggagatcaccggcaggaccacgaccagtgaggagctggaggacatgctggagagtgggaaccccgccatctttgcctctgggttctcatgggaaatgtgcccccgccccaggaccctctcccttgtggacaggcagggagatgcatgcgagtgcatgcagcaggggatggggccgtgtccgtgtgccccaccctccctcggctttactcctgcccagtgactgtgaccactgtccgtgttgccttcttgaacagcgattccccccaaccccttcaccaaaggtcttggtacaaccagctgcccattttgtgaaatttttatgtagaataaacatttgtaatctgtaaaaaaaaaa

SEQ ID NO: 60419 - DNA, 1053 bp, Homo sapiens
ggcggccgtcgcgcatgcggggctcacacggctgcagccggcgccgctgccactcccgggagcatgaaggaccgaacccaggagctccgcacggccaaggacagcgatgatgatgatgatgtcgctgtcaccgtggaccgagaccgcttcatggatgagttctttgagcaggtggaggagattcgaggcttcattgacaagatcgcagagaacgtggaggaggtgaagcggaagcacagtgccatcctggcatcccccaaccccgatgagaagacgaaggaggagctggaagaactcatgtccgacataaagaagacagcaaacaaagttcgttccaagttaaagagcatcgagcagtccatcgagcaagaggaaggcctgaaccgctcctccgctgacctgaggatccggaagacacaggtgcggccacggagtctaggatgggcgggcacctgagtctctgggtcggtccccgcagggcctgacccctgcacctccatctcgggcccccagcactccacgctgtccagaaagtttgtggaggtcatgtcggagtacaacgccacgcagtccgactaccgcgagcgctgcaaaggccgcatccagaggcagctggagatcaccggcaggaccacgaccagtgaggagctggaggacatgctggagagtgggaaccccgccatctttgcctctgggatcatcatggactccagcatctcgaagcaggctctgagcgagattgagacgcggcacagtgagatcatcaagctggagaacagcatccgtgagctacacgacatgttcatggacatggccatgctcgtggagagccagcctcagggtgctttcctgaagtcctgccccgagccccaacccaaccctgaggagggggccctctggagctcgggtgcccccggccccgcagggagagatgattgacaggatcgagtacaatgtggaacacgcggtagactatgtggagagggccgtgtctgacaccaagaaggccgtcaagtaccagagcaaggcgcgccgggtcagtagcccagccct

SEQ ID NO: 60420 - DNA, 417 bp, Homo sapiens
taaagaagacagcaaacaaagttcgttccaagttaaagagtgagtcaggcttgtctgggggtgggtggggggcattctaggcctgcttcctctgcggatcccatggggttttgctcgccctgagggggtgcgccggatcttgctttcctttctgagggtggcgtcatgtgcccattcactcagcagctacttggcaaggcccgttggtgccagacctgggctgggcccagggacacacccacctaaggctttggcgagggagggctccactctggatgggcactgcccctcacctctgctaaagagggttgaagaagtggccagtacttcctggtctcttgcagaagcccggtattctgggtgaacagacacgtgcaccccatgagtgccaaggcctcggggccacatgccctgcag

SEQ ID NO: 60421 - DNA, 304 bp, Homo sapiens
aggggagatgaagattcttggcagctgtgacagcgtgcaaggagggtcttgaagaattagcagcaaggagagtagcaagcacaggctgaggaggtgcctgggactcaaatgatagggattttaaggaataataatcatgacacaatttatgccacacgcctcagccctcaccactgcagtgcaccctagaagcccagaaagagcctgtccagatgcagggcaggctgaaactgctggggagctaactcccccaaaacattccccagcagcagcctggcttccttacatctcaggtagggcagct

SEQ ID NO: 60422 - DNA, 361 bp, Homo sapiens
ttgaatctgtatagaccaaattggggagtattgtcatctcagcaatattaaggcttccagtctgtgaccatgaagataccttactgaagtcttctttacttaaaccatttatttaggtctttaatttctttcagtggtttatagttagttattagtatacaaatcttaaacttattttgtttttaagtgttttattctaaatacaattctaagtattttattcttttcgatggtattataaatgaatgtatgttttcttagcttaacttttgggttgtttattgctagtgtatagagatatgattggtgacgaggcatggtggctcatgcctgtatttcccacacgttaggaggctgaggt

SEQ ID NO: 60423 - DNA, 242 bp, Homo sapiens
ggaataagttagaaaagtttatttaataaacataattaaacagattctctaaactagaaataacattcagtttcaggaaaccagaattagacccctccaagacctttgagaatatctaattcacctatgtattataaacaagaaaaatgaaacagagagataacacactctgcccactcccttttcaaaatcatgtgagtgatagtaacagactccttgaggcaagattattactgtaatag

SEQ ID NO: 60424 - DNA, 470 bp, Homo sapiens
cagatcccatttttctatggcttgcttggttcaagctatcaccatcatcatcaatatcattatcatttttgccctaagactgagatgtccctgtaagtcaacctgtcaggatgagctgtatgtgaacattcaaatttagaaggcagttgtctttgaaaacagcttctattagggtgtaagtaaaacaacatgggctgggtgtggtggctcacgcctgtaataccagcactttggaaggccaaggcgggaggatcacccgaggtcaggagtttgagacgagcctggccaacagggtgaaaccccgtctctactaaaaatacaaaaattagcaaggcatggtggcctgtgcctgtaatcccagctacttgggagactgaggcaagagaatcacttgaacccaggggtcggaggttgcagtgagctgagatcatgccagcgcactcctgcctgggtgacaagagcaagacttt

SEQ ID NO: 60425 - DNA, 325 bp, Homo sapiens
gccacaggcaccataggctgcgggttggacaagcttggtttataggcctcatatgtggtggggctgctgttttaaaagtctcatcagtgcagattttacttattgcatgaagattggtatttaagttgagatgaagggtagtatattttgtttgagatcattacacttgtgaagagttaattgagttgcatgtttttcacgtattatttagtcatacctttatcatgacaggatgattctgcttcacaacttctttctgtttttaaggaaaggggctgggcatggtggttcaaccctataatcccagcacttttggaggcggaga

SEQ ID NO: 60426 - DNA, 2184 bp, Homo sapiens
ctctaaagcaattctcgtgtaaaaaggcattttactccgcgcgtcttccttacagccatttagttgggagtttgcggtgggcagggggagggagaagaaacgcctgctctgaatcggaaaacaccgaagagaccagaccatctctttcagcagcaggaaagagaggagccgtcgcaggagccgcacacgtctccaactctctattgctttttgcgcacattcctaacttcctgacgtccatcccagcgggcaggcatggggtgtttgggcggcaacagcaagacgacggaagaccagggcgtcgatgaaaaagaacgacgcgaggccaacaaaaagatcgagaagcagttgcagaaagagcgcctggcttacaaggctacccaccgcctgctgctcctgggggctggtgagtctgggaaaagcactatcgtcaaacagatgaggatcctgcacgtcaatgggtttaatcccgaggaaaagaaacagaaaattctggacatccggaaaaatgttaaagatgctatcgtgacaattgtttcagcaatgagtactataatacctccagttccgctggccaaccctgaaaaccaatttcgatcagactacatcaagagcatagcccctatcactgactttgaatattcccaggaattctttgaccatgtgaaaaaactttgggacgatgaaggcgtgaaggcatgctttgagagatccaacgaataccagctgattgactgtgcacaatacttcctggaaagaatcgacagcgtcagcttggttgactacacacccacagaccaggacctcctcagatgcagagttctgacatctgggatttttgagacacgattccaagtggacaaagtaaacttccacatgtttgatgttggtggccagagggatgagaggagaaaatggatccagtgctttaacgatgtcacagctatcatttacgtcgcagcctgcagtagctacaacatggtgattcgagaagataacaacaccaacaggctgagagagtccctggatctttttgaaagcatctggaacaacaggtggttacggaccatttctatcatcttgttcttgaacaaacaagatatgctggcagaaaaagtcttggcagggaaatcaaaaattgaagactatttcccagaatatgcaaattatactgttcctgaagacgcaacaccagatgcaggagaagatcccaaagttacaagagccaagttctttatccgggacctgtttttgaggatcagcacggccaccggtgacggcaaacattactgctacccgcacttcacctgcgccgtggacacagagaacatccgcagggtgttcaacgactgccgcgacatcatccagcggatgcacctcaagcagtatgagctcttgtgaggacttggccgccaccctgcgacggagcggcgcccccggactgcctgactgccagccccatgccatggtaggaggcagagtctctagttccatctcgctgccgtctgtcccgttctgtgtcgaccaccaagcctctggctacctctgtcccctcaggtttggttgtgtagcttctgttgtcattgaatacggcttcccgcagcatcccacccccaaaccaccgactctcattgccgacactgcagcagaatctctccgggtgggagcccaattattcattctccctttattgattcatcgaggagaacttggtagatggggagaaaaacacagttggtttttttttccacgttatcaaccgtgactgcaagagcgttcgtgcatgccctgagccacggccgtctctgattctccctttatgaagctgcaggctgacgagagatggtcccttcccattggccttagcccaagacttggagtcgaccccaagcgacagagtgaccagaaacccttttacagtcacattcagagtcgctgctggcctcaggcatttgaattagagctactttgagcctcttaggcagaaaacctaccacattcactactgcaaaatgtgtcctgtctaaaaatgattctctaaactttccctatacttaggcatagtcttctttcttagattctctttgttgttgtccctattgctggtttattacactgtacagaccacaaaatgtaatattcttttgtataactactaaagaaaaatccttgtagatctttgtg

SEQ ID NO: 60427 - DNA, 907 bp, Homo sapiens
cgcggaggcccgtcggttcggtccgctctgggcgttagcaagtgatctccagccaaggcggccgccaccccttgcacacagcagaaaatgcaaaatgaccctctggggcagtgaggggctgtggccctcggccccggcctgccgcacccccttcccgcagctggcggccggcagcgccgaacagggtccgggtgcagccctctcccgcccctccgctgaggcgccggcctgaactgggcgcgggaaccaggccgccctcggcgcccagcccgccctagtcccgcgcgccgcccccgctgtgccgcgcccacatgggtctgtgctacagtctgcggccgctgcttttcgggggcccagggacgacccctgcgcggcctcggagccgccggtggaggacgcgcagcccgccccggccccggccctggccccagtccgggcggccgcaagggacacggcccggaccctgctccctcggggcggcgaagggagcccggcatgcgctcggcccaaagcagacaagccgaaggagaagcggcagcgcaccgagcagctgagtgccgaggagcgcgaggcggccaaggagcgcgaggcggtcaaggaggcgaggaaagtgagccggggcatcgaccgcatgctgcgcgaccagaagcgcgacctgcagcagacgcaccggctcctgctgctcggtacttcgggagcatctagagggcgtgatttggagtctgctagccaggaggccacaggagaaacacaggtcagccccagaatcatggagcacacatttgcctcgaccccagctgtattttcttttctgggaaaatatcagcccctggaattaggccagacacaggaatctgtagatacaaagctcgctagcagagcaagactcagaacgcaagagtggcac

SEQ ID NO: 60428 - DNA, 2470 bp, Homo sapiens
cgcggaggcccgtcggttcggtccgctctgggcgttagcaagtgatctccagccaaggcggccgccaccccttgcacacagcagaaaatgcaaaatgaccctctggggcagtgaggggctgtggccctcggccccggcctgccgcacccccttcccgcagctggcggccggcagcgccgaacagggtccgggtgcagccctctcccgcccctccgctgaggcgccggcctgaactgggcgcgggaaccaggccgccctcggcgcccagcccgccctagtcccgcgcgccgcccccgctgtgccgcgcccacatgggtctgtgctacagtctgcggccgctgcttttcgggggcccagggacgacccctgcgcggcctcggagccgccggtggaggacgcgcagcccgccccggccccggccctggccccagtccgggcggccgcaagggacacggcccggaccctgctccctcggggcggcgaagggagcccggcatgcgctcggcccaaagcagacaagccgaaggagaagcggcagcgcaccgagcagctgagtgccgaggagcgcgaggcggccaaggagcgcgaggcggtcaaggaggcgaggaaagtgagccggggcatcgaccgcatgctgcgcgaccagaagcgcgacctgcagcagacgcaccggctcctgctgctcggggctggtgagtctgggaaaagcactatcgtcaaacagatgaggatcctgcacgtcaatgggtttaatcccgaggaaaagaaacagaaaattctggacatccggaaaaatgttaaagatgctatcgtgacaattgtttcagcaatgagtactataatacctccagttccgctggccaaccctgaaaaccaatttcgatcagactacatcaagagcatagcccctatcactgactttgaatattcccaggaattctttgaccatgtgaaaaaactttgggacgatgaaggcgtgaaggcatgctttgagagatccaacgaataccagctgattgactgtgcacaatacttcctggaaagaatcgacagcgtcagcttggttgactacacacccacagaccaggacctcctcagatgcagagttctgacatctgggatttttgagacacgattccaagtggacaaagtaaacttccacatgtttgatgttggtggccagagggatgagaggagaaaatggatccagtgctttaacgatgtcacagctatcatttacgtcgcagcctgcagtagctacaacatggtgattcgagaagataacaacaccaacaggctgagagagtccctggatctttttgaaagcatctggaacaacaggtggttacggaccatttctatcatcttgttcttgaacaaacaagatatgctggcagaaaaagtcttggcagggaaatcaaaaattgaagactatttcccagaatatgcaaattatactgttcctgaagacgcaacaccagatgcaggagaagatcccaaagttacaagagccaagttctttatccgggacctgtttttgaggatcagcacggccaccggtgacggcaaacattactgctacccgcacttcacctgcgccgtggacacagagaacatccgcagggtgttcaacgactgccgcgacatcatccagcggatgcacctcaagcagtatgagctcttgtgaggacttggccgccaccctgcgacggagcggcgcccccggactgcctgactgccagccccatgccatggtaggaggcagagtctctagttccatctcgctgccgtctgtcccgttctgtgtcgaccaccaagcctctggctacctctgtcccctcaggtttggttgtgtagcttctgttgtcattgaatacggcttcccgcagcatcccacccccaaaccaccgactctcattgccgacactgcagcagaatctctccgggtgggagcccaattattcattctccctttattgattcatcgaggagaacttggtagatggggagaaaaacacagttggtttttttttccacgttatcaaccgtgactgcaagagcgttcgtgcatgccctgagccacggccgtctctgattctccctttatgaagctgcaggctgacgagagatggtcccttcccattggccttagcccaagacttggagtcgaccccaagcgacagagtgaccagaaacccttttacagtcacattcagagtcgctgctggcctcaggcatttgaattagagctactttgagcctcttaggcagaaaacctaccacattcactactgcaaaatgtgtcctgtctaaaaatgattctctaaactttccctatacttaggcatagtcttctttcttagattctctttgttgttgtccctattgctggtttattacactgtacagaccacaaaatgtaatattcttttgtataactactaaagaaaaatccttgtagatctttgtg

SEQ ID NO: 60429 - DNA, 316 bp, Homo sapiens
atttctgcatttggtctgtgtgactctatggagcccaggacttacagaaaaggtgtaacctggctcttaggactttaagccacattatggtagtagacctgccgttttatttgacatggtgaaataaactaccactcctttgtggtaccatatgggcaggacagagctcttcaaccctggctaacaagcctgaagaagaccctgtgaggccgcagcagccatgggaacttcccaaaggacagaaatccacatgctaacgtagcatccagataggtgacagaaattccttccaccatatccaaatgtgtcctgtttt

SEQ ID NO: 60430 - DNA, 1393 bp, Homo sapiens
  misc_feature (1351)..(1351): n is a, c, g, or t
gggttatgtggctcttttgattatccccagctctacctgcaaggagcactgggaaatatatctttgggcccctcaattaggtgatgtgactcccctttctggactctttcctcaggaggtattgtgacatattcctggagcaagtacccaggagagattgtgacatatctctggaaccagaaccttggtgatgtgactcttctctcctgctgaagccatgcccacacaagggaaagtgacttatcactgggcccagcacacagcgctattcacagggaaaatagtgacacatctgtggggttctcaccgaaatgatgtgactctcttgcctgggctcacctctcaagggaattttgacatattactggaccaagcacctaggccctgcatttattgtgtattgtgacatatggcttggtccaacacctaggtggtgtgactctctacttcttcctgtgccatgccaaagaagaggattgtgacatatcactggatccagcacctagaaggctctgcgactcttctattttctctaggttatgcaaatggaggtggattgtgacatatcatagggccaacacaacacacagtctacaggtggaattgggactctcatgcatggatccagttcatcattgatactgtgactcaggtgggattttgacatataactgcacccagcacacaggtgagattgtgactcttgtatgctcatcctgccaaaagttgagtgtcaccctcacacatggacagagacttctggagacagatggattttggagaatgacagtggattatcatgaggttaatcaagtggtaactccaattgcagctgctgtaccagatgtagtttcattgcttgagcaaattaccacatctcctggtacctgtggtccattacattgatgacattatgctgattgaatccagtaagcaagaaatagcaaacacaccagacttattcatgagacgtttgcatgccagaggatggaaaataagtctgactaaaatttagagaccttctagctcagtaaaacttccaggggtccagtggtccaaggcctgtcaagatagtccttctaaggtaaaagatgcagtggctcatgcctgtaatcccagcactttcggaggctgaggtgggcagatcaggaggttaggagttcgagaccagcctggccaacatggtgaaatgccatctctactaaaattttaaaaaattagctagacgtggtggcaggcacctgtaatctcagctacatgggaggttgaggcaggagaattgcttgaaactggaaggcaggggttgcagtgagctgagatcaggccactgcattccagcctggacaacaanagtaaaactccatctcaaaaaaatttgtttatatatatgttt

SEQ ID NO: 60431 - DNA, 971 bp, Homo sapiens
gtaattcttgtttcttaaattggctttgaccataggagggattgagacaattctggaagcccagcacctaggtgatgtgactttcatcttttgtttggaccgtgtgcacaaaaggaagagtggcttatcactggacctcacacacaggaggtattgtgacatattcctggagcaagtacccagtgattgtgacatatcatcaaacccagcaactagacgatgtgatttttcttccctgcttgagccctggatatgctgtgcattgtgatatatggctgggtccaacatcaaggagagattgtgacatatctctggaaccagaaccttggtgatgtgactcttctctcctgctgaagccatgcccacacaagggaaagtgacttatcactgggcccagcacacagcgctattcacagggaaaatagtgacacatctgtggggttctcaccgaaatgatgtgactctcttgcctgggctcacctctcaagggaattttgacatattactggaccaagcacctaggccctgcatttattgtgtattgtgacatatggcttggtccaacacctaggtggtgtgactctctacttcttcctgtgccatgccaaagaagaggattgtgacatatcactggatccagcacctaggtcttttcccacagggagcattgtgaaatatcactgggctcagcccccaggttatgtgacctttctgccttgccctgctcccaggaaatgttgtgacatccctcatacagcacccaggtgatgcgactcttctgctcattttctacttatacttgggattgtgacaaatatcctggtccaactcataggtgctatgatgattcccatacctggaatcagctaataggggagatagtgtctcttgtattgtagcttagggaaaaaagtaacatcttgggcctcctctttgtatgaatgtcataaagaattaccaatctgactggg

SEQ ID NO: 60432 - DNA, 2099 bp, Homo sapiens
ggcttgttccctgtcctctggccctttgcaaataaatgccttaccagacctgccctgccaccccactcgcagccacccagcaagagcagcatgtcagcctgccggagctttgcagttgcaatctgcattttagaaataagcatcctcacagcacagtacacgaccagttatgacccagagctaacagaaagcagtggctctgcatcacacatagactgcagaatgagcccctggagtgaatggtcacaatgcgatccttgtctcagacaaatgtttcgttcaagaagcattgaggtctttggacaatttaatgggaaaagatgcaccgacgctgtgggagacagacgacagtgtgtgcccacagagccctgtgaggatgctgaggatgactgcggaaatgactttcaatgcagtacaggcagatgcataaagatgcgacttcggtgtaatggtgacaatgactgcggagacttttcagatgaggatgattgtgaaagtgagccccgtcccccctgcagagacagagtggtagaagagtctgagctggcacgaacagcaggctatgggatcaacattttagggatggatcccctaagcacaccttttgacaatgagttctacaatggactctgtaaccgggatcgggatggaaacactctgacatactaccgaagaccttggaacgtggcttctttgatctatgaaaccaaaggcgagaaaaatttcagaaccgaacattacgaagaacaaattgaagcatttaaaagtatcatccaagagaagacatcaaattttaatgcagctatatctctaaaatttacacccactgaaacaaataaagctgaacaatgttgtgaggaaacagcctcctcaatttctttacatggcaagggtagttttcggttttcatattccaaaaatgaaacttaccaactatttttgtcatattcttcaaagaaggaaaaaatgtttctgcatgtgaaaggagaaattcatctgggaagatttgtaatgagaaatcgcgatgttgtgctcacaacaacttttgtggatgatataaaagctttgccaactacctatgaaaagggagaatattttgcctttttggaaacctatggaactcactacagtagctctgggtctctaggaggactctatgaactaatatatgttttggataaagcttccatgaagcggaaaggtgttgaactaaaagacataaagagatgccttgggtatcatctggatgtatctctggctttctctgaaatctctgttggagctgaatttaataaagatgattgtgtaaagaggggagagggtagagctgtaaacatcaccagtgaaaacctcatagatgatgttgtttcactcataagaggtggaaccagaaaatatgcatttgaactgaaagaaaagcttctccgaggaaccgtgattgatgtgactgactttgtcaactgggcctcttccataaatgatgctcctgttctcattagtcaaaaactgtctcctatatataatctggttccagtgaaaatgaaaaatgcacacctaaagaaacaaaacttggaaagagccattgaagactatatcaatgaatttagtgtaagaaaatgccacacatgccaaaatggaggtacagtgattctaatggatggaaagtgtttgtgtgcctgcccattcaaatttgagggaattgcctgtgaaatcagtaaacaaaaaatttctgaaggattgccagccctagagttccccaatgaaaaatagagctgttggcttctctgagctccagtggaagaagaaaacactagtaccttcagactcctacccctgaagataatcttagctgccaagtaaatagcaacatgcttcatgaaaatcctaccaacctctgaagtctcttctctcttaggtctataattttttttttaatttttcttccttaaactcctgtgatgtttccattttttgttccctaatgagaagtcaacagtgaaatacgccagaactgctttatcccacggaaaatgccaatctcttctaaaaaaaaacaaaattaaattaaaaacagaatgttggtttaaaaaacttcaaag

SEQ ID NO: 60433 - DNA, 2558 bp, Homo sapiens
ggcttgttccctgtcctctggccctttgcaaataaatgccttaccagacctgccctgccaccccactcgcagccacccagcaagagcagcatgtcagcctgccggagctttgcagttgcaatctgcattttagaaataagcatcctcacagcacagtacacgaccagttatgacccagagctaacagaaagcagtggctctgcatcacacatagactgcagaatgagcccctggagtgaatggtcacaatgcgatccttgtctcagacaaatgtttcgttcaagaagcattgaggtctttggacaatttaatgggaaaagatgcaccgacgctgtgggagacagacgacagtgtgtgcccacagagccctgtgaggatgctgaggatgactgcggaaatgactttcaatgcagtacaggcagatgcataaagatgcgacttcggtgtaatggtgacaatgactgcggagacttttcagatgaggatgattgtgaaagtgagccccgtcccccctgcagagacagagtggtagaagagtctgagctggcacgaacagcaggctatgggatcaacattttagggatggatcccctaagcacaccttttgacaatgagttctacaatggactctgtaaccgggatcgggatggaaacactctgacatactaccgaagaccttggaacgtggcttctttgatctatgaaaccaaaggcgagaaaaatttcagaaccgaacattacgaagaacaaattgaagcatttaaaagtatcatccaagagaagacatcaaattttaatgcagctatatctctaaaatttacacccactgaaacaaataaagctgaacaatgttgtgaggaaacagcctcctcaatttctttacatggcaagggtagttttcggttttcatattccaaaaatgaaacttaccaactatttttgtcatattcttcaaagaaggaaaaaatgtttctgcatgtgaaaggagaaattcatctgggaagatttgtaatgagaaatcgcgatgttgtgctcacaacaacttttgtggatgatataaaagctttgccaactacctatgaaaagggagaatattttgcctttttggaaacctatggaactcactacagtagctctgggtctctaggaggactctatgaactaatatatgttttggataaagcttccatgaagcggaaaggtgttgaactaaaagacataaagagatgccttgggtatcatctggatgtatctctggctttctctgaaatctctgttggagctgaatttaataaagatgattgtgtaaagaggggagagggtagagctgtaaacatcaccagtgaaaacctcatagatgatgttgtttcactcataagaggtggaaccagaaaatatgcatttgaactgaaagaaaagcttctccgaggaaccgtgattgatgtgactgactttgtcaactgggcctcttccataaatgatgctcctgttctcattagtcaaaaactgtctcctatatataatctggttccagtgaaaatgaaaaatgcacacctaaagaaacaaaacttggaaagagccattgaagactatatcaatgaatttagtgtaagaaaatgccacacatgccaaaatggaggtacagtgattctaatggatggaaagtgtttgtgtgcctgcccattcaaatttgagggaattgcctgtgaaatcagtaaacaaaaaatttctgaaggattgccagccctagagttccccaatgaaaaatagagctgttggcttctctgagctccagtggaagaagaaaacactagtaccttcagactcctacccctgaagataatcttagctgccaagtaaatagcaacatgcttcatgaaaatcctaccaacctctgaagtctcttctctcttaggtctataattttttttttaatttttcttccttaaactcctgtgatgtttccattttttgttccctaatgagaagtcaacagtgaaatacgccagaactgctttatcccacggaaaatgccaatctcttctaaaaaaaaacaaaattaaattaaaaacagaatgttggtttaaaaaacttcaaagtaattttcaaacggctttgtatggttaacatattctgccaggtccatgaccacacgtctgtaccatgcaatttaactcttatttacattgttatgtttagtttggttatttgcttaggtgtgcatacattcattcagcaaatgctgagcaccagccacgtgcacagcagttgcttttactagtcttagctctacgatttaaatccatgtgtccaagggggaaaacatattatatttgtaaccaaaaactactagtttaccagaggactgaagggagataaagaggagttggttaatgggtacaaaaatccagttagatgaaaggaataatatagatagtgttcagtagcagaatagaatgaacataaactattagtttaaattatgtgaaattccttctatttgatcatattttacaagaaaaaacatcaattttatatagtccaacttaatacctagc

SEQ ID NO: 60434 - DNA, 2504 bp, Homo sapiens
ggcttgttccctgtcctctggccctttgcaaataaatgccttaccagacctgccctgccaccccactcgcagccacccagcaagagcagcatgtcagcctgccggagctttgcagttgcaatctgcattttagaaataagcatcctcacagcacagtacacgaccagttatgacccagagctaacagaaagcagtggctctgcatcacacatagactgcagaatgagcccctggagtgaatggtcacaatgcgatccttgtctcagacaaatgtttcgttcaagaagcattgaggtctttggacaatttaatgggaaaagatgcaccgacgctgtgggagacagacgacagtgtgtgcccacagagccctgtgaggatgctgaggatgactgcggaaatgactttcaatgcagtacaggcagatgcataaagatgcgacttcggtgtaatggtgacaatgactgcggagacttttcagatgaggatgattgtgaaagtgagccccgtcccccctgcagagacagagtggtagaagagtctgagctggcacgaacagcaggctatgggatcaacattttagggatggatcccctaagcacaccttttgacaatgagttctacaatggactctgtaaccgggatcgggatggaaacactctgacatactaccgaagaccttggaacgtggcttctttgatctatgaaaccaaaggcgagaaaaatttcagaaccgaacattacgaagaacaaattgaagcatttaaaagtatcatccaagagaagacatcaaattttaatgcagctatatctctaaaatttacacccactgaaacaaataaagctgaacaatgttgtgaggaaacagcctcctcaatttctttacatggcaagggtagttttcggttttcatattccaaaaatgaaacttaccaactatttttgtcatattcttcaaagaaggaaaaaatgtttctgcatgtgaaaggagaaattcatctgggaagatttgtaatgagaaatcgcgatgttgtgctcacaacaacttttgtggatgatataaaagctttgccaactacctatgctgggtctctaggaggactctatgaactaatatatgttttggataaagcttccatgaagcggaaaggtgttgaactaaaagacataaagagatgccttgggtatcatctggatgtatctctggctttctctgaaatctctgttggagctgaatttaataaagatgattgtgtaaagaggggagagggtagagctgtaaacatcaccagtgaaaacctcatagatgatgttgtttcactcataagaggtggaaccagaaaatatgcatttgaactgaaagaaaagcttctccgaggaaccgtgattgatgtgactgactttgtcaactgggcctcttccataaatgatgctcctgttctcattagtcaaaaactgtctcctatatataatctggttccagtgaaaatgaaaaatgcacacctaaagaaacaaaacttggaaagagccattgaagactatatcaatgaatttagtgtaagaaaatgccacacatgccaaaatggaggtacagtgattctaatggatggaaagtgtttgtgtgcctgcccattcaaatttgagggaattgcctgtgaaatcagtaaacaaaaaatttctgaaggattgccagccctagagttccccaatgaaaaatagagctgttggcttctctgagctccagtggaagaagaaaacactagtaccttcagactcctacccctgaagataatcttagctgccaagtaaatagcaacatgcttcatgaaaatcctaccaacctctgaagtctcttctctcttaggtctataattttttttttaatttttcttccttaaactcctgtgatgtttccattttttgttccctaatgagaagtcaacagtgaaatacgccagaactgctttatcccacggaaaatgccaatctcttctaaaaaaaaacaaaattaaattaaaaacagaatgttggtttaaaaaacttcaaagtaattttcaaacggctttgtatggttaacatattctgccaggtccatgaccacacgtctgtaccatgcaatttaactcttatttacattgttatgtttagtttggttatttgcttaggtgtgcatacattcattcagcaaatgctgagcaccagccacgtgcacagcagttgcttttactagtcttagctctacgatttaaatccatgtgtccaagggggaaaacatattatatttgtaaccaaaaactactagtttaccagaggactgaagggagataaagaggagttggttaatgggtacaaaaatccagttagatgaaaggaataatatagatagtgttcagtagcagaatagaatgaacataaactattagtttaaattatgtgaaattccttctatttgatcatattttacaagaaaaaacatcaattttatatagtccaacttaatacctagc

SEQ ID NO: 60435 - DNA, 2450 bp, Homo sapiens
ggcttgttccctgtcctctggccctttgcaaataaatgccttaccagacctgccctgccaccccactcgcagccacccagcaagagcagcatgtcagcctgccggagctttgcagttgcaatctgcattttagaaataagcatcctcacagcacagtacacgaccagttatgacccagagctaacagaaagcagtggctctgcatcacacatagactgcagaatgagcccctggagtgaatggtcacaatgcgatccttgtctcagacaaatgtttcgttcaagaagcattgaggtctttggacaatttaatgggtgtgaggatgctgaggatgactgcggaaatgactttcaatgcagtacaggcagatgcataaagatgcgacttcggtgtaatggtgacaatgactgcggagacttttcagatgaggatgattgtgaaagtgagccccgtcccccctgcagagacagagtggtagaagagtctgagctggcacgaacagcaggctatgggatcaacattttagggatggatcccctaagcacaccttttgacaatgagttctacaatggactctgtaaccgggatcgggatggaaacactctgacatactaccgaagaccttggaacgtggcttctttgatctatgaaaccaaaggcgagaaaaatttcagaaccgaacattacgaagaacaaattgaagcatttaaaagtatcatccaagagaagacatcaaattttaatgcagctatatctctaaaatttacacccactgaaacaaataaagctgaacaatgttgtgaggaaacagcctcctcaatttctttacatggcaagggtagttttcggttttcatattccaaaaatgaaacttaccaactatttttgtcatattcttcaaagaaggaaaaaatgtttctgcatgtgaaaggagaaattcatctgggaagatttgtaatgagaaatcgcgatgttgtgctcacaacaacttttgtggatgatataaaagctttgccaactacctatgctgggtctctaggaggactctatgaactaatatatgttttggataaagcttccatgaagcggaaaggtgttgaactaaaagacataaagagatgccttgggtatcatctggatgtatctctggctttctctgaaatctctgttggagctgaatttaataaagatgattgtgtaaagaggggagagggtagagctgtaaacatcaccagtgaaaacctcatagatgatgttgtttcactcataagaggtggaaccagaaaatatgcatttgaactgaaagaaaagcttctccgaggaaccgtgattgatgtgactgactttgtcaactgggcctcttccataaatgatgctcctgttctcattagtcaaaaactgtctcctatatataatctggttccagtgaaaatgaaaaatgcacacctaaagaaacaaaacttggaaagagccattgaagactatatcaatgaatttagtgtaagaaaatgccacacatgccaaaatggaggtacagtgattctaatggatggaaagtgtttgtgtgcctgcccattcaaatttgagggaattgcctgtgaaatcagtaaacaaaaaatttctgaaggattgccagccctagagttccccaatgaaaaatagagctgttggcttctctgagctccagtggaagaagaaaacactagtaccttcagactcctacccctgaagataatcttagctgccaagtaaatagcaacatgcttcatgaaaatcctaccaacctctgaagtctcttctctcttaggtctataattttttttttaatttttcttccttaaactcctgtgatgtttccattttttgttccctaatgagaagtcaacagtgaaatacgccagaactgctttatcccacggaaaatgccaatctcttctaaaaaaaaacaaaattaaattaaaaacagaatgttggtttaaaaaacttcaaagtaattttcaaacggctttgtatggttaacatattctgccaggtccatgaccacacgtctgtaccatgcaatttaactcttatttacattgttatgtttagtttggttatttgcttaggtgtgcatacattcattcagcaaatgctgagcaccagccacgtgcacagcagttgcttttactagtcttagctctacgatttaaatccatgtgtccaagggggaaaacatattatatttgtaaccaaaaactactagtttaccagaggactgaagggagataaagaggagttggttaatgggtacaaaaatccagttagatgaaaggaataatatagatagtgttcagtagcagaatagaatgaacataaactattagtttaaattatgtgaaattccttctatttgatcatattttacaagaaaaaacatcaattttatatagtccaacttaatacctagc

SEQ ID NO: 60436 - DNA, 929 bp, Homo sapiens
  misc_feature (690)..(690): n is a, c, g, or t
  misc_feature (701)..(701): n is a, c, g, or t
  misc_feature (731)..(731): n is a, c, g, or t
  misc_feature (793)..(793): n is a, c, g, or t
tctcagtttaaaaaataagggtgtaaatacatctcaaaagtgtacagatttctcactgagtttgttttaacctttgggaaaccacaatagaccctgaagatatccataatttttacccagtaaattttttctttatttagatgatttgcagttttagtatttactgttgtaattagatggtaatcttaaaaatgcattgctaacttcaaaccatatttaaattatcagtagctatgtatatataatcacatggaggttgtagccttgccttgtatgattaaacagagaagaaaggtggtatttgttaacatttctgttttttacatgtatcattcttttatcacatctcataggtgatagcatcctatttttttctttattttcttgggattcagcccaagtctgtctccaaagtccatcttctttcctactgctctactacactgcagagaaataggacggtgaaactgaatatatatgtatgtactgtcataaaactggttataatgcgttctttttctccccccaatctaccttttctttttccccagaatccagattatcttcagtattctatcagtacagctctctgcagcttaaactcggtggtacataaagaagatgatgaacccaaaatgatggacactgtataatttggttaagactgctgaggccaagtgctattgtcangaaagagactngctattctgcacttatggtctgacttattngtaagaagtcattgtcgagactgcttggtctatgctactatgcatgaagtgattcatcttanacggttgagttcacttatgtcgcttaaatagaaacttcgcttcatggttaaaaatgactaagggggggaattattcccccgtaaaattccccaaattttcccgaaaaaggtttaaccctcgggaagaaattttttt

SEQ ID NO: 60437 - DNA, 1833 bp, Homo sapiens
ttttttttttgttttttctaggcagaggaagaaggttattttgaagcattcaaaaatgaacttgaagctttcaagtcaagagtaagactttattctcaatcacaaagttttcaacctatgacagttcagaatcatgttccccattctggtgttggatctataggtttattagaatccttaccacagaatccagattatcttcagtattctatcagtacagctctctgcagcttaaactcggtggtacataaagaagatgatgaacccaaaatgatggacactgtataatttggttaagactgctgaggccaagtgctattttgttacaagaaaggaagaacttggctattttcttgacacttttatgggtgctgcactttatttttgttcggtttttgatgggagggaaagagtactgaaatgttttgtaaattttttttaatgtgctgctaggttttttgttttgttttgttctgaagagaagagtggtaccatatgttgcaggaagtcaaactggactttttgtggctactaaatttgcttttaatcttattgttctcaattttggaatcaagtatgaaaatctgcacaaatgcaatgtttacaagaactggttgattctgggaggcatctgctacagtctctttttatatggatatgtacatgtcctattctacaaaaatgattaaagataaaaacatacttgtatcccactgctactttagctgtcaaatttggtgtttcatcacattaaaagcaataaatcagtagttggtaatgtactttactaaataagttggggggtacaatttttaaaagtcttaactcttaaatacttgactttcggcaccatcagttaaatccttgactataatacaaatttgatatatacattacatttaccctcaaattattctcaaaactatattccttagaatttgattttaccctgctgactttaagagttataataatatcaaatgtgatgagctaatatagattttctttttaaataagaataacttcaagctcactcttaacatagtctgggatctctcagggagtaagttttaaaagaatactaatggcttgtaagaacaaacaggaataataatctgatttttaaatttgtggttattttactcatgttgccttttaatttttgttattttggtttattttttgatgtagccttttaaaaaaggagtcttaaaaatgatttttttttaaaggcaagagaaatcttgtagtgctaactgccttgagctgccaattacctatttctgagaatttggtgactcttattggtaatgatggcatttacaacatttggcatttcccctttttcagctcagttaccatagaatacttccaagctttactacttcctctgtaagtcatttcagttatgccaggatatttgatgattttgtttatgtagaattaggtaacaaagccaattatgctatccttattattgaaggattaatcttatgacttaacataagctttggttatatttgggtgtagtctttggctaagtacccattaaggctagtagcaaacacttggaaggtggctaactgggactgggaatacgtgtctcaacttgagaaaccaaatagtgcgaagggactcagggtggccagacctgtgaccttggcctcatttgtatcttgttttcgctgaggtgatcagacacttagtaccctagaaatggactggaattattgaatcttcttctgtaacatcacaatcttcctggttttcagaataaacgtttttgtgcttttgatataaatatatactctataataaaatgtttgactaatt

SEQ ID NO: 60438 - DNA, 2198 bp, Homo sapiens
tctcagtttaaaaaataagggtgtaaatacatctcaaaagtgtacagatttctcactgagtttgttttaacctttgggaaaccacaatagaccctgaagatatccataatttttacccagtaaattttttctttatttagatgatttgcagttttagtatttactgttgtaattagatggtaatcttaaaaatgcattgctaacttcaaaccatatttaaattatcagtagctatgtatatataatcacatggaggttgtagccttgccttgtatgattaaacagagaagaaaggtggtatttgttaacatttctgttttttacatgtatcattcttttatcacatctcataggtgatagcatcctatttttttctttattttcttgggattcagcccaagtctgtctccaaagtccatcttctttcctactgctctactacactgcagagaaataggacggtgaaactgaatatatatgtatgtactgtcataaaactggttataatgcgttctttttctccccccaatctaccttttctttttccccagaatccagattatcttcagtattctatcagtacagctctctgcagcttaaactcggtggtacataaagaagatgatgaacccaaaatgatggacactgtataatttggttaagactgctgaggccaagtgctattttgttacaagaaaggaagaacttggctattttcttgacacttttatgggtgctgcactttatttttgttcggtttttgatgggagggaaagagtactgaaatgttttgtaaattttttttaatgtgctgctaggttttttgttttgttttgttctgaagagaagagtggtaccatatgttgcaggaagtcaaactggactttttgtggctactaaatttgcttttaatcttattgttctcaattttggaatcaagtatgaaaatctgcacaaatgcaatgtttacaagaactggttgattctgggaggcatctgctacagtctctttttatatggatatgtacatgtcctattctacaaaaatgattaaagataaaaacatacttgtatcccactgctactttagctgtcaaatttggtgtttcatcacattaaaagcaataaatcagtagttggtaatgtactttactaaataagttggggggtacaatttttaaaagtcttaactcttaaatacttgactttcggcaccatcagttaaatccttgactataatacaaatttgatatatacattacatttaccctcaaattattctcaaaactatattccttagaatttgattttaccctgctgactttaagagttataataatatcaaatgtgatgagctaatatagattttctttttaaataagaataacttcaagctcactcttaacatagtctgggatctctcagggagtaagttttaaaagaatactaatggcttgtaagaacaaacaggaataataatctgatttttaaatttgtggttattttactcatgttgccttttaatttttgttattttggtttattttttgatgtagccttttaaaaaaggagtcttaaaaatgatttttttttaaaggcaagagaaatcttgtagtgctaactgccttgagctgccaattacctatttctgagaatttggtgactcttattggtaatgatggcatttacaacatttggcatttcccctttttcagctcagttaccatagaatacttccaagctttactacttcctctgtaagtcatttcagttatgccaggatatttgatgattttgtttatgtagaattaggtaacaaagccaattatgctatccttattattgaaggattaatcttatgacttaacataagctttggttatatttgggtgtagtctttggctaagtacccattaaggctagtagcaaacacttggaaggtggctaactgggactgggaatacgtgtctcaacttgagaaaccaaatagtgcgaagggactcagggtggccagacctgtgaccttggcctcatttgtatcttgttttcgctgaggtgatcagacacttagtaccctagaaatggactggaattattgaatcttcttctgtaacatcacaatcttcctggttttcagaataaacgtttttgtgcttttgatataaatatatactctataataaaatgtttgactaatt

SEQ ID NO: 60439 - DNA, 2145 bp, Homo sapiens
tctcagtttaaaaaataagggtgtaaatacatctcaaaagtgtacagatttctcactgagtttgttttaacctttgggaaaccacaatagaccctgaagatatccataatttttacccagtaaattttttctttatttagatgatttgcagttttagtatttactgttgtaattagatggtaatcttaaaaatgcattgctaacttcaaaccatatttaaattatcagtagctatgtatatataatcacatggaggttgtagccttgccttgtatgattaaacagagaagaaaggtggtatttgttaacatttctgttttttacatgtatcattcttttatcacatctcataggtgatagcatcctatttttttctttattttcttgggattcagcccaagtctgtctccaaagtccatcttctttcctactgctctactacactgcagagaaataggacggtgaaactgaatatatatgtatgtactgtcataaaactggttataatgcgttctttttctccccccaatctaccttttctttttccccagaatccagattatcttcagtattctatcagtacagctctctgcagcttaaactcggtggtacataaagaagatgatgaacccttgttacaagaaaggaagaacttggctattttcttgacacttttatgggtgctgcactttatttttgttcggtttttgatgggagggaaagagtactgaaatgttttgtaaattttttttaatgtgctgctaggttttttgttttgttttgttctgaagagaagagtggtaccatatgttgcaggaagtcaaactggactttttgtggctactaaatttgcttttaatcttattgttctcaattttggaatcaagtatgaaaatctgcacaaatgcaatgtttacaagaactggttgattctgggaggcatctgctacagtctctttttatatggatatgtacatgtcctattctacaaaaatgattaaagataaaaacatacttgtatcccactgctactttagctgtcaaatttggtgtttcatcacattaaaagcaataaatcagtagttggtaatgtactttactaaataagttggggggtacaatttttaaaagtcttaactcttaaatacttgactttcggcaccatcagttaaatccttgactataatacaaatttgatatatacattacatttaccctcaaattattctcaaaactatattccttagaatttgattttaccctgctgactttaagagttataataatatcaaatgtgatgagctaatatagattttctttttaaataagaataacttcaagctcactcttaacatagtctgggatctctcagggagtaagttttaaaagaatactaatggcttgtaagaacaaacaggaataataatctgatttttaaatttgtggttattttactcatgttgccttttaatttttgttattttggtttattttttgatgtagccttttaaaaaaggagtcttaaaaatgatttttttttaaaggcaagagaaatcttgtagtgctaactgccttgagctgccaattacctatttctgagaatttggtgactcttattggtaatgatggcatttacaacatttggcatttcccctttttcagctcagttaccatagaatacttccaagctttactacttcctctgtaagtcatttcagttatgccaggatatttgatgattttgtttatgtagaattaggtaacaaagccaattatgctatccttattattgaaggattaatcttatgacttaacataagctttggttatatttgggtgtagtctttggctaagtacccattaaggctagtagcaaacacttggaaggtggctaactgggactgggaatacgtgtctcaacttgagaaaccaaatagtgcgaagggactcagggtggccagacctgtgaccttggcctcatttgtatcttgttttcgctgaggtgatcagacacttagtaccctagaaatggactggaattattgaatcttcttctgtaacatcacaatcttcctggttttcagaataaacgtttttgtgcttttgatataaatatatactctataataaaatgtttgactaatt

SEQ ID NO: 60440 - DNA, 770 bp, Homo sapiens
ttttttttttgttttttctaggcagaggaagaaggttattttgaagcattcaaaaatgaacttgaagctttcaagtcaagagtaagactttattctcaatcacaaagttttcaacctatgacagttcagaatcatgttccccattctggtgttggatctataggtttattagaatccttaccacagaatccagattatcttcagtattctatcagtacagctctctgcagcttaaactcggtggtacataaagaagatgatgaacccaaaatgatggacactgtataatttggttaagactgctgaggccaagtgctattttgttacaagaaaggaagaacttggctattttcttgacacttttatgggtgctgcactttatttttgttcggtttttgatgggagggaaagagtactgaaatgttttgtaaattttttttaatgtgctgctaggttttttgttttgttttgttctgaagagaagagtggtaccatatgttgcaggaagtcaaactggactttttgtggctactaaatttgcttttaatcttattgttctcaattttggaatcaagtatgaaaatctgcacaaatgcaatgtttacaagaactggttgattctgggaggcatctgctacagtctctttttatatggatatgtacatgtcctattctacaaaaatgattaaagataaaaacatacttgtatcccactgctactttagctgtcaaatttggtgtttcatcacattaaaagcaataaatcagta

SEQ ID NO: 60441 - DNA, 1900 bp, Homo sapiens
ttttttttttgttttttctaggcagaggaagaaggttattttgaagcattcaaaaatgaacttgaagctttcaagtcaagagtaagactttattctcaatcacaaagttttcaacctatgacagttcagaatcatgttccccattctggtgttggatctataggtttattagaatccttaccacagaatccagattatcttcagtattctatcagtacagctctctgcagcttaaactcggtggtacataaagaagatgatgaacccaaaatgatggacactgtataatttggttaagactgctgaggccaagtgctattttgttacaagaaaggaagaacttggctattttcttgacacttttatgggtgctgcactttatttttgttcggtttttgatgggagggaaagagtactgaaatgttttgtaaattttttttaatgtgctgctaggttttttgttttgttttgttctgaagagaagagtggtaccatatgttgcaggaagtcaaactggactttttgtggctactaaatttgcttttaatcttattgttctcaattttggaatcaagtatgaaaatctgcacaaatgcaatgtttacaagaactggttgattctgggaggcatctgctacagtctctttttatatggatatgtacatgtcctattctacaaaaatgattaaagataaaaacatacttgtatcccactgctactttagctgtcaaatttggtgtttcatcacattaaaagcaataaatcagtagttggtaatgtactttactaaataagttggggggtacaatttttaaaagtcttaactcttaaatacttgactttcggcaccatcagttaaatccttgactataatacaaatttgatatatacattacatttaccctcaaattattctcaaaactatattccttagaatttgattttaccctgctgactttaagagttataataatatcaaatgtgatgagctaatatagattttctttttaaataagaataacttcaagctcactcttaacatagtctgggatctctcagggagtaagttttaaaagaatactaatggcttgtaagaacaaacaggaataataatctgatttttaaatttgtggttattttactcatgttgccttttaatttttgttattttggtttattttttgatgtagccttttaaaaaaggagtcttaaaaatgatttttttttaaaggcaagagaaatcttgtagtgctaactgccttgagctgccaattacctatttctgagaatttggtgactcttattggtaatgatggcatttacaacatttggcatttcccctttttcagctcagttaccatagaatacttccaagctttactacttcctctgtaagtcatttcagttatgccaggatatttgatgattttgtttatgtagaattaggtaacaaagccaattatgctatccttattattgaaggattaatcttatgacttaacataagctttggttatatttgggtgtagtctttggctaagtacccattaaggctagtagcaaacacttggaaggtggctaactgggactgggaatacgtgtctcaacttgagaaaccaaatagtgcgaagggactcagggtggccagacctgtgaccttggcctcatttgtatcttgttttcgctgaggtgatcagacacttagtaccctagaaatggactggaattattgaatcttcttctgtaacatcacaatcttcctggttttcagaataaacgtttttgtgcttttgatataaatatatactctataataaaatgtttgactaattaatatagtagtgtttgtcagcctgtactttttttttttttaaacccatgacctagtcgtagacattt

SEQ ID NO: 60442 - DNA, 401 bp, Homo sapiens
taggttccaggaagctcaaaacaagacagtaggtagagacagctatcatccttggcgttcttccttttggattctggataaaaggtagaggaataacagcaccgttctgaatgttttggttattttatggctctaatttccatcgtgttttttttctgaagcatagctaattgttcattaacagttaacagatattgatggcttagctatttttatctttttatctatttcacaaaggtctatttagaatctagtagtgtatttcctctttattgttaagcacagaaaaggaacgcatttttttctgctcatgcctagtttcctttgatctttctcaaaggtaaattacccctaaaactttgagtagactgtcctagcagatattctgaagcttgacaagg

SEQ ID NO: 60443 - DNA, 295 bp, Homo sapiens
ctccacagctgccacatagaacaagcaaatctgacatcacagctcttttaaaaatctcccagaattctacactggaataaagatcacccagtaaactcagctatgttgattcgtaggaatttctccttggagttaataataatcattagaaaaaaaatacaggaagaaataacttcctcctattcttattgtgataaattgtaacaatagcagacattcgtatatagatcctataagcgacaagagggaaaataggatttgcaaattaagcatctgaataaatattttagaaaaa

SEQ ID NO: 60444 - DNA, 456 bp, Homo sapiens
gtttggggggagtgttcttttttttattcgtgagtgggtgttggaaaaccccaagcttgagagtaaggtttcaaaaccccacggccagccaaggtcaagggaatggtgctgcttccccgaccaaaaagaaggtggtggccaaggccaaggcccctaaagctgggcaggggccaaacaccaaggctgctgctcctgctaagggcagtgggtccaaggtggtacctgcacatttgtccaggaagacagaggcccccaagggccctagaaaggctgggctgcccatcaaggcctcatcatccaaagtgtccagccagagggctgaagcttagggccagaggcaggggcggagagagaccgagcctctgccctagtttttattcttcaactaaccactgctctatttatttcattgtaagctatttatcaataaagacttttgtttctttttcctcacaa

SEQ ID NO: 60445 - DNA, 406 bp, Homo sapiens
ggacacacaaacacacagtccataacagcaatcactgtgctcagttatactgaggacagcaccagcacctggtacatgcccagcccgaaacaattagtccaactctgtgtggttactgttactgacgcaggtgggcaccatgttgccgtctttcatcctgcatgcagatgcatgaggtgacacacgtgactgcagcactgctctttatggggaggtaataaaggaatgtgaggtacagatgtaattatctaccattacccagctatgtgtttgtgtgcattttggatctacagtcagagcttccttttattaaccctagttagtattagcacagcttcttctttagctttttttttttttttttttaagacagagtcttgctctcgtcgcccaggctggagtgcag

SEQ ID NO: 60446 - DNA, 480 bp, Homo sapiens
ccagggcaggaggggtgtgggttccacacgctggtgctggtgagggcgtctcatctgccccacttgggggggccgtcggtcagtgctgccgcatgggcacgccagggtgctgcttgtctttgctggagttgcttggagggtgggttgggaggtgaaaggaggaccacagacctgaaccactccagctgcgaaatgctggaagtgtaacccaaaatgtgagaaaaaaaaacacccttttaagtaagtgggtgtgaaagtgggccaaggcctgatgccacagtcagggagcagggaaggctcagcattgctcaccctcacttaaggatggggctagcatcacataaggcatcacataaggatgggggctagcagggaaagggagagaaaacacatgaggcacacacagaccctgggaagctggtggagctgtgctaacgtcagcagaccagtgatcaaagacccaggccttggggagattcc

SEQ ID NO: 60447 - DNA, 348 bp, Homo sapiens
gaatcttaccatcactgaaggtcatctagatggatgtttgcattttctgtatgatgtttctaccaagattgtcatcatctcttgtgcccaccttccccttttccagcactgacctctgtcagaaggcctccccagttctcttctacttccttccgccatttctttagctcatcagctccttcgacttttccttctccactttcacccacataccagtggagaaccaccggaccccagtccccagctctcagtgtccttcaagctcctcttgaccattctctcccctgattactgctggaggggcttcttcctgtcccctctgcctctcctcactcccattcccccact

SEQ ID NO: 60448 - DNA, 420 bp, Homo sapiens
ctttgaaaaacaaaggcagtgaggtgaaccagcaagtgcactggctgaggggactggagttctagcctctgaaccagtttcctcctgtgccaaaggaggataataattatctattattgattatctcctagacttgtggagttcaagtgtgtaatgccttaaaagatgtggaggctgttgctgtgtttggtaccacattgcccaccctcacgtggcgctcttcagcttaggttcctctagcagtgtcaagtttgtgaaccaaccccactggccttctgcattctgagggcacgtgtgttaaagtctctactgatgtccttttggaaatgcctctgcatgaatttatggtagctctgactcatctttaaacaattttaatttatttagaaaataaaggcttatctctccaggaaatttttt

SEQ ID NO: 60449 - DNA, 370 bp, Homo sapiens
taatgtgtatgtcctagtaaaccgttttcgtcagaataataaagaccgctaagacaaatcacttcgattgcttaataatctgcttgctctacaaagaagcagtatcaggtagcaattaagcacaaggattctgaatttgagtctacctgtgtttgagtcatggcttctgcatgtactagctctgtaactcttagccttagtgttccctgttggtaaagggggaataacagtaaagttgttttaacgattaaataaggtaatacatgcaaagtatttagagaaatagctggcatatgataacctgcgttaattatctgtatgctgtaactccctgtgggaaaaaaatttaaattaaacttaagtcataaag

SEQ ID NO: 60450 - DNA, 254 bp, Homo sapiens
gggatgattagcagcctctgacataggggcatctcccccagtgaggcgtgggcagattattaaaggaatggtactgggaataaaagtggctgaggataaattttaaattctcatattacttcttacaaaaattctaagttttaaatcaagtcgtataatttttaagaataggtcttcaattgatttctagatggcaaataatttatataaacaaaaacaatggagccttctccaaaaatgaatactcaattaaa

SEQ ID NO: 60451 - DNA, 262 bp, Homo sapiens
gtaagcaagtactccagttccatcttcttgaagatgcagatctttccttagattccaggttaattggtttccttgtgaatttagctctccagtggcttcagaaaagttgtggtttttcagattaacttgcattttttttggtcattgttatgtaagagttggagccatgctctttccaactttctacatcctaagtagatgccagaattttttcccacttttctcttcaacttttgtcattggtagacttgactattatgta

SEQ ID NO: 60452 - DNA, 222 bp, Homo sapiens
tctctgcctttgcctcccatttgccttagtttttctcttcctctccccacccaccacatgttttccctaactgtgttgatttaattgtcttactcatatttatttcttttcctgcttttgacattaatcacgatatttctaccctttctgtagttagtcagtaggacccagttagttaacttttttctaacaaagtaaaacatttattagccccataaaaaa

SEQ ID NO: 60453 - DNA, 428 bp, Homo sapiens
aacagttatctaatactaataccttaatattattatctaatactagtttatatttctacagttaggcaactgtattttagcagaagaagatggtgaggaaacaaacagtttattaataggcattaataactagacttgatctgttagccttgtagaactgttagagtaatagaaagtttcagacagaactggttcaaactccagctctcctcctcactaaaatcttcatttgaggcagattatttaacttcactgagcctctgtttccccatctggaagatgaagataatagtatctaactcacaaggttatcattggaataaatgaaagaacacatgtaatgcaaccagctggaattaagtgcttaataaatgttcttttcactgctttgcctcatcagaattaaaatagaaatacttgactagtca

SEQ ID NO: 60454 - DNA, 1107 bp, Homo sapiens
ttccggcagagccggaagaccctctctttcgctgtttgagagtctctcggctcaaggaccgggaggtaagaggtttgggactgccccggcaactccagggtgtctggtccacgacctatcctaggcgccatgggtgtgataggtatacagctggttgttaccatggtgatggccagtgtcatgcagaagattatacctcactattctcttgctcgatggctactctgtaatggcagtttgaggtggtatcaacatcctacagaagaagaattaagaattcttgcagggaaacaacaaaaagggaaaaccaaaaaagataggaaatataatggtcacattgaaagtaagccattaaccattccaaaggatattgaccttcatctagaaacaaagtcagttacagaagtggatactttagcattgcattactttccagaataccagtggctggtggatttcacagtggctgctacagttgtgtatctagtaactgaagtctactacaattttatgaagcctacacaggaaatgaatatcagcttagtctggtgcctacttgttttgtcttttgcaattagaagatggtggtgaaagatctgtttgtgtcacctttggattttttttctttgtcaaagcaatggcagtgttgattgtaacagaaaattatctggaatttggacttgaaacagggtttacaaatttttcagacagtgcgatgcagtttcttgaaaagcaaggtttagaatctcagagtcctgtttcaaaacttactttcaaatttttcctggctattttctgttcattcattggggcttttttgacatttcctggattacgactggctcaaatgcatctggatgccctgaatttggcaacagaaaaaattacacaactttacttcatatcaacttcctggaccttattgatggttctggcccggtaaacccaccacaagataattatgaaccacatgggaacgaaagatccttatgaagaggccattggtaccttggctctgggcacacccgcggggggcggggtggcaaaagggaaaccggaattttaagaaaccaaaggtgtgatagaacaacggcgaaaaggggcgca

SEQ ID NO: 60455 - DNA, 1094 bp, Homo sapiens
ttccggcagagccggaagaccctctctttcgctgtttgagagtctctcggctcaaggaccgggaggtaagaggtttgggactgccccggcaactccagggtgtctggtccacgacctatcctaggcgccatgtttgaggtggtatcaacatcctacagaagaagaattaagaattcttgcagggaaacaacaaaaagggaaaaccaaaaaagataggaaatataatggtcacattgaaagtaagccattaaccattccaaaggatattgaccttcatctagaaacaaagtcagttacagaagtggatactttagcattgcattactttccagaataccagtggctggtggatttcacagtggctgctacagttgtgtatctagtaactgaagtctactacaattttatgaagcctacacaggaaatgaatatcagcttagtctggtgcctacttgttttgtcttttgcaatcaaagttctattttcattaactacacactattttaaagtagaagatggtggtgaaagatctgtttgtgtcacctttggattttttttctttgtcaaagcaatggcagtgttgattgtaacagaaaattatctggaatttggacttgaaacagggtttacaaatttttcagacagtgcgatgcagtttcttgaaaagcaaggtttagaatctcagagtcctgtttcaaaacttactttcaaatttttcctggctattttctgttcattcattggggcttttttgacatttcctggattacgactggctcaaatgcatctggatgccctgaatttggcaacagaaaaaattacacaaactttacttcatatcaacttcttggcacctttatttatggttctgctctgggtaaaaccaatcaccaaagactacattatgaacccaccactgggcaaagaaatttccccatctggaagatgaagataatagtatctaactcacaaggttatcattggaataaatgaaagaacacatgtaatgcaaccagctggaattaagtgcttaataaatgttcttttcactgctttgcctcatcagaattaaaatagaaatacttgactagtca

SEQ ID NO: 60456 - DNA, 582 bp, Homo sapiens
ggatttcacagtggctgctacagttgtgtatctagtaactgaagtctactacaattttatgaagcctacacaggaaatgaatatcagcttagtctggtgcctacttgttttgtcttttgcaatgtatccttcaaaacatcattaatattaatttattttgcagataacaccattagatctcatctctgatttgagaaagattttatgtcattagataacttttctttattgaaatctgttttatgtaattgaaaatatttttcaaagtaatagaggtaaataatttaaaaagctaaatataagaaaaatgccagtgccctgctttttcttatccaagtctaatgtcacagagacagccacattcacctcttttaggcatttcttttgggaattccttccttgtgtttaaatattttgtgataatgttactatttatatattattgcacctttctccctcttcccttttcttcccttctttcattctcccaaaatagttagagataacattttattaaatttatagtcacttttaccatgttgtgcctatgaaaatattatttacagccaggcattatagtgt

SEQ ID NO: 60457 - DNA, 1198 bp, Homo sapiens
ttccggcagagccggaagaccctctctttcgctgtttgagagtctctcggctcaaggaccgggaggtaagaggtttgggactgccccggcaactccagggtgtctggtccacgacctatcctaggcgccatgggtgtgataggtatacagctggttgttaccatggtgatggccagtgtcatgcagaagattatacctcactattctcttgctcgatggctactctgtaatggcagtttgaggtggtatcaacatcctacagaagaagaattaagaattcttgcagggaaacaacaaaaagggaaaaccaaaaaagataggaaatataatggtcacattgaaagtaagccattaaccattccaaaggatattgaccttcatctagaaacaaagtcagttacagaagtggatactttagcattgcattactttccagaataccagtggctggtggatttcacagtggctgctacagttgtgtatctagtaactgaagtctactacaattttatgaagcctacacaggaaatgaatatcagcttagtctggtgcctacttgttttgtcttttgcaatcaaagttctattttcattaactacacactattttaaagtagaagatggtggtgaaagatctgtttgtgtcacctttggattttttttctttgtcaaagcaatggcagtgttgattgtaacagaaaattatctggaatttggacttgaaacagggtttacaaatttttcagacagtgcgatgcagtttcttgaaaagcaaggtttagaatctcagagtcctgtttcaaaacttactttcaaatttttcctggctattttctgttcattcattggggcttttttgacatttcctggattacgactggctcaaatgcatctggatgccctgaatttggcaacagaaaaaattacacaaactttacttcatatcaacttcttggcacctttatttatggttctgctctgggtaaaaccaatcaccaaagactacattatgaacccaccactgggcaaagaaatttccccatctggaagatgaagataatagtatctaactcacaaggttatcattggaataaatgaaagaacacatgtaatgcaaccagctggaattaagtgcttaataaatgttcttttcactgctttgcctcatcagaattaaaatagaaatacttgactagtca

SEQ ID NO: 60458 - DNA, 182 bp, Homo sapiens
cagcttggagtgggtgaggtggagatttaaatcagatgatcagagaaagcctcactgagaagaagacatttgagcaagggttggaaggaggtgtaaaccaaaaataaaatcctaagccccccactaaccaactgaatggactcctttttggccatgggcaccccagagaaacctgaaaaact

SEQ ID NO: 60459 - DNA, 1402 bp, Homo sapiens
ttctttaccctctcacgtcaaatgaggttggtatttattttaaaggtttaaaattggcctttaaaaatgaatgtatattgccaggtcttaatttctaggtactgtacatgatgatcttaccgatttttggaattcagtgcattatatgaaagacttttaagtcagtagttggccagttgactagtcttttgaagaaaacgtggaaaggagggaggtgatgacgtaactggaagactggactgcgagttagatttggacatgagtccttctgctcttccttgagtaattgtgacagactttgggacagccacttcacttgtccttgttttcctgtctataaactaaaatgtgttctgagattatacagtcaattccgttttaaattagtagtgtgtttaatattgaacatctattgaatatctaagattgcatactcttttgagggaaatgaaaagcaatgaagaataagtatgcttattgtcgaggagctatgaatctagtttgaaagaaaagcatggtatgaaaaggtgtgggagatggagcatggaagtagagggtttgtgttggaaactgttgtagaagataagataatactggatgctagagtggggtgggtgaagctgatgcatctaatattgctttccacatctttgtaaaactaagatgtagtgaggtaaatctccattgcttgcgctgcttacgcaaattttagttctgagtgccaaaaaagatggaaataatatttgagagtaggtgttacataaaagtttctgtggaatggatccgttttggtggatatcattatacaaccttcatactgtttataactggtaagtaagtatttcaactttcaggatgatattaaacttccaaactaaattaatttgaagacagttttttgggtatgtagaatccatgaactgatgttttttgtacaagtctttctagtaaaacaaaagctgtctttcactgttaatatttgtgtgccaatggcatctctgggtgaaagctacatatgtgctttttggtgtgattgccttctaaagagtaattttgaaaatttgagggctaatttttttcattagtgtataataatagtattttttgagaaaaaagatacttgttaatagttgataatttcttcaatcataagaaggaatgataatgtaaaagccttccttctacccacctaagtgcctgatttgaaggggaaatatttaaatagtaaaaatagatgtataccataagaggtcattgttactaaaaaatcctgaggccattattttgttaacccatcaacaattaacagtgttacatgttcagaactgagagaatctaagtatgcatttataaaagacaagagtgaacatggtttttatgttactgactagctaaaaagaat

SEQ ID NO: 60460 - DNA, 796 bp, Homo sapiens
ggaacagacctgcccaaggttttgggggcccaacccctcacccccaacaagttataagctgtgtccagcatacaggacatggagtcaaaggagattattctctggttttaagatttaatgctgtttttactgttgagttttgaacttaggaccagttacccctttctttttgcttatatctctattttggaatgggaatgtctatcctgtgtctgtcccactattgtgttttggaagtagataacttgttttgatttcacaaacttagagctggagggagtttgccccaggtgaatcaggccttgagtctcaaccatatctgatttagatgagacttcagacttttgagttgatgctggaacaagttaagactctgaggctattgggatgtaatcactgtattttacattgtgaagacataaattttgggggttggggaaaaatgctacagtttgtatgtatgccccagaagttcatatgttgaaaacaattaatcttcgatgtaacagtattaggaatggggcttttaagaggtgattaagacatgagggctcttcccttatgaatggatgaatgcttttatcatggaagtgggttagttacagtgagagtgtgcaaaatacattgaaatacattgagcatttcacaggagagtaaatatacacagccaaaaaactgaaggaacaagtgaagaggtgttcaacattgttagtgattagggaaatgcaaagcaagaccacaatgatactttatgtccattagattggtaaaaataaaaatcaaatgttaaagaaga

SEQ ID NO: 60461 - DNA, 3158 bp, Homo sapiens
  misc_feature (5)..(6): n is a, c, g, or t
ggccnngggccacccccgggcggcttgtagccggtgcgcggggtggctggggctacgtgcagagctgtcgcggagccggagcagcagcggtgaagcccctcggctcggccgagaccgccgtgcccattgctcgcctcggttgccgccgctttagccgcagccgctgctgccgccgccgggggagaggcagcctattgtctttctccgcggcgaaggtgaggagctgtctcggctcggcccgcgggggagccccgggagccgcacggagatggaggaggacatctggacagtgagcaggaggcgcttcggcccatgccgaacatcccaggggacctggagagccgggaggccatggtggcatttttcaactccgctggagccagtgcccaggaggaacaaagggtgtgctgccagcccctggctcacccagtggcctcgtcccagaaaaagccagaggtagcggccccagccccagagagtgggggtgagtctgtgtttggggagacccaccgggccctgcagggggccatggagaagctgcaggaaagtacatcagccagggggcagtgtcagagacgcagcactgggagaggaggacatcgtcaggctggcccaggaccaggaggagatgaaggtgaacctgcaggagctgcggggcaggtgttgcagcttgtgggagaccacaaggaggggcatggcaaattctgaccattgcccagaaccctgctgatgagcccactctaggagccccaatagcccaggagcttgggtgtgctgacgagcagggtggtgagtagagccctcaggcggggtgggcaggcaggagcaggggaggctcacactgtgctcagattcccaccccccctccctctctctgaagatctttgtgaggtgagcctcactgatagcgtggaggctgcaccaggagaggacagggagggttctccccacgacaaccccactgcacagcagatccagcagctgcttcctgtaatgcaggactccccaggagcacccaggcatgggcagcaacccctgcatgccattctttttgggctcccgagaacagggagataaacaccaccatcatctgagagccgggaaggggaaggcgtaggtgtgggcgtggcaaggttcctggaaaagaggggctggaagggaaaggggaggaagatggagggagaagctagagcttcataggtagtgcctgggggctgtggcggtcctccccaccccacacacactggcctctctcatggcacccaggcagtccacccacagttcagaccaatgctcaactcccccggcttccctcttctgtggtcaccccatcttccaacccactggcccagggccacctcttgcttggggagccccacccaacagccaccaagcctgacagaaggaacactgcttgaaccaaaatggtgaagctgtaagggatggctggctggagtgagcgccagaggcccctctctgggcagtcagaaagcccagggtccactgaagggaccctggggaaggcagggagggcaggtagctagatgccactgcccatagacttataagtctaagaggggaacctcaactggttggcggggggctgcaggttgcataggtgaggctgggcccttcctgctgggaaaagcagaagagggagactccgtggcaggaaaggcaggtgggctcgctaggcggagctcagctgggccagcaagcactgtggtctccttggctgaatagcacaggtgacccctaggagcaacaggccaaggtccgtgagcctgctggctggcagtagtgcttcagtagtgctggccagggacccagccttcagtcacatgctagcagctgtgatggtacctgggagggagggaagggggctgtgtgtccttgcatggcctatgaagtgtgttgtgggataaccgtgtgtataggactctcaggcttttatcctagatcaccactggattgctgacagatagaggacgtgggaccgtgactatcacccctaatctgcagtggatttggctctcggcactcccaggctgggagctggatacctgccctggcagcatgactcagactgcatgacagtcacagactcgcctctgctcctgtggtccagtggccggacaccccctgggatggctcaaaggagtcaggacttggaagtggggacatcagggtagctgaaggaaatccacacacccagagcatctcggagttcagactctcagacctgaagtaggcgcccccgggactgggctaggagttggacggaatggaggatggaggacagcgagaagaaaggaagagaaatgcaacgtgtgggcagccgccaagagtgaaaatagagggaagtgtcatgcaagtgctggacagaaggcggcaggtgggacgagccccacagccccctcctcaaaaacgaccacctccaggactcagtgatccctggggggcaggctctgccagcccctggctgccttgctgggcccttctgggactgtgcgctggacttggagccccttggagtatggcttttcacacgggcttctataccgcttcgactggaagatccacctccccactgccttttctcactcagatggggacaccgaggtccagaggaaaagacacctgtcaaatgtcacagatctgggaggggacttaagacttatcatgccaagaggacacctgtctactcagtttttttttggtggggcggggggcggtgatagggtctcgctctgtcaccaggctggagtacagtgatgactgctcactgcagcctccacctcctgggctcaaagtgatcctccaacgtcagcctctcgagtagctaggactacaggcacatgccaccaccaagcccagctatttttaaaatttttgtgtggagacaaggtctcactatgtggcccaggctggtctcgaactcctgggctcaagtgatcctcctgcctcggcctccaggagtgggagttggagttgatgcctggatacaggagctctgtgggtgggagtgagacaaaacacagggtcctgagctctggggaccaagcaatgtcctctggtgaaaaaaatcctggacttgctggcagaagatttgcctcttactcgccatgtgctctgaatacatttacctgccctctggg

SEQ ID NO: 60462 - DNA, 4168 bp, Homo sapiens
  misc_feature (5)..(6): n is a, c, g, or t
ggccnngggccacccccgggcggcttgtagccggtgcgcggggtggctggggctacgtgcagagctgtcgcggagccggagcagcagcggtgaagcccctcggctcggccgagaccgccgtgcccattgctcgcctcggttgccgccgctttagccgcagccgctgctgccgccgccgggggagaggcagcctattgtctttctccgcggcgaaggtgaggagctgtctcggctcggcccgcgggggagccccgggagccgcacggagatggaggaggacatctggacagtgagcaggaggcgcttcggcccatgccgaacatcccaggggacctggagagccgggaggccatggtggcatttttcaactccgctggagccagtgcccaggaggaacaaagggtgtgctgccagcccctggctcacccagtggcctcgtcccagaaaaagccagaggtagcggccccagccccagagagtgggggtgagtctgtgtttggggagacccaccgggccctgcagggggccatggagaagctgcagcgactttatggaaggagaaggtggacctgaaggagcgggtagagaaactagagcttcaattcatccacctctcaggacagacagacaccatagggagaaagtacatcagccagggggcagtgtcagagacgcagcactgggagaggaggacatcgtcaggctggcccaggaccaggaggagatgaaggtgaacctgcaggagctgcggggcaggtgttgcagcttgtgggagaccacaaggaggggcatggcaaattctgaccattgcccagaaccctgctgatgagcccactctaggagccccaatagcccaggagcttgggtgtgctgacgagcagggtggtgagtagagccctcaggcggggtgggcaggcaggagcaggggaggctcacactgtgctcagattcccaccccccctccctctctctgaagatctttgtgaggtgagcctcactgatagcgtggaggctgcaccaggagaggacagggagggttctccccacgacaaccccactgcacagcagatccagcagctgcttcctgtaatgcaggactccccaggagcacccaggcatgggcagcaacccctgcatgccattctttttgggctcccgagaacagggagataaacaccaccatcatctgagagccgggaaggggaaggcgtaggtgtgggcgtggcaaggttcctggaaaagaggggctggaagggaaaggggaggaagatggagggagaagctagagcttcataggtagtgcctgggggctgtggcggtcctccccaccccacacacactggcctctctcatggcacccaggcagtccacccacagttcagaccaatgctcaactcccccggcttccctcttctgtggtcaccccatcttccaacccactggcccagggccacctcttgcttggggagccccacccaacagccaccaagcctgacagaaggaacactgcttgaaccaaaatggtgaagctgtaagggatggctggctggagtgagcgccagaggcccctctctgggcagtcagaaagcccagggtccactgaagggaccctggggaaggcagggagggcaggtagctagatgccactgcccatagacttataagtctaagaggggaacctcaactggttggcggggggctgcaggttgcataggtgaggctgggcccttcctgctgggaaaagcagaagagggagactccgtggcaggaaaggcaggtgggctcgctaggcggagctcagctgggccagcaagcactgtggtctccttggctgaatagcacaggtgacccctaggagcaacaggccaaggtccgtgagcctgctggctggcagtagtgcttcagtagtgctggccagggacccagccttcagtcacatgctagcagctgtgatggtacctgggagggagggaagggggctgtgtgtccttgcatggcctatgaagtgtgttgtgggataaccgtgtgtataggactctcaggcttttatcctagatcaccactggattgctgacagatagaggacgtgggaccgtgactatcacccctaatctgcagtggatttggctctcggcactcccaggctgggagctggatacctgccctggcagcatgactcagactgcatgacagtggccggacaccccctgggatggctcaaaggagtcaggacttggaagtggggacatcagggtagctgaaggaaatccacacacccagagcatctcggagttcagactctcagacctgaagtaggcgcccccgggactgggctaggagttggacggaatggaggatggaggacagcgagaagaaaggaagagaaatgcaacgtgtgggcagccgccaagagtgaaaatagagggaagtgtcatgcaagtgctggacagaaggcggcaggtgggacgagccccacagccccctcctcaaaaacgaccacctccaggactcagtgatccctggggggcaggctctgccagccctcggccacacgtggctccggcacccatggtcccagtgccttggatggagacggccagttctggcggccagatgtggtgctctggaatccagtcccatttccttcctggccacgcctgtccagcggcctcttcagccgcattcagcccctacttacctggggaccccggctggggcacgagagcaccaggggggtagggcccaaagggatcaggggaagcctctggcctggagggtatggggcacgcttccccaagggcggacccggcaggaggaagcccaggagctgggtcctgccgcccaggagctgggccctgccacccaggccgggctagggacatggcagggcctgggcatcctgacgctggacttgggcgacctgggaggcacagggaggggagagatgggcgaccccgccccagcgcagtgccggccacaccccaaggcggttgccagagcttaagccccgcccccagcagcgagaacatcccagctccacacccccccccccccccggcagccagtgctccttgtcaagctccccccgtcactccaggtgggagccaccccggtgagggggtgtgccacttgcccccagggcactcctctgggcatcccgggtgggggattttggggccgtggggggcagtctttggtacctgtgttcgtcagggatgctctgacaaccaggtgtcgtccacgggcgggggcatgggcatggtgacagtggtcctgttgatgtcaccgatgatgctgagcgcctccttcagcgcgtggtgcatgtgcagcatctcgtcgtgctgctgtgcctgctctgccaactcctccatcagtgtgttctggttcccacatgagtacatattggccagcggctccgagatgatgaactccggggtctgagagtgggcaaacagggaagaaggttgggacctggtgcctgtgccgccctggctgccttgctgggcccttctgggactgtgcgctggacttggagccccttggagtatggcttttcacacgggcttctataccgcttcgactggaagatccacctccccactgccttttctcactcagatggggacaccgaggtccagaggaaaagacacctgtcaaatgtcacagatctgggaggggacttaagacttatcatgccaagaggacacctgtctactcagtttttttttggtggggcggggggcggtgatagggtctcgctctgtcaccaggctggagtacagtgatgactgctcactgcagcctccacctcctgggctcaaagtgatcctccaacgtcagcctctcgagtagctaggactacaggcacatgccaccaccaagcccagctatttttaaaatttttgtgtggagacaaggtctcactatgtggcccaggctggtctcgaactcctgggctcaagtgatcctcctgcctcggcctccaggagtgggagttggagttgatgcctggatacaggagctctgtgggtgggagtgagacaaaacacagggtcctgagctctggggaccaagcaatgtcctctggtgaaaaaaatcctggacttgctggcagaagatttgcctcttactcgccatgtgctctgaatacatttacctgccctctggg

SEQ ID NO: 60463 - DNA, 2874 bp, Homo sapiens
  misc_feature (5)..(6): n is a, c, g, or t
ggccnngggccacccccgggcggcttgtagccggtgcgcggggtggctggggctacgtgcagagctgtcgcggagccggagcagcagcggtgaagcccctcggctcggccgagaccgccgtgcccattgctcgcctcggttgccgccgctttagccgcagccgctgctgccgccgccgggggagaggcagcctattgtctttctccgcggcgaaggtgaggagctgtctcggctcggcccgcgggggagccccgggagccgcacggagatggaggaggacatctggacagtgagcaggaggcgcttcggcccatgccgaacatcccaggggacctggagagccgggaggccatggtggcatttttcaactccgctggagccagtgcccaggaggaacaaagggtgtgctgccagcccctggctcacccagtggcctcgtcccagaaaaagccagaggtagcggccccagccccagagagtgggggaaagtacatcagccagggggcagtgtcagagacgcagcactgggagaggaggacatcgtcaggctggcccaggaccaggaggagatgaaggtgaacctgcaggagctgcggggcaggtgttgcagcttgtgggagaccacaaggaggggcatggcaaattctgaccattgcccagaaccctgctgatgagcccactctaggagccccaatagcccaggagcttgggtgtgctgacgagcagggtgatcaccactggattgctgacagatagaggacgtgggaccgtgactatcacccctaatctgcagtggatttggctctcggcactcccaggctgggagctggatacctgccctggcagcatgactcagactgcatgacagtcacagactcgcctctgctcctgtggtccagtggccggacaccccctgggatggctcaaaggagtcaggacttggaagtggggacatcagggtagctgaaggaaatccacacacccagagcatctcggagttcagactctcagacctgaagtaggcgcccccgggactgggctaggagttggacggaatggaggatggaggacagcgagaagaaaggaagagaaatgcaacgtgtgggcagccgccaagagtgaaaatagagggaagtgtcatgcaagtgctggacagaaggcggcaggtgggacgagccccacagccccctcctcaaaaacgaccacctccaggactcagtgatccctggggggcaggctctgccagccctcggccacacgtggctccggcacccatggtcccagtgccttggatggagacggccagttctggcggccagatgtggtgctctggaatccagtcccatttccttcctggccacgcctgtccagcggcctcttcagccgcattcagcccctacttacctggggaccccggctggggcacgagagcaccaggggggtagggcccaaagggatcaggggaagcctctggcctggagggtatggggcacgcttccccaagggcggacccggcaggaggaagcccaggagctgggtcctgccgcccaggagctgggccctgccacccaggccgggctagggacatggcagggcctgggcatcctgacgctggacttgggcgacctgggaggcacagggaggggagagatgggcgaccccgccccagcgcagtgccggccacaccccaaggcggttgccagagcttaagccccgcccccagcagcgagaacatcccagctccacacccccccccccccccggcagccagtgctccttgtcaagctccccccgtcactccaggtgggagccaccccggtgagggggtgtgccacttgcccccagggcactcctctgggcatcccgggtgggggattttggggccgtggggggcagtctttggtacctgtgttcgtcagggatgctctgacaaccaggtgtcgtccacgggcgggggcatgggcatggtgacagtggtcctgttgatgtcaccgatgatgctgagcgcctccttcagcgcgtggtgcatgtgcagcatctcgtcgtgctgctgtgcctgctctgccaactcctccatcagtgtgttctggttcccacatgagtacatattggccagcggctccgagatgatgaactccggggtctgagagtgggcaaacagggaagaaggttgggacctggtgcctgtgccgccctggctgccttgctgggcccttctgggactgtgcgctggacttggagccccttggagtatggcttttcacacgggcttctataccgcttcgactggaagatccacctccccactgccttttctcactcagatggggacaccgaggtccagaggaaaagacacctgtcaaatgtcacagatctgggaggggacttaagacttatcatgccaagaggacacctgtctactcagtttttttttggtggggcggggggcggtgatagggtctcgctctgtcaccaggctggagtacagtgatgactgctcactgcagcctccacctcctgggctcaaagtgatcctccaacgtcagcctctcgagtagctaggactacaggcacatgccaccaccaagcccagctatttttaaaatttttgtgtggagacaaggtctcactatgtggcccaggctggtctcgaactcctgggctcaagtgatcctcctgcctcggcctccaggagtgggagttggagttgatgcctggatacaggagctctgtgggtgggagtgagacaaaacacagggtcctgagctctggggaccaagcaatgtcctctggtgaaaaaaatcctggacttgctggcagaagatttgcctcttactcgccatgtgctctgaatacatttacctgccctctggg

SEQ ID NO: 60464 - DNA, 1043 bp, Homo sapiens
tgaggccccacggcccgcatgcacactctaacacatgcccacaaacaacacgcatacgtcgccctctccgccacctcccggtgcccaacaccctcaccagccggcacgtgccgcatggatctggggcgtgcagccactcggcacactgaagcacatgcgtgggcagagtcacaacacagatgctcacccgcacacagaggcatttgcaccagctccctgcacactcgtgcctggcgtgctcagaggaccacccatcctgctcagggagacagggcttgctcactaatgtccggctgtcatttctccacctaagagccttccatggctccctactgcctacagcgttgaatcccaacaagtcatactctttggactttgaaggttctccaccctgtgcgctggacttggagccccttggagtatggcttttcacacgggcttctataccgcttcgactggaagatccacctccccactgccttttctcactcagatggggacaccgaggtccagaggaaaagacacctgtcaaatgtcacagatctgggaggggacttaagacttatcatgccaagaggacacctgtctactcagtttttttttggtggggcggggggcggtgatagggtctcgctctgtcaccaggctggagtacagtgatgactgctcactgcagcctccacctcctgggctcaaagtgatcctccaacgtcagcctctcgagtagctaggactacaggcacatgccaccaccaagcccagctatttttaaaatttttgtgtggagacaaggtctcactatgtggcccaggctggtctcgaactcctgggctcaagtgatcctcctgcctcggcctccaggagtgggagttggagttgatgcctggatacaggagctctgtgggtgggagtgagacaaaacacagggtcctgagctctggggaccaagcaatgtcctctggtgaaaaaaatcctggacttgctggcagaagatttgcctcttactcgccatgtgctctgaatacatttacctgccctctggg

SEQ ID NO: 60465 - DNA, 2770 bp, Homo sapiens
  misc_feature (649)..(649): n is a, c, g, or t
aaggtttcgtgtgtgtgttagcaagactggagtcagagcaggcatcaaactttacatcccatatgtcacacctcaccatagacctgggtgccaaatagcctgaagagtctgaactcacgttggcagttagcaaagtgctcctacagccgcatctgcggttaacatagcatccctatggccactgtctcccttgatccccacagccatcctaggagaaaggcagaatgtcataatttgctaaaagggatgctgaggctctgggagggaaagggacttgcctaaagccccagggtgaagcagcatctctggactcccagtccagtgatcttgcccaatactttgctgcttgcctatacccctctaacttggtcaacagcacatcacagggcaagccccaatccctgcttcatttttatatatgggcgctggtcccacagccccactctccagccatttggaaacaaaaacagatgctattgttcttccttagagaacgtggccagtggagacggcacactggaaatcagagtgaatgttcttgaaagagggtcacgggtcaacaaggcccagccaaaggatgcagtagaaccattttccttagaaatctttgggagtgaagtaggcttcagccactcccatccctgccctngcggctaccactaccccattagtttagacagggtcgggcggggaggggtgtggagaagaaatgagcttgcctgtggcccccaggctccctctgtcctagctcaggtctgggtgccattctttacactcgtgtgctcgctcacgcacacatcacacaccttgctggtcacacagtcacagactcgcctctgctcctgtggtccagtggccggacaccccctgggatggctcaaaggagtcaggacttggaagtggggacatcagggtagctgaaggaaatccacacacccagagcatctcggagttcagactctcagacctgaagtaggcgcccccgggactgggctaggagttggacggaatggaggatggaggacagcgagaagaaaggaagagaaatgcaacgtgtgggcagccgccaagagtgaaaatagagggaagtgtcatgcaagtgctggacagaaggcggcaggtgggacgagccccacagccccctcctcaaaaacgaccacctccaggactcagtgatccctggggggcaggctctgccagccctcggccacacgtggctccggcacccatggtcccagtgccttggatggagacggccagttctggcggccagatgtggtgctctggaatccagtcccatttccttcctggccacgcctgtccagcggcctcttcagccgcattcagcccctacttacctggggaccccggctggggcacgagagcaccaggggggtagggcccaaagggatcaggggaagcctctggcctggagggtatggggcacgcttccccaagggcggacccggcaggaggaagcccaggagagggcctgggcatcctgacgctggacttgggcgacctgggaggcacagggaggggagagatgggcgaccccgccccagcgcagtgccggccacaccccaaggcggttgccagagcttaagccccgcccccagcagcgagaacatcccagctccacacccccccccccccccggcagccagtgctccttgtcaagctccccccgtcactccaggtgggagccaccccggtgagggggtgtgccacttgcccccagggcactcctctgggcatcccgggtgggggattttggggccgtggggggcagtctttggtacctgtgttcgtcagggatgctctgacaaccaggtgtcgtccacgggcgggggcatgggcatggtgacagtggtcctgttgatgtcaccgatgatgctgagcgcctccttcagcgcgtggtgcatgtgcagcatctcgtcgtgctgctgtgcctgctctgccaactcctccatcagtgtgttctggttcccacatgagtacatattggccagcggctccgagatgatgaactccggggtctgagagtgggcaaacagggaagaaggttgggacctggtgcctgtgccgccctggctgccttgctgggcccttctgggactgtgcgctggacttggagccccttggagtatggcttttcacacgggcttctataccgcttcgactggaagatccacctccccactgccttttctcactcagatggggacaccgaggtccagaggaaaagacacctgtcaaatgtcacagatctgggaggggacttaagacttatcatgccaagaggacacctgtctactcagtttttttttggtggggcggggggcggtgatagggtctcgctctgtcaccaggctggagtacagtgatgactgctcactgcagcctccacctcctgggctcaaagtgatcctccaacgtcagcctctcgagtagctaggactacaggcacatgccaccaccaagcccagctatttttaaaatttttgtgtggagacaaggtctcactatgtggcccaggctggtctcgaactcctgggctcaagtgatcctcctgcctcggcctccaggagtgggagttggagttgatgcctggatacaggagctctgtgggtgggagtgagacaaaacacagggtcctgagctctggggaccaagcaatgtcctctggtgaaaaaaatcctggacttgctggcagaagatttgcctcttactcgccatgtgctctgaatacatttacctgccctctggg

SEQ ID NO: 60466 - DNA, 3029 bp, Homo sapiens
  misc_feature (5)..(6): n is a, c, g, or t
ggccnngggccacccccgggcggcttgtagccggtgcgcggggtggctggggctacgtgcagagctgtcgcggagccggagcagcagcggtgaagcccctcggctcggccgagaccgccgtgcccattgctcgcctcggttgccgccgctttagccgcagccgctgctgccgccgccgggggagaggcagcctattgtctttctccgcggcgaaggtgaggagctgtctcggctcggcccgcgggggagccccgggagccgcacggagatggaggaggacatctggacagtgagcaggaggcgcttcggcccatgccgaacatcccaggggacctggagagccgggaggccatggtggcatttttcaactccgctggagccagtgcccaggaggaacaaagggtgtgctgccagcccctggctcacccagtggcctcgtcccagaaaaagccagaggtagcggccccagccccagagagtgggggtgagtctgtgtttggggagacccaccgggccctgcagggggccatggagaagctgcagcgactttatggaaggagaaggtggacctgaaggagcgggtagagaaactagagcttcaattcatccacctctcaggacagacagacaccatagggagaaagtacatcagccagggggcagtgtcagagacgcagcactgggagaggaggacatcgtcaggctggcccaggaccaggaggagatgaaggtgaacctgcaggagctgcggggcaggtgttgcagcttgtgggagaccacaaggaggggcatggcaaattctgaccattgcccagaaccctgctgatgagcccactctaggagccccaatagcccaggagcttgggtgtgctgacgagcagggtgatcaccactggattgctgacagatagaggacgtgggaccgtgactatcacccctaatctgcagtggatttggctctcggcactcccaggctgggagctggatacctgccctggcagcatgactcagactgcatgacagtcacagactcgcctctgctcctgtggtccagtggccggacaccccctgggatggctcaaaggagtcaggacttggaagtggggacatcagggtagctgaaggaaatccacacacccagagcatctcggagttcagactctcagacctgaagtaggcgcccccgggactgggctaggagttggacggaatggaggatggaggacagcgagaagaaaggaagagaaatgcaacgtgtgggcagccgccaagagtgaaaatagagggaagtgtcatgcaagtgctggacagaaggcggcaggtgggacgagccccacagccccctcctcaaaaacgaccacctccaggactcagtgatccctggggggcaggctctgccagccctcggccacacgtggctccggcacccatggtcccagtgccttggatggagacggccagttctggcggccagatgtggtgctctggaatccagtcccatttccttcctggccacgcctgtccagcggcctcttcagccgcattcagcccctacttacctggggaccccggctggggcacgagagcaccaggggggtagggcccaaagggatcaggggaagcctctggcctggagggtatggggcacgcttccccaagggcggacccggcaggaggaagcccaggagctgggtcctgccgcccaggagctgggccctgccacccaggccgggctagggacatggcagggcctgggcatcctgacgctggacttgggcgacctgggaggcacagggaggggagagatgggcgaccccgccccagcgcagtgccggccacaccccaaggcggttgccagagcttaagccccgcccccagcagcgagaacatcccagctccacacccccccccccccccggcagccagtgctccttgtcaagctccccccgtcactccaggtgggagccaccccggtgagggggtgtgccacttgcccccagggcactcctctgggcatcccgggtgggggattttggggccgtggggggcagtctttggtacctgtgttcgtcagggatgctctgacaaccaggtgtcgtccacgggcgggggcatgggcatggtgacagtggtcctgttgatgtcaccgatgatgctgagcgcctccttcagcgcgtggtgcatgtgcagcatctcgtcgtgctgctgtgcctgctctgccaactcctccatcagtgtgttctggttcccacatgagtacatattggccagcggctccgagatgatgaactccggggtctgagagtgggcaaacagggaagaaggttgggacctggtgcctgtgccgccctggctgccttgctgggcccttctgggactgtgcgctggacttggagccccttggagtatggcttttcacacgggcttctataccgcttcgactggaagatccacctccccactgccttttctcactcagatggggacaccgaggtccagaggaaaagacacctgtcaaatgtcacagatctgggaggggacttaagacttatcatgccaagaggacacctgtctactcagtttttttttggtggggcggggggcggtgatagggtctcgctctgtcaccaggctggagtacagtgatgactgctcactgcagcctccacctcctgggctcaaagtgatcctccaacgtcagcctctcgagtagctaggactacaggcacatgccaccaccaagcccagctatttttaaaatttttgtgtggagacaaggtctcactatgtggcccaggctggtctcgaactcctgggctcaagtgatcctcctgcctcggcctccaggagtgggagttggagttgatgcctggatacaggagctctgtgggtgggagtgagacaaaacacagggtcctgagctctggggaccaagcaatgtcctctggtgaaaaaaatcctggacttgctggcagaagatttgcctcttactcgccatgtgctctgaatacatttacctgccctctggg

SEQ ID NO: 60467 - DNA, 2365 bp, Homo sapiens
  misc_feature (649)..(649): n is a, c, g, or t
aaggtttcgtgtgtgtgttagcaagactggagtcagagcaggcatcaaactttacatcccatatgtcacacctcaccatagacctgggtgccaaatagcctgaagagtctgaactcacgttggcagttagcaaagtgctcctacagccgcatctgcggttaacatagcatccctatggccactgtctcccttgatccccacagccatcctaggagaaaggcagaatgtcataatttgctaaaagggatgctgaggctctgggagggaaagggacttgcctaaagccccagggtgaagcagcatctctggactcccagtccagtgatcttgcccaatactttgctgcttgcctatacccctctaacttggtcaacagcacatcacagggcaagccccaatccctgcttcatttttatatatgggcgctggtcccacagccccactctccagccatttggaaacaaaaacagatgctattgttcttccttagagaacgtggccagtggagacggcacactggaaatcagagtgaatgttcttgaaagagggtcacgggtcaacaaggcccagccaaaggatgcagtagaaccattttccttagaaatctttgggagtgaagtaggcttcagccactcccatccctgccctngcggctaccactaccccattagtttagacagggtcgggcggggaggggtgtggagaagaaatgagcttgcctgtggcccccaggctccctctgtcctagctcaggtctgggtgccattctttacactcgtgtgctcgctcacgcacacatcacacaccttgctggtcacacagtcacagactcgcctctgctcctgtggtccagtggccggacaccccctgggatggctcaaaggagtcaggacttggaagtggggacatcagggtagctgaaggaaatccacacacccagagcatctcggagttcagactctcagacctgaagtaggcgcccccgggactgggctaggagttggacggaatggaggatggaggacagcgagaagaaaggaagagaaatgcaacgtgtgggcagccgccaagagtgaaaatagagggaagtgtcatgcaagtgctggacagaaggcggcaggtgggacgagccccacagccccctcctcaaaaacgaccacctccaggactcagtgatccctggggggcaggctctgccagccctcggccacacgtggctccggcacccatggtcccagtgccttggatggagacggccagttctggcggccagatgtggtgctctggaatccagtcccatttccttcctggccacgcctgtccagcggcctcttcagccgcattcagcccctacttacctggggaccccggctggggcacgagagcaccaggggggtagggcccaaagggatcaggggaagcctctggcctggagggtatggggcacgcttccccaagggcggacccggcaggaggaagcccaggagctgggtcctgccgcccaggagctgggccctgccacccaggccgggctagggacatggcagggcctgggcatcctgacgctggacttgggcgacctgggaggcacagggaggggagagatgggcgaccccgccccagcgcagtgccggccacaccccaaggcggttgccagagcttaagccccgcccccagcagcgagaacatcccagctccacacccccccccccccccggcagccagtgctccttgtcaagctccccccgtcactccaggtgggagccaccccggtgagggggtgtgccacttgcccccagggcactcctctgggcatcccgggtgggggattttggggccgtggggggcagtctttggtacctgtgttcgtcagggatgctctgacaaccaggtgtcgtccacgggcgggggcatgggcatggtgacagtggtcctgttgatgtcaccgatgatgctgagcgcctccttcagcgcgtggtgcatgtgcagcatctcgtcgtgctgctgtgcctgctctgccaactcctccatcagtgtgttctggttcccacatgagtacatattggccagcggctccgagatgatgaactccggggtctgagagtgggcaaacagggaagaaggttgggacctggtgcctgtgccgccctggctgccttgctgggcccttctgggactgtgcgctggacttggagccccttggagtatggcttttcacacgggcttctataccgcttcgactggaagatccacctccccactgccttttctcactcagatggggacacccgagctttcctgcgtagtagacacttgttcaagattcgtacactatttaatcctgggggggtatctatatcaccct

SEQ ID NO: 60468 - DNA, 330 bp, Homo sapiens
aacaaagggtgtgctgccagcccctggctcacccagtggcctcgtcccagaaaaagccagaggtagcggccccagccccagagagtgggggtgagtctgtgtttggggagacccaccgggccctgcagggggccatggagaagctgcaggtgagtaggtcctggcatgggccaacaaggggggcgggggggcaggacaaggcaggtgactcctgacatgtgaccccattattttggctccacagcgactttatggaaggagaaggtggacctgaaggagcgggtagagaaactagagcttcaattcatccacctctcaggacagacagac

SEQ ID NO: 60469 - DNA, 1106 bp, Homo sapiens
ctgccccaccctggggattgacatcctctataaatatctatgctatttggctttgtccctttaaaaggcgggtccaggggcgtggcctccctcaaatggagcgctcactctgaccccctccttcgtgtgccccccacacactccccacgccttcattgtaaatagtcacttttgtactgggtttgagccaggggacgtggggagtcatttttcttttctttatgttggcatctcaggccactggaggcatggcccacatcccgggtcgatttgggagaattttaaggtatgtcccctcacctgtccccatcgctaaggatttcaagctatcagtattactctagagggatggggtgcatagattccccggcagggtggtgggagaggtgtggaaaggtgtagtctgggaggatgcctccgttttccccttctgtgaaatggattcatcctccaatttccctgaggagcctcagtgagataatggtggagtcagaggagctagaacctctcttccccctttctctgttggagacagggtagcagaagaatgggggacaggggaggctgcagggccatctttggagaaccgattgctaaatccttcttaggaccttaaggtagcctcctctccaggcttgttctccctcttggaatatggggaggactggaggacctctaaggtcccttggttctccccagtccttagattaaaaggcccaggccccaggctggccccctgcctgctgtcccactccttcattccatttcttggaatgtggccatgcctccagtgcctccattcaaccccctctaactgattccttccatcctctgcgaccagagacgccgcccgcctcctgcccaccacctccagaagctcctggctggggtgcactgccgtctcctcccactccccacattgccatgcctgggccacgcccaccccacccactcacccacccccagtgtccgttgtgtgacctagtgcaccatgtattagcttccatggcccccaccccagcccccaccacaccccctttccccacccctttcccctcggcgacttcacctttttttgccgcgataaacgccatctcagcatctgt

SEQ ID NO: 60470 - DNA, 174 bp, Homo sapiens
aggggctgggttggtagtctgccagagacagggaacgagattatttgcaagagctgcagcttcattaaagtcaagccctccttgtagttggtcctggacattgcttatagatgtccctgaccataatcggtcaagttcaacaccaactgcactagtccagaacagtgtctgaag

SEQ ID NO: 60471 - DNA, 315 bp, Homo sapiens
gacaacttacagtcaatgtgataagcaagtactgtgccatagtttagttggcagtgttttttaactatttagtagtacatatagtaatgatgtatttcctcagagctgatgaaacaggatggtgaataaacaaaaggtagatcagtggatatggtaggctaccaacattactaccactcatctaagaattaaggaagtatatccatatttgccgaaggaaatactaaaaggaaaccagcaactattaaaactggatgccttataggagacaaaggggatttggtagacacagggataggggtagaaaggaaattt

SEQ ID NO: 60472 - DNA, 258 bp, Homo sapiens
ggctgcctggggactgctggtttgcaggggaagctgtcctcatccaaaagaagaatcaagttttgttttcctgtggttcccttgctctcccccggcctcacctcgagcttccacttgggccctttcccatgcttctacttgagccccgcctgcctcaccgtctgcctcaccgccacctcctgctcagagtgagtgcatgcatgccagacagatacacatatacatacacacacacacacacaccctattttttttttt

SEQ ID NO: 60473 - DNA, 591 bp, Homo sapiens
tctttaaatgtcaacaaagagtcagcaggcagtgtgtcagctctgcacctggccacatttcctatcctctgttgcaacttagtgaagctacgtggccaaactagagccaacggaacataagtgggagtgatatatgtaatttgggggcattttccacataaaataaaagctctttgccatggaatccctttgtctttccccttcccatgtgtggtcacaggaatgactatgacccaccttccaatcatgcagatgaggataatgcccaaggggataaacttttggggaaaaaatgagtccactcaccaatccatatttaaagacttatatgtgtggaagaaataagcttttgtgtgttttttagtcactctccttcagtctctatactacagcagttgaaatagaccttacataatacacaccctttctaggtacctacaggtcttctgcaaaagcagccatacaatcttcagattgtgaccaagttgcttttaaaattctcatccaggttgcctcttttttctctctcttggttgtagcaattctcatcagtagtgctgccaaagttgaatcctctttcgagcacatgca

SEQ ID NO: 60474 - DNA, 117 bp, Homo sapiens
gatatattaattagctggatttgtttatagcacacaaatcaaaacatcatattgttcaccataaatatgtgatgttttgatatatgtgaaacatatcacatatataagtatgtgaca

SEQ ID NO: 60475 - DNA, 421 bp, Homo sapiens
tcttactctgttgcccaggctggagtgcaatagcacaatctcagctcactgcacctccgcctcccgggttcaagtgagtctcctgcatcagcctcctgagtagctgggattacaggcacgtgccaccacgcccggctaatttttgtatttttttagtagagacagggtttcaccatgttggtcaggctggtctcgaactcctgacctcgtgatccacctgcctccgcctcccaaagtgctgggattacaggcatgagccactgcgtctggcccgagtcatactttctctatggcaaggcggtaactaaatgctcactatttattgagacaggatttcacctgtcactatcaccaaggctagagtgcagtggtacgctctcagctcactacaacctctgcctcctgggctcaagtgatccta

SEQ ID NO: 60476 - DNA, 2752 bp, Homo sapiens
  misc_feature (200)..(200): n is a, c, g, or t
gggcaatggcgggcgccctcccccagcctcgttgccgccttgcagtttgatctcagactgctgtgctagcaatcagcgagactccgtgggcgtaggaccctccgagccaggtgtgggatatagtctcgtggtgcgccgtttcttaagctggtctgaaaagcgcaatattcgggtgggagtgacccgattttccaggtgcntccgtcacccctttctttgactcggaaagggaactccctgaccccttgcgcttcccaggtgaggcaatgcctcgccctgcttcggctcgcgcacggtgcgcgcacacactggcctgcgcccactgtctagcactccctagtgagatgaacccggtacctcagatggaaatgcagaaatcacccgtcttctgcgtcgctcacgctgggagctgtagaccggagctgttcctattcggccatcttggctcctagtatttttaattaagcacttgtgttctgattagtggccaaataaatgacagtcagaacttcagctaaggtacaataaggttttgctgtggcgtggcacctggtctctttctagaaggaaagttcaacatacagcacaattctggacacattgtattggtttgatgctcctacctggaacaggtggagctggtctcttgggcagcctgacatctggtccactcctctgtcctatgccgggatcatcatgaccgtagagattatgtcactgttttgcatccttgttacataactcagttcctggtagattactatgtcagagagtcacaatgaccttgcacaataacagtacaacctcgcctttgtttccaaacatcagctcctcctggatacacagcccctccgatgcagggctgcccccgggaaccgtcactcatttcggcagctacaatgtttctcgagcagctggcaatttctcctctccagacggtaccaccgatgaccctctgggaggtcataccgtctggcaagtggtcttcatcgctttcttaacgggcatcctggccttggtgaccatcatcggcaacatcctggtaattgtgtcatttaaggtcaacaagcagctgaagacggtcaacaactacttcctcttaagcctggcctgtgccgatctgattatcggggtcatttcaatgaatctgtttacgacctacatcatcatgaatcgatgggccttagggaacttggcctgtgacctctggcttgccattgactacgtagccagcaatgcctctgttatgaatcttctggtcatcagctttgacagatacttttccatcacgaggccgctcacgtaccgagccaaacgaacaacaaagagagccggtgtgatgatcggtctggcttgggtcatctcctttgtcctttgggctcctgccatcttgttctggcaatactttgttggaaagagaactgtgcctccgggagagtgcttcattcagttcctcagtgagcccaccattacttttggcacagccatcgctgctttttatatgcctgtcaccattatgactattttatactggaggatctataaggaaactgaaaagcgtaccaaagagcttgctggcctgcaagcctctgggacagaggcagagacagaaaactttgtccaccccacgggcagttctcgaagctgcagcagttacgaacttcaacagcaaagcatgaaacgctccaacaggaggaagtatggccgctgccacttctggttcacaaccaagagctggaaacccagctccgagcagatggaccaagaccacagcagcagtgacagttggaacaacaatgatgctgctgcctccctggagaactccgcctcctccgacgaggaggacattggctccgagacgagagccatctactccatcgtgctcaagcttccgggtcacagcaccatcctcaactccaccaagttaccctcatcggacaacctgcaggtgcctgaggaggagctggggatggtggacttggagaggaaagccgacaagctgcaggcccagaagagcgtggacgatggaggcagttttccaaaaagcttctccaagcttcccatccagctagagtcagccgtggacacagctaagacttctgacgtcaactcctcagtgggtaagagcacggccactctacctctgtccttcaaggaagccactctggccaagaggtttgctctgaagaccagaagtcagatcactaagcggaaaaggatgtccctggtcaaggagaagaaagcggcccagaccctcagtgcgatcttgcttgccttcatcatcacttggaccccatacaacatcatggttctggtgaacaccttttgtgacagctgcatacccaaaaccttttggaatctgggctactggctgtgctacatcaacagcaccgtgaaccccgtgtgctatgctctgtgcaacaaaacattcagaaccactttcaagatgctgctgctgtgccagtgtgacaaaaaaaagaggcgcaagcagcagtaccagcagagacagtcggtcatttttcacaagcgcgcacccgagcaggccttgtagaatgaggttgtatcaatagcagtgacaaaacgcacacatcaacccacagaccttaggaggaggaaggcgagggcggggtgacttctggtgatgataaaaatggttttatcacccagatgtgaaagaagctgcctgtttactgatccattgaataaacccattttaatagaaaaagtcaataccaattcagcaaaaagaaaa

SEQ ID NO: 60477 - DNA, 2049 bp, Homo sapiens
cctaccgcaaccaaattaccatcgcccgcgactacaaggcccagcacaaccgcgctactatgtcagagagtcacaatgaccttgcacaataacagtacaacctcgcctttgtttccaaacatcagctcctcctggatacacagcccctccgatgcagggctgcccccgggaaccgtcactcatttcggcagctacaatgtttctcgagcagctggcaatttctcctctccagacggtaccaccgatgaccctctgggaggtcataccgtctggcaagtggtcttcatcgctttcttaacgggcatcctggccttggtgaccatcatcggcaacatcctggtaattgtgtcatttaaggtcaacaagcagctgaagacggtcaacaactacttcctcttaagcctggcctgtgccgatctgattatcggggtcatttcaatgaatctgtttacgacctacatcatcatgaatcgatgggccttagggaacttggcctgtgacctctggcttgccattgactacgtagccagcaatgcctctgttatgaatcttctggtcatcagctttgacagatacttttccatcacgaggccgctcacgtaccgagccaaacgaacaacaaagagagccggtgtgatgatcggtctggcttgggtcatctcctttgtcctttgggctcctgccatcttgttctggcaatactttgttggaaagagaactgtgcctccgggagagtgcttcattcagttcctcagtgagcccaccattacttttggcacagccatcgctgctttttatatgcctgtcaccattatgactattttatactggaggatctataaggaaactgaaaagcgtaccaaagagcttgctggcctgcaagcctctgggacagaggcagagacagaaaactttgtccaccccacgggcagttctcgaagctgcagcagttacgaacttcaacagcaaagcatgaaacgctccaacaggaggaagtatggccgctgccacttctggttcacaaccaagagctggaaacccagctccgagcagatggaccaagaccacagcagcagtgacagttggaacaacaatgatgctgctgcctccctggagaactccgcctcctccgacgaggaggacattggctccgagacgagagccatctactccatcgtgctcaagcttccgggtcacagcaccatcctcaactccaccaagttaccctcatcggacaacctgcaggtgcctgaggaggagctggggatggtggacttggagaggaaagccgacaagctgcaggcccagaagagcgtggacgatggaggcagttttccaaaaagcttctccaagcttcccatccagctagagtcagccgtggacacagctaagacttctgacgtcaactcctcagtgggtaagagcacggccactctacctctgtccttcaaggaagccactctggccaagaggtttgctctgaagaccagaagtcagatcactaagcggaaaaggatgtccctggtcaaggagaagaaagcggcccagaccctcagtgcgatcttgcttgccttcatcatcacttggaccccatacaacatcatggttctggtgaacaccttttgtgacagctgcatacccaaaaccttttggaatctgggctactggctgtgctacatcaacagcaccgtgaaccccgtgtgctatgctctgtgcaacaaaacattcagaaccactttcaagatgctgctgctgtgccagtgtgacaaaaaaaagaggcgcaagcagcagtaccagcagagacagtcggtcatttttcacaagcgcgcacccgagcaggccttgtagaatgaggttgtatcaatagcagtgacaaaacgcacacatcaacccacagaccttaggaggaggaaggcgagggcggggtgacttctggtgatgataaaaatggttttatcacccagatgtgaaagaagctgcctgtttactgatccattgaataaacccattttaatagaaaaagtcaataccaattcagcaaaaagaaaa

SEQ ID NO: 60478 - DNA, 468 bp, Homo sapiens
caggctgtgaaaacacttcaggccagtccctgagtaggaatggacaacaaggtggtcaccatgctgacagctattccctgtgtgatttactttattatgaagtctaaatttgatgctgaagtgctagcctaagctcactaacctgccaacttagagaagaaggtaaccatggctaggatgactgggaatctgatggactcaattaagaatttctacagatgggaaaaccaaaactccttagtggcaagaggccaaagatggtcagcgaattgttgtttccggctgttggaagttgactgcagttgaataacagaacaaaaacggagcttcaaaatcatggcgtgcctgcttcttctgggttcttttaactgcaagcaatcagctttgaagagcacgtagggaacttctgatgtgatacaaacttttgtctttttttttttttttgtcttttaagagcattcaaaaaca

SEQ ID NO: 60479 - DNA, 539 bp, Homo sapiens
caggctgtgaaaacacttcaggccagtccctgagtaggaatggacaacaaggtggtcaccatgctgacagctattccctgtgtgatttactttattatgaagtctaaatttgatgctgaagtgctagcctaagctcactaacctgccaacttagagaagaaggtaaccatggctaggatgactgggaatctgatggactcaattaagaatttctacagatgggaaaaccaaaactccttagtggcaagaggccaaagatggtcagcgaattgttgtttccggctgttggaagttgactgcagttgaataacagaacaaaaacggagcttcaaaatcatggcgtgcctgcttcttctgggttcttttaactgcaagcaatcagctttgaagagcacctcaagaataacatttacatatgaaagaaaataggagatggctcagaataatatgtccaaggccacgcccaggcgtcagggattcatgaattttgtatacagtgtatgatgtttctagattaaaatattttcaaaggtaaatga

SEQ ID NO: 60480 - DNA, 321 bp, Homo sapiens
cgtgcgcacaagcgcgaacggcgagccggtccgccagcgcagcaacaccgccacccaaaccctttgattggaagttgactgcagttgaataacagaacaaaaacggagcttcaaaatcatggcgtgcctgcttcttctgggttcttttaactgcaagcaatcagctttgaagagcacctcaagaataacatttacatatgaaagaaaataggagatggctcagaataatatgtccaaggccacgcccaggcgtcagggattcatgaattttgtatacagtgtatgatgtttctagattaaaatattttcaaaggtaaatga

SEQ ID NO: 60481 - DNA, 307 bp, Homo sapiens
tgcgtccctcctccatgggcaccattccaagagaaacgataacaacgactttattggaagttgactgcagttgaataacagaacaaaaacggagcttcaaaatcatggcgtgcctgcttcttctgggttcttttaactgcaagcaatcagctttgaagagcacctcaagaataacatttacatatgaaagaaaataggagatggctcagaataatatgtccaaggccacgcccaggcgtcagggattcatgaattttgtatacagtgtatgatgtttctagattaaaatattttcaaaggtaaatga

SEQ ID NO: 60482 - DNA, 288 bp, Homo sapiens
ggcacagcgccacgccaacacaaccagagctaaaaacctgttagcactgctgcgcttttaacagacaccacggagcttcaaaatcatggcgtgcctgcttcttctgggttcttttaactgcaagcaatcagctttgaagagcacctcaagaataacatttacatatgaaagaaaataggagatggctcagaataatatgtccaaggccacgcccaggcgtcagggattcatgaattttgtatacagtgtatgatgtttctagattaaaatattttcaaaggtaaatga

SEQ ID NO: 60483 - DNA, 303 bp, Homo sapiens
actgcacattcgacaaaagccgtgcacacccacaaatagcttgctttgctctctaagatcctatcaacggagtgtacttggcctgtatttagacaaagccggtggtgttgtttacatctttggcagcttgctcagtgtggcttttctatgaacaaaatgtgtgcccagcccggtgggtctggcttctcagccaagcgattgtgtattgattggtggtgggaaatgagatatcttttcagttggtccatgtccaaagaaaaaagtgcctaattggacatctgagatgatatggaaaaaatgaga

SEQ ID NO: 60484 - DNA, 1002 bp, Homo sapiens
ttctagcccacggaaacttcgtaagtaggagatgagttacgttctcattttacaaatgagcaaactgagtttctgagggtggtgtgctgggaaaggtttaacaaccagctctctggggaaaagatgtcaggctctgattgataatgtgtgctcatttccatggtgtaaacactctccccatggcctttttcaagctggcagcacgttgctgaatgtacagttgggaagagatgtggacaaccacttagtcctcgagagcctgttgtgcaaactggctccagcacacctctgcgttcagagcagggaaatgacaagtccaaggtcacatggatagttgactcctgagcccactttccttcctctttcttacagagcaaagcagtaccgggtcatccaaaaactttatttaaaaaacaaaacagaaatgtgtccacatcttgcagagctggacaaaagaaggtggtcaagagatcccaaattggtggaaactgtccccgttacaggaggaggaaggacgctgccaccactaccccagggactggcctatactcatgcttctgttccagtgttgctgtctcacatttgaaaccaattttgaatttgggtagaagattcgtcttgttgcctaaacaatgccttaaccccattctctccccagaagggtcctacatttcttaagctattttcagctcctccacacctactcacttgcaatacttgtcataacaggaagccagtttcatatactgtaatccccaaacacattgcacccacacgtggggagcgtgaggggctgagcgaggagcgaggaggccaggccttccaaaaactggaggggctgagcactgagccgctcccaaggtggggcgtctccactcccaagcccaggattcagaagccagaatccacatccagacattcttgttttcctttctcatgcagttgctggtgacttttttttttttaataaagcatttgagtaggcagcaaagccagtcagaa

SEQ ID NO: 60485 - DNA, 375 bp, Homo sapiens
caaaaaattacaaaattatctgggcgtggtggtgcgtgcctgtagtccaagctacctgggatgctgagtcgggaagatcccttgagctcaggaggtcaaagttgcagtgagctgtgatcatgccagtgcactctagcctgggtgacagagtgagaccttgtcttgagggggaagggggcttaacaaacctcaccttaatcttattccttgatatacttttattttttcttaatctctttggttctgtcagattagtatttcttaaagatatgtggcagggtaatttgaagactccaggattatcttcttgtttgtattttattggtttaataactttagaataattatgtttctgagaactaacacctttacaga

SEQ ID NO: 60486 - DNA, 573 bp, Homo sapiens
tcagaaactggcacagcagcatctaagcatgacattcaaggacatttagaagctggctttggcccatggtttgtgagcctcacccattcatttaacaactgtttgttgtgtgtctactgggtgccagacactggtctaaggcaccgagcgcccagtaggaaaccaaatggacaaccccctgcccttgtggattgtatatttttgcttcaatggtcttgtctctactcagctaaaatggactttgtaccccgctatttatgtcctccctcatgcaaaggggttcaaataaagcaattgggaaaaaaaggtgggagggatgaggggacgggaagaagcttggtgtagcaggaagacctggaaagacctcaaccttggggctggactccaatcatagcaatttaccagctgtgtggccctgggcaaagcccttgacgtctctgaacttcagttctctcatctgtaaaatggaactaataccagcatcctgaagaggatccctgagataacatacatcactttgggcccagcgaggggcatagggagagctcaataaatagaagctggaactcaaaa

SEQ ID NO: 60487 - DNA, 347 bp, Homo sapiens
accaaatcaaaaaacagaagatttattggaagctatgttggtttgtctgttgtggccaaagacttactaaatcacaagttagctcaaacaagaagagaaaaagaccaaatagaatccagaaaaattttaaagtccaaatttccatctgaaaaccagactagatgtttttacttaaaatgagataaaagaggcaatttactataaccaggcacccatgaagagtagattctaagtggtcatgggctagacatggcatttcagcacaagccatcagacccaatatctcacaagatctggtatctttcaaataattccccagggcaatagaccaaccaattgagtggtgc

SEQ ID NO: 60488 - DNA, 480 bp, Homo sapiens
attcttttttcctcatatattccagacttgaaattgaagaagtagcaacctagaaataccaacaatgaccaaaataaaattccaataaagacctgcttttggtagccaaaagaccaggagaggggcagactagcaagacagaaactttcagacaattactgctctacatccaaacaccacaaaaaagactatagttctattctacccatgctagcaaagaatgagtgggaagacatttccacttctatggggttgtaatgaggcacttcaacatccctgacacagagattctagaaaaggccagtaggaagctgggaccttcatctccaccagtaagtaataaagtcctactccctttggtgtcagtggacaaaatgtgggaagcttggattttcactctcacctggcagtcatgaggtgcttctctccatctgtccggggagctatccaaaaaggccgagcggagaagaggaacttttg

SEQ ID NO: 60489 - DNA, 4921 bp, Homo sapiens
  misc_feature (10)..(10): n is a, c, g, or t
  misc_feature (12)..(13): n is a, c, g, or t
  misc_feature (16)..(16): n is a, c, g, or t
  misc_feature (18)..(19): n is a, c, g, or t
  misc_feature (22)..(22): n is a, c, g, or t
  misc_feature (37)..(37): n is a, c, g, or t
aaggcatccngnntcngnnggncggcccgtgcccccncgccccgtcacggcaccgcggcggccgaggggaccggccagggccgggggcggcggcccgagccgcggtagcggcggcggcgggaggggcggcctgagggcggacgggcgggcgcccgggttgcgggggctcggtgccgctccgcactgcccggccggtctcggccccggcgccatgagtggcggcggcggcggagggggctcggcgcccagtcgcttcgccgactactttgtcatctgcggactggacacggagaccgggctggagccggacgagctgtcggcattatgccagtacatacaggcttctaaagccagggatggtgccagccctttcatttcaagtacgactgaaggagaaaattttgagcagacaccattgagaagaacattcaaatctaaggtccttgcacgatatcctgagaacgtagaatggaatccctttgaccaagatgcagtaggaatgctatgtatgccgaaagggctggcattcaagacccaggctgatcccagggagccccaattccatgcctttattatcacaagggaggatggctctcggacatttgggtttgccctcacattttatgaagaggtgactagcaagcagatctgcagtgcaatgcagaccctctaccacatgcacaatgctgagtatgatgtcctacatgctccccctgctgatgacagagaccagagcagcatggaggatggtgaagacactcctgtgaccaaactgcagcgcttcaactcctatgacattagccgggacactctctacgtctctaagtgcatctgcctcatcacacccatgtctttcatgaaggcatgtcggagcgtgctggagcaactccaccaggcagtcacttcacctcagccccctccactgccccttgagagctacatatacaacgtactctacgaggtgccgctcccacctcctggccggtccttgaagttttctggggtctatgggccaataatctgccagagaccaagtaccaatgagcttcccctatttgactttcctgtcaaagaggtttttgaactgctcggggtggagaatgtgtttcagctttttacttgtgcccttctggagtttcaaatcctgctctactcacagcattaccagagactgatgactgtggcggagacgattacagctctcatgtttcctttccagtggcagcatgtctatgtccctattctcccagcttctctcctgcatttcttagatgctcctgttccatacctgatgggtttgcattccaatggcctggatgaccggtcaaagctggagctgcctcaagaggctaacctctgctttgtggacattgacaaccacttcattgagttgccagaggacttgccacagttccccaacaaattggagtttgtccaggaagtctctgagattctcatggcatttggaattccccctgaagggaatcttcattgcagtgagagtgcctccaagctgaagaggctgcgggcctctgagcttgtctcggacaagaggaatgggaacattgctggctcccctttgcattcctacgagcttcttaaggagaatgaaactattgcccggctgcaagccttggtcaagagaactggggtgagcctggaaaagttggaagtgcgtgaagaccccagcagcaataaggatctcaaagttcagtgtgatgaagaagaactcaggatttaccagctaaacattcagatccgggaagtttttgcaaatcgtttcactcagatgtttgcagattatgaggtgtttgtcatccaacccagccaggataaggaatcctggtttaccaacagggagcaaatgcaaaactttgataaagcatcttttctgtcagatcagcctgagccctacctgcccttcctctcaagattcctggagacccagatgtttgcatctttcattgacaacaaaataatgtgtcatgatgatgatgataaagaccctgtactccgggtatttgattcccgagttgacaagatcaggctgttgaatgttcggacacctactctccgtacatccatgtaccagaagtgtaccactgtggatgaagcagagaaagcaattgagctgcgtctggcaaaaattgaccatactgcaattcacccacatttacttgacatgaagattggacaagggaaatatgagccgggcttcttccctaagctgcagtctgatgtactttccactgggccagccagcaacaagtggacgaaaaggaatgcccctgcccagtggaggcggaaagatcggcagaagcagcacacagaacacctgcgtttagataatgaccagagggagaagtacatccaggaagccaggactatgggcagcactatccgccagcccaaactgtccaacctctctccatcagtgattgcccagaccaattggaagtttgtagagggcctgctgaaggaatgccgcaataagaccaagaggatgctggtggaaaagatgggccgagaagctgtggagctagggcatggggaggtgaacatcacaggggtggaagagaacaccctgattgccagcctttgtgatctcctggaaaggatctggagtcatggactacaagtgaaacaggggaaatcagccttatggtcccacctgttacattatcaggacaaccggcagagaaaactcacatcaggaagcctcagtacctcaggaatacttcttgattcagaacgtaggaagtctgatgccagctcactcatgcctcccctgaggatctccctgattcaggatatgaggcacatccagaacatcggggaaatcaagactgatgtgggaaaggccagagcatgggtgcgactgtccatggaaaaaaagttactttccagacacctgaagcagctcctctcagaccatgagctcaccaaaaagttatataagcgctatgccttcctgcgctgtgatgacgagaaggagcagttcctctatcacctcctgtctttcaatgccgtcgattacttttgcttcaccaatgtcttcacaactatcctgatcccgtaccacattctgatcgtaccaagcaagaagctggggggctccatgttcactgccaacccatggatctgtatatcaggagaattgggtgagacacagatcatgcagattcccaggaatgtgctagagatgaccttcgagtgccagaacttggggaagcttactactgtccagattggccatgataactctgggctgtatgccaaatggctggtggagtatgtgatggtcaggaatgagatcacaggacatacctacaagttcccgtgtggccggtggttagggaagggcatggatgatggaagcctggagcggatcctagttggggagctgctcacatcccagcctgaggtggatgagaggccatgccggaccccgccgctgcagcagtcccccagtgtcatccggaggcttgttaccatctcacccaacaacaagcccaagctgaacactgggcagatccaggagtccatcggggaggcagtcaatggcattgtgaagcacttccataagcctgagaaagagcgaggcagtctgacgctgttgctctgtggagagtgtggccttgtctcggccttggaacaggctttccagcatggatttaaatcgccccggctcttcaaaaatgtcttcatttgggatttcctggaaaaagcacaaacctattatgagacattagagaagaatgaagtagtccctgaggaaaactggcatacaagagcccggaacttctgccgatttgtcactgcaatcaacaatactccccggaacatcggcaaggatggcaagtttcagatgctggtgtgcttgggagccagagatcacctcctacaccactggattgccctgctggctgactgccccatcactgcacacatgtatgaggatgtggcactgatcaaagaccatacacttgtcaattccttgattcgtgtgctgcagacattgcaggagttcaacatcacgctggagacgtcccttgtcaagggcatcgacatctgacctcccagcaccagccagcagcaggactgagaaagactcaccctgcagctctgaccttttttcccaaagggacttaagcgattgtgcaggagtaggagacaaaatgtacactcactgtaaaaagaaaactagaggatttttggaataaataatctattttagagtttatttgctgatttgctttttacacactttcatgtgaaagagtgatagggagagggagcgaggctggtgccgcttattttgaagctggtgccctccctcgccgtggccacatgctggaagcctgaggcctccctggactgagcctgtggcactgcgtgcgggacagttatgtttccttgccccgtcgcattaatgaggcccttccacatcatttttaaactaatgtttttctatattaacattattatggatatttggctttcataggccacacacaggtgtgctgcgcgggaagccccatgctccaatcaaagggatttttagtagtgcctctaagcaagcaccgatgagtcagtcccacgtattttcttttttgtcagtattgtttgggaaggagacatgccgggatgtgtcatcgtgccaaataccacatttcctgttggcacagtttcacagaagtaaacataagcatgttttaacaggtttttcttttcttttttcttttttaaaatgttttatttatttaacccgccattgtgtgtttttaagtattttctttttttaaggaaaggaaaagcttgtcacaatctaactggctatgttattattattaaatttatgttttgcaacttagaaaccagctacagtatggcccacttaataaaacacctgaaacaaaaa

SEQ ID NO: 60490 - DNA, 841 bp, Homo sapiens
taggctaggtcgagcctgggtggtgaattcgccgaggaagtctgatgccagctcactcatgcctcccctgaggatctccctgattcaggatatgaggcacatccagaacatcggggaaatcaagactgatgtgggaaaggccagagcatgggtgcgactgtccatggaaaaaaagttactttccagacacctgaagcagctcctctcagaccatgagctcaccaaaaagttatataagcgctatgccttcctgcgctgtgatgacgagaaggagcagttcctctatcacctcctgtctttcaatgccgtcgattacttttgcttcaccaatgtcttcacaactatcctgatcccgtaccacattctgatcgtaccaagcaagaagctggggggctccatgttcactgccaacccatggatctgtatatcaggagaattgggtgagacacagatcatgcagattcccaggaatgtgctagagatgaccttcgagtgccagaacttggggaagcttactactgtccagattggccatgataactctgggctgtatgccaaatggctggtggagtatgtgatggtcaggaatgagatcacaggacatacctacaagttcccgtgtggccggtggttagggaagggcatggatgatggaagcctggagcggatcctagttggggagctgctcacatcccagcctgaggtggatgagaggccatgccggaccccgccgctgcagcagtcccccagtgtcatccggaggcttgttaccatctcacccaacaacaagcccaagctgaaaacggcagatcaggagtctcgcggagcagcaaggctggag

SEQ ID NO: 60491 - DNA, 667 bp, Homo sapiens
  misc_feature (10)..(10): n is a, c, g, or t
  misc_feature (12)..(13): n is a, c, g, or t
  misc_feature (16)..(16): n is a, c, g, or t
  misc_feature (18)..(19): n is a, c, g, or t
  misc_feature (22)..(22): n is a, c, g, or t
  misc_feature (37)..(37): n is a, c, g, or t
aaggcatccngnntcngnnggncggcccgtgcccccncgccccgtcacggcaccgcggcggccgaggggaccggccagggccgggggcggcggcccgagccgcggtagcggcggcggcgggaggggcggcctgagggcggacgggcgggcgcccgggttgcgggggctcggtgccgctccgcactgcccggccggtctcggccccggcgccatgagtggcggcggcggcggagggggctcggcgcccagtcgcttcgccgactactttgtcatctgcggactggacacggagaccgggctggagccggacgagctgtcgggagctgctaagccgcacatctcttgagacccagaagctcgatctgatgactgaagtgtctgagctgaagctcaagctggttggcatggagaaggagcagagagagcaggaggagaagcagaaaaagcagaggagttactgcaagagctcaggcacctcaaaatcaaagtggaagagttggaaaatgaaaggaatcagtatgaatggaagctaaaggccactaaggctgaagtcgcccagctgcaagaacaggtggccctgaaagatgcagaaattgagcgtctgcacagccagctctcccggacagcagctctccacagtgagagtcacacagagagagaccaagaa

SEQ ID NO: 60492 - DNA, 548 bp, Homo sapiens
cgtccatttttttttcatatagatattcatctgttgaaaagaccatcctttctctaatgaattgcctttttgcttttgtcaaaatgttattagtctgtatatgtgttcgtctacttctggattctctgttctgtttcattgatctgttggtctacatttataccaataccacactgtcttgattactgtagcttacattaaatgattactgtagcttatattaaatcttgaaatcaagtagtgttaatcttgtaactttgttcttttcaaagttgttttggctattctgggttctttgtatttccatacatatttagagtcaacttgccaacttctgcaaagaaacctttcaagattttgattgatatttgacatcctaacagtaccgagtcttctgatccattaacatggcatatctttccatttatttaggtcatctttaatttttctcaacagcattatgtacttttcagggtacaggttttatatgtcttatcagatttttccctaagtagttcatattttttggtgttattttaaattgtttt

SEQ ID NO: 60493 - DNA, 4957 bp, Homo sapiens
  misc_feature (10)..(10): n is a, c, g, or t
  misc_feature (12)..(13): n is a, c, g, or t
  misc_feature (16)..(16): n is a, c, g, or t
  misc_feature (18)..(19): n is a, c, g, or t
  misc_feature (22)..(22): n is a, c, g, or t
  misc_feature (37)..(37): n is a, c, g, or t
aaggcatccngnntcngnnggncggcccgtgcccccncgccccgtcacggcaccgcggcggccgaggggaccggccagggccgggggcggcggcccgagccgcggtagcggcggcggcgggaggggcggcctgagggcggacgggcgggcgcccgggttgcgggggctcggtgccgctccgcactgcccggccggtctcggccccggcgccatgagtggcggcggcggcggagggggctcggcgcccagtcgcttcgccgactactttgtcatctgcggactggacacggagaccgggctggagccggacgagctgtcggcattatgccagtacatacaggcttctaaagccagggatggtgccagccctttcatttcaagtacgactgaagagatcattgaaatgcatagtttattctgaattttaggagaaaattttgagcagacaccattgagaagaacattcaaatctaaggtccttgcacgatatcctgagaacgtagaatggaatccctttgaccaagatgcagtaggaatgctatgtatgccgaaagggctggcattcaagacccaggctgatcccagggagccccaattccatgcctttattatcacaagggaggatggctctcggacatttgggtttgccctcacattttatgaagaggtgactagcaagcagatctgcagtgcaatgcagaccctctaccacatgcacaatgctgagtatgatgtcctacatgctccccctgctgatgacagagaccagagcagcatggaggatggtgaagacactcctgtgaccaaactgcagcgcttcaactcctatgacattagccgggacactctctacgtctctaagtgcatctgcctcatcacacccatgtctttcatgaaggcatgtcggagcgtgctggagcaactccaccaggcagtcacttcacctcagccccctccactgccccttgagagctacatatacaacgtactctacgaggtgccgctcccacctcctggccggtccttgaagttttctggggtctatgggccaataatctgccagagaccaagtaccaatgagcttcccctatttgactttcctgtcaaagaggtttttgaactgctcggggtggagaatgtgtttcagctttttacttgtgcccttctggagtttcaaatcctgctctactcacagcattaccagagactgatgactgtggcggagacgattacagctctcatgtttcctttccagtggcagcatgtctatgtccctattctcccagcttctctcctgcatttcttagatgctcctgttccatacctgatgggtttgcattccaatggcctggatgaccggtcaaagctggagctgcctcaagaggctaacctctgctttgtggacattgacaaccacttcattgagttgccagaggacttgccacagttccccaacaaattggagtttgtccaggaagtctctgagattctcatggcatttggaattccccctgaagggaatcttcattgcagtgagagtgcctccaagctgaagaggctgcgggcctctgagcttgtctcggacaagaggaatgggaacattgctggctcccctttgcattcctacgagcttcttaaggagaatgaaactattgcccggctgcaagccttggtcaagagaactggggtgagcctggaaaagttggaagtgcgtgaagaccccagcagcaataaggatctcaaagttcagtgtgatgaagaagaactcaggatttaccagctaaacattcagatccgggaagtttttgcaaatcgtttcactcagatgtttgcagattatgaggtgtttgtcatccaacccagccaggataaggaatcctggtttaccaacagggagcaaatgcaaaactttgataaagcatcttttctgtcagatcagcctgagccctacctgcccttcctctcaagattcctggagacccagatgtttgcatctttcattgacaacaaaataatgtgtcatgatgatgatgataaagaccctgtactccgggtatttgattcccgagttgacaagatcaggctgttgaatgttcggacacctactctccgtacatccatgtaccagaagtgtaccactgtggatgaagcagagaaagcaattgagctgcgtctggcaaaaattgaccatactgcaattcacccacatttacttgacatgaagattggacaagggaaatatgagccgggcttcttccctaagctgcagtctgatgtactttccactgggccagccagcaacaagtggacgaaaaggaatgcccctgcccagtggaggcggaaagatcggcagaagcagcacacagaacacctgcgtttagataatgaccagagggagaagtacatccaggaagccaggactatgggcagcactatccgccagcccaaactgtccaacctctctccatcagtgattgcccagaccaattggaagtttgtagagggcctgctgaaggaatgccgcaataagaccaagaggatgctggtggaaaagatgggccgagaagctgtggagctagggcatggggaggtgaacatcacaggggtggaagagaacaccctgattgccagcctttgtgatctcctggaaaggatctggagtcatggactacaagtgaaacaggggaaatcagccttatggtcccacctgttacattatcaggacaaccggcagagaaaactcacatcaggaagcctcagtacctcaggaatacttcttgattcagaacgtaggaagtctgatgccagctcactcatgcctcccctgaggatctccctgattcaggatatgaggcacatccagaacatcggggaaatcaagactgatgtgggaaaggccagagcatgggtgcgactgtccatggaaaaaaagttactttccagacacctgaagcagctcctctcagaccatgagctcaccaaaaagttatataagcgctatgccttcctgcgctgtgatgacgagaaggagcagttcctctatcacctcctgtctttcaatgccgtcgattacttttgcttcaccaatgtcttcacaactatcctgatcccgtaccacattctgatcgtaccaagcaagaagctggggggctccatgttcactgccaacccatggatctgtatatcaggagaattgggtgagacacagatcatgcagattcccaggaatgtgctagagatgaccttcgagtgccagaacttggggaagcttactactgtccagattggccatgataactctgggctgtatgccaaatggctggtggagtatgtgatggtcaggaatgagatcacaggacatacctacaagttcccgtgtggccggtggttagggaagggcatggatgatggaagcctggagcggatcctagttggggagctgctcacatcccagcctgaggtggatgagaggccatgccggaccccgccgctgcagcagtcccccagtgtcatccggaggcttgttaccatctcacccaacaacaagcccaagctgaacactgggcagatccaggagtccatcggggaggcagtcaatggcattgtgaagcacttccataagcctgagaaagagcgaggcagtctgacgctgttgctctgtggagagtgtggccttgtctcggccttggaacaggctttccagcatggatttaaatcgccccggctcttcaaaaatgtcttcatttgggatttcctggaaaaagcacaaacctattatgagacattagagaagaatgaagtagtccctgaggaaaactggcatacaagagcccggaacttctgccgatttgtcactgcaatcaacaatactccccggaacatcggcaaggatggcaagtttcagatgctggtgtgcttgggagccagagatcacctcctacaccactggattgccctgctggctgactgccccatcactgcacacatgtatgaggatgtggcactgatcaaagaccatacacttgtcaattccttgattcgtgtgctgcagacattgcaggagttcaacatcacgctggagacgtcccttgtcaagggcatcgacatctgacctcccagcaccagccagcagcaggactgagaaagactcaccctgcagctctgaccttttttcccaaagggacttaagcgattgtgcaggagtaggagacaaaatgtacactcactgtaaaaagaaaactagaggatttttggaataaataatctattttagagtttatttgctgatttgctttttacacactttcatgtgaaagagtgatagggagagggagcgaggctggtgccgcttattttgaagctggtgccctccctcgccgtggccacatgctggaagcctgaggcctccctggactgagcctgtggcactgcgtgcgggacagttatgtttccttgccccgtcgcattaatgaggcccttccacatcatttttaaactaatgtttttctatattaacattattatggatatttggctttcataggccacacacaggtgtgctgcgcgggaagccccatgctccaatcaaagggatttttagtagtgcctctaagcaagcaccgatgagtcagtcccacgtattttcttttttgtcagtattgtttgggaaggagacatgccgggatgtgtcatcgtgccaaataccacatttcctgttggcacagtttcacagaagtaaacataagcatgttttaacaggtttttcttttcttttttcttttttaaaatgttttatttatttaacccgccattgtgtgtttttaagtattttctttttttaaggaaaggaaaagcttgtcacaatctaactggctatgttattattattaaatttatgttttgcaacttagaaaccagctacagtatggcccacttaataaaacacctgaaacaaaaa

SEQ ID NO: 60494 - DNA, 3737 bp, Homo sapiens
gcgacggcccatgggtgggcgaaaattcgtgcaacgaagggcatgtctatgtccctattctcccagcttctctcctgcatttcttagatgctcctgttccatacctgatgggtttgcattccaatggcctggatgaccggtcaaagctggagctgcctcaagaggctaacctctgctttgtggacattgacaaccacttcattgagttgccagaggacttgccacagttccccaacaaattggagtttgtccaggaagtctctgagattctcatggcatttggaattccccctgaagggaatcttcattgcagtgagagtgcctccaagctgaagaggctgcgggcctctgagcttgtctcggacaagaggaatgggaacattgctggctcccctttgcattcctacgagcttcttaaggagaatgaaactattgcccggctgcaagccttggtcaagagaactggggtgagcctggaaaagttggaagtgcgtgaagaccccagcagcaataaggatctcaaagttcagtgtgatgaagaagaactcaggatttaccagctaaacattcagatccgggaagtttttgcaaatcgtttcactcagatgtttgcagattatgaggtgtttgtcatccaacccagccaggataaggaatcctggtttaccaacagggagcaaatgcaaaactttgataaagcatcttttctgtcagatcagcctgagccctacctgcccttcctctcaagattcctggagacccagatgtttgcatctttcattgacaacaaaataatgtgtcatgatgatgatgataaagaccctgtactccgggtatttgattcccgagttgacaagatcaggctgttgaatgttcggacacctactctccgtacatccatgtaccagaagtgtaccactgtggatgaagcagagaaagcaattgagctgcgtctggcaaaaattgaccatactgcaattcacccacatttacttgacatgaagattggacaagggaaatatgagccgggcttcttccctaagctgcagtctgatgtactttccactgggccagccagcaacaagtggacgaaaaggaatgcccctgcccagtggaggcggaaagatcggcagaagcagcacacagaacacctgcgtttagataatgaccagagggagaagtacatccaggaagccaggactatgggcagcactatccgccagcccaaactgtccaacctctctccatcagtgattgcccagaccaattggaagtttgtagagggcctgctgaaggaatgccgcaataagaccaagaggatgctggtggaaaagatgggccgagaagctgtggagctagggcatggggaggtgaacatcacaggggtggaagagaacaccctgattgccagcctttgtgatctcctggaaaggatctggagtcatggactacaagtgaaacaggggaaatcagccttatggtcccacctgttacattatcaggacaaccggcagagaaaactcacatcaggaagcctcagtacctcaggaatacttcttgattcagaacgtaggaagtctgatgccagctcactcatgcctcccctgaggatctccctgattcaggatatgaggcacatccagaacatcggggaaatcaagactgatgtgggaaaggccagagcatgggtgcgactgtccatggaaaaaaagttactttccagacacctgaagcagctcctctcagaccatgagctcaccaaaaagttatataagcgctatgccttcctgcgctgtgatgacgagaaggagcagttcctctatcacctcctgtctttcaatgccgtcgattacttttgcttcaccaatgtcttcacaactatcctgatcccgtaccacattctgatcgtaccaagcaagaagctggggggctccatgttcactgccaacccatggatctgtatatcaggagaattgggtgagacacagatcatgcagattcccaggaatgtgctagagatgaccttcgagtgccagaacttggggaagcttactactgtccagattggccatgataactctgggctgtatgccaaatggctggtggagtatgtgatggtcaggaatgagatcacaggacatacctacaagttcccgtgtggccggtggttagggaagggcatggatgatggaagcctggagcggatcctagttggggagctgctcacatcccagcctgaggtggatgagaggccatgccggaccccgccgctgcagcagtcccccagtgtcatccggaggcttgttaccatctcacccaacaacaagcccaagctgaacactgggcagatccaggagtccatcggggaggcagtcaatggcattgtgaagcacttccataagcctgagaaagagcgaggcagtctgacgctgttgctctgtggagagtgtggccttgtctcggccttggaacaggctttccagcatggatttaaatcgccccggctcttcaaaaatgtcttcatttgggatttcctggaaaaagcacaaacctattatgagacattagagaagaatgaagtagtccctgaggaaaactggcatacaagagcccggaacttctgccgatttgtcactgcaatcaacaatactccccggaacatcggcaaggatggcaagtttcagatgctggtgtgcttgggagccagagatcacctcctacaccactggattgccctgctggctgactgccccatcactgcacacatgtatgaggatgtggcactgatcaaagaccatacacttgtcaattccttgattcgtgtgctgcagacattgcaggagttcaacatcacgctggagacgtcccttgtcaagggcatcgacatctgacctcccagcaccagccagcagcaggactgagaaagactcaccctgcagctctgaccttttttcccaaagggacttaagcgattgtgcaggagtaggagacaaaatgtacactcactgtaaaaagaaaactagaggatttttggaataaataatctattttagagtttatttgctgatttgctttttacacactttcatgtgaaagagtgatagggagagggagcgaggctggtgccgcttattttgaagctggtgccctccctcgccgtggccacatgctggaagcctgaggcctccctggactgagcctgtggcactgcgtgcgggacagttatgtttccttgccccgtcgcattaatgaggcccttccacatcatttttaaactaatgtttttctatattaacattattatggatatttggctttcataggccacacacaggtgtgctgcgcgggaagccccatgctccaatcaaagggatttttagtagtgcctctaagcaagcaccgatgagtcagtcccacgtattttcttttttgtcagtattgtttgggaaggagacatgccgggatgtgtcatcgtgccaaataccacatttcctgttggcacagtttcacagaagtaaacataagcatgttttaacaggtttttcttttcttttttcttttttaaaatgttttatttatttaacccgccattgtgtgtttttaagtattttctttttttaaggaaaggaaaagcttgtcacaatctaactggctatgttattattattaaatttatgttttgcaacttagaaaccagctacagtatggcccacttaataaaacacctgaaacaaaaa

SEQ ID NO: 60495 - DNA, 5499 bp, Homo sapiens
  misc_feature (10)..(10): n is a, c, g, or t
  misc_feature (12)..(13): n is a, c, g, or t
  misc_feature (16)..(16): n is a, c, g, or t
  misc_feature (18)..(19): n is a, c, g, or t
  misc_feature (22)..(22): n is a, c, g, or t
  misc_feature (37)..(37): n is a, c, g, or t
aaggcatccngnntcngnnggncggcccgtgcccccncgccccgtcacggcaccgcggcggccgaggggaccggccagggccgggggcggcggcccgagccgcggtagcggcggcggcgggaggggcggcctgagggcggacgggcgggcgcccgggttgcgggggctcggtgccgctccgcactgcccggccggtctcggccccggcgccatgagtggcggcggcggcggagggggctcggcgcccagtcgcttcgccgactactttgtcatctgcggactggacacggagaccgggctggagccggacgagctgtcggcattatgccagtacatacaggcttctaaagccagggatggtgccagccctttcatttcaagtacgactgaaggagaaaattttgagcagacaccattgagaagaacattcaaatctaaggtccttgcacgatatcctgagaacgtagaatggaatccctttgaccaagatgcagtaggaatgctatgtatgccgaaagggctggcattcaagacccaggctgatcccagggagccccaattccatgcctttattatcacaagggaggatggctctcggacatttgggtttgccctcacattttatgaagaggtgactagcaagcagatctgcagtgcaatgcagaccctctaccacatgcacaatgctgagtatgatgtcctacatgctccccctgctgatgacagagaccagagcagcatggaggatggtgaagacactcctgtgaccaaactgcagcgcttcaactcctatgacattagccgggacactctctacgtctctaagtgcatctgcctcatcacacccatgtctttcatgaaggcatgtcggagcgtgctggagcaactccaccaggcagtcacttcacctcagccccctccactgccccttgagagctacatatacaacgtactctacgaggtgccgctcccacctcctggccggtccttgaagttttctggggtctatgggccaataatctgccagagaccaagtaccaatgagcttcccctatttgactttcctgtcaaagaggtttttgaactgctcggggtggagaatgtgtttcagctttttacttgtgcccttctggagtttcaaatcctgctctactcacagcattaccagagactgatgactgtggcggagacgattacagctctcatgtttcctttccagtggcagcatgtctatgtccctattctcccagcttctctcctgcatttcttagatgctcctgttccatacctgatgggtttgcattccaatggcctggatgaccggtcaaagctggagctgcctcaagaggctaacctctgctttgtggacattgacaaccacttcattgagttgccagaggacttgccacagttccccaacaaattggagtttgtccaggaagtctctgagattctcatggcatttggaattccccctgaagggaatcttcattgcagtgagagtgcctccaagctgaagaggctgcgggcctctgagcttgtctcggacaagaggaatgggaacattgctggctcccctttgcattcctacgagcttcttaaggagaatgaaactattgcccggctgcaagccttggtcaagagaactggggtgagcctggaaaagttggaagtgcgtgaagaccccagcagcaataaggatctcaaagttcagtgtgatgaagaagaactcaggatttaccagctaaacattcagatccgggaagtttttgcaaatcgtttcactcagatgtttgcagattatgaggtgtttgtcatccaacccagccaggataaggaatcctggtttaccaacagggagcaaatgcaaaactttgataaagcatcttttctgtcagatcagcctgagccctacctgcccttcctctcaagattcctggagacccagatgtttgcatctttcattgacaacaaaataatgtgtcatgatgatgatgataaagaccctgtactccgggtatttgattcccgagttgacaagatcaggctgttgaatgttcggacacctactctccgtacatccatgtaccagaagtgtaccactgtggatgaagcagagaaagcaattgagctgcgtctggcaaaaattgaccatactgcaattcacccacatttacttgacatgaagattggacaagggaaatatgagccgggcttcttccctaagctgcagtctgatgtactttccactgggccagccagcaacaagtggacgaaaaggaatgcccctgcccagtggaggcggaaagatcggcagaagcagcacacagaacacctgcgtttagataatgaccagagggagaagtacatccaggaagccaggactatgggcagcactatccgccagcccaaactgtccaacctctctccatcagtgattgcccagaccaattggaagtttgtagagggcctgctgaaggaatgccgcaataagaccaagaggatgctggtggaaaagatgggccgagaagctgtggagctagggcatggggaggtgaacatcacaggggtggaagagaacaccctgattgccagcctttgtgatctcctggaaaggatctggagtcatggactacaagtgaaacaggggaaatcagccttatggtcccacctgttacattatcaggacaaccggcagagaaaactcacatcaggaagcctcagtacctcaggaatacttcttgattcagaacgtaggaagtctgatgccagctcactcatgcctcccctgaggatctccctgattcaggatatgaggcacatccagaacatcggggaaatcaagactgatgtgggaaaggccagagcatgggtgcgactgtccatggaaaaaaagttactttccagacacctgaagcagctcctctcagaccatgagctcaccaaaaagttatataagcgctatgccttcctgcgctgtgatgacgagaaggagcagttcctctatcacctcctgtctttcaatgccgtcgattacttttgcttcaccaatgtcttcacaactatcctgatcccgtaccacattctgatcgtaccaagcaagaagctggggggctccatgttcactgccaacccatggatctgtatatcaggagaattgggtgagacacagatcatgcagattcccaggaatgtgctagagatgaccttcgagtgccagaacttggggaagcttactactgtccagattggccatgataactctgggctgtatgccaaatggctggtggagtatgtgatggtcaggaatgagatcacaggacatacctacaagttcccgtgtggccggtggttagggaagggcatggatgatggaagcctggagcggatcctagttggggagctgctcacatcccagcctgaggtggatgagaggccatgccggaccccgccgctgcagcagtcccccagtgtcatccggaggcttgttaccatctcacccaacaacaagcccaagctgaacactgggcagatccaggagtccatcggggaggcagtcaatggcattgtgaagcacttccataagcctgagaaagagcgaggcagtctgacgctgttgctctgtggagagtgtggccttgtctcggccttggaacaggctttccagcatggatttaaatcgccccggctcttcaaaaatgtcttcatttgggatttcctggaaaaagcacaaacctattatgagacattagagaagaatgaagtagtccctgaggaaaactggcatacaagagcccggaacttctgccgatttgtcactgcaatcaacaatactccccggaacatcggcaaggatggcaagtttcagatgctggtgtgcttgggagccagagatcacctcctacaccactggattgccctgctggctgactgccccatcactgcacacatgtatgaggatgtggcactgatcaaagaccatacacttgtcaattccttgattcgtgtgctgcagacattgcaggagttcaacatcacgctggagacgtcccttgtcaagggcatcgacatctgacctcccagcaccagccagcagcaggactgagaaagactcaccctgcagctctgaccttttttcccaaagggacttaagcgattgtgcaggagtaggagacaaaatgtacactcactgtaaaaagaaaactagaggatttttggaataaataatctattttagagtttatttgctgatttgctttttacacactttcatgtgaaagagtgatagggagagggagcgaggctggtgccgcttattttgaagctggtgccctccctcgccgtggccacatgctggaagcctgaggcctccctggactgagcctgtggcactgcgtgcgggacagttatgtttccttgccccgtcgcattaatgaggcccttccacatcatttttaaactaatgtttttctatattaacattattatggatatttggctttcataggccacacacaggtgtgctgcgcgggaagccccatgctccaatcaaagggatttttagtagtgcctctaagcaagcaccgatgagtcagtcccacgtattttcttttttgtcagtattgtttgggaaggagacatgccgggatgtgtcatcgtgccaaataccacatttcctgttggcacagtttcacagaagtaaacataagcatgttttaacaggtttttcttttcttttttcttttttaaaatgttttatttatttaacccgccattgtgtgtttttaagtattttctttttttaaggaaaggaaaagcttgtcacaatctaactggctatgttattattattaaatttatgttttgcaacttagaaaccagctacagtatggcccacttaataaaacacctgaaacaaaaaaaaaaaagaaaagaaaacacagaaaaacaaaacgttgtgtgtgggcgcgcgcccggggcccctccgaggaaaaggcgttaatagagacaaccatgcggtgtggggcgcgcgcgggcggccccagagggggatcacgcgggacacgcgtggggcccaccaaccggggatcccccaggggaagaaacccgggggacaagacaaagaaagggcggggggatcttccccgccgcaatgagaaaaaagcgcccgggggggtcacaacgagaagggtcttcggcgaaaaagacccccaagaggcgggacccccgggagaggcgacaaacaacgggggggaatcatagcaaccacgcgggggaagttcccaaaggagcagaggcgcaagacatccaaaaaatataggcgcccgagaccctggggggggaagaaacgaagcagaggaacggcaaaagagagcagaaaggaaacaaaggaacacaacaggagagaagcagcagaggaaccagcaagcgaggagggcagagagagagcaacgcaggagagcaaagaagaagagagaaagagagcaagcgccaacacaa

SEQ ID NO: 60496 - DNA, 2914 bp, Homo sapiens
tggctggaaatggaagagtagctagattcttaaagaatgtttgacttgatttatttgtgtgtgtatttatgtgtgtgtgtgtgtgtgtgtgtgtgtgtattctcatccagagaaagcaattgagctgcgtctggcaaaaattgaccatactgcaattcacccacatttacttgacatgaagattggacaagggaaatatgagccgggcttcttccctaagctgcagtctgatgtactttccactgggccagccagcaacaagtggacgaaaaggaatgcccctgcccagtggaggcggaaagatcggcagaagcagcacacagaacacctgcgtttagataatgaccagagggagaagtacatccaggaagccaggactatgggcagcactatccgccagcccaaactgtccaacctctctccatcagtgattgcccagaccaattggaagtttgtagagggcctgctgaaggaatgccgcaataagaccaagaggatgctggtggaaaagatgggccgagaagctgtggagctagggcatggggaggtgaacatcacaggggtggaagagaacaccctgattgccagcctttgtgatctcctggaaaggatctggagtcatggactacaagtgaaacaggggaaatcagccttatggtcccacctgttacattatcaggacaaccggcagagaaaactcacatcaggaagcctcagtacctcaggaatacttcttgattcagaacgtaggaagtctgatgccagctcactcatgcctcccctgaggatctccctgattcaggatatgaggcacatccagaacatcggggaaatcaagactgatgtgggaaaggccagagcatgggtgcgactgtccatggaaaaaaagttactttccagacacctgaagcagctcctctcagaccatgagctcaccaaaaagttatataagcgctatgccttcctgcgctgtgatgacgagaaggagcagttcctctatcacctcctgtctttcaatgccgtcgattacttttgcttcaccaatgtcttcacaactatcctgatcccgtaccacattctgatcgtaccaagcaagaagctggggggctccatgttcactgccaacccatggatctgtatatcaggagaattgggtgagacacagatcatgcagattcccaggaatgtgctagagatgaccttcgagtgccagaacttggggaagcttactactgtccagattggccatgataactctgggctgtatgccaaatggctggtggagtatgtgatggtcaggaatgagatcacaggacatacctacaagttcccgtgtggccggtggttagggaagggcatggatgatggaagcctggagcggatcctagttggggagctgctcacatcccagcctgaggtggatgagaggccatgccggaccccgccgctgcagcagtcccccagtgtcatccggaggcttgttaccatctcacccaacaacaagcccaagctgaacactgggcagatccaggagtccatcggggaggcagtcaatggcattgtgaagcacttccataagcctgagaaagagcgaggcagtctgacgctgttgctctgtggagagtgtggccttgtctcggccttggaacaggctttccagcatggatttaaatcgccccggctcttcaaaaatgtcttcatttgggatttcctggaaaaagcacaaacctattatgagacattagagaagaatgaagtagtccctgaggaaaactggcatacaagagcccggaacttctgccgatttgtcactgcaatcaacaatactccccggaacatcggcaaggatggcaagtttcagatgctggtgtgcttgggagccagagatcacctcctacaccactggattgccctgctggctgactgccccatcactgcacacatgtatgaggatgtggcactgatcaaagaccatacacttgtcaattccttgattcgtgtgctgcagacattgcaggagttcaacatcacgctggagacgtcccttgtcaagggcatcgacatctgacctcccagcaccagccagcagcaggactgagaaagactcaccctgcagctctgaccttttttcccaaagggacttaagcgattgtgcaggagtaggagacaaaatgtacactcactgtaaaaagaaaactagaggatttttggaataaataatctattttagagtttatttgctgatttgctttttacacactttcatgtgaaagagtgatagggagagggagcgaggctggtgccgcttattttgaagctggtgccctccctcgccgtggccacatgctggaagcctgaggcctccctggactgagcctgtggcactgcgtgcgggacagttatgtttccttgccccgtcgcattaatgaggcccttccacatcatttttaaactaatgtttttctatattaacattattatggatatttggctttcataggccacacacaggtgtgctgcgcgggaagccccatgctccaatcaaagggatttttagtagtgcctctaagcaagcaccgatgagtcagtcccacgtattttcttttttgtcagtattgtttgggaaggagacatgccgggatgtgtcatcgtgccaaataccacatttcctgttggcacagtttcacagaagtaaacataagcatgttttaacaggtttttcttttcttttttcttttttaaaatgttttatttatttaacccgccattgtgtgtttttaagtattttctttttttaaggaaaggaaaagcttgtcacaatctaactggctatgttattattattaaatttatgttttgcaacttagaaaccagctacagtatggcccacttaataaaacacctgaaacaaaaa

SEQ ID NO: 60497 - DNA, 2557 bp, Homo sapiens
cctctactcagactggtctctccacactggcactatccgccagcccaaactgtccaacctctctccatcagtgattgcccagaccaattggaagtttgtagagggcctgctgaaggaatgccgcaataagaccaagaggatgctggtggaaaagatgggccgagaagctgtggagctagggcatggggaggtgaacatcacaggggtggaagagaacaccctgattgccagcctttgtgatctcctggaaaggatctggagtcatggactacaagtgaaacaggggaaatcagccttatggtcccacctgttacattatcaggacaaccggcagagaaaactcacatcaggaagcctcagtacctcaggaatacttcttgattcagaacgtaggaagtctgatgccagctcactcatgcctcccctgaggatctccctgattcaggatatgaggcacatccagaacatcggggaaatcaagactgatgtgggaaaggccagagcatgggtgcgactgtccatggaaaaaaagttactttccagacacctgaagcagctcctctcagaccatgagctcaccaaaaagttatataagcgctatgccttcctgcgctgtgatgacgagaaggagcagttcctctatcacctcctgtctttcaatgccgtcgattacttttgcttcaccaatgtcttcacaactatcctgatcccgtaccacattctgatcgtaccaagcaagaagctggggggctccatgttcactgccaacccatggatctgtatatcaggagaattgggtgagacacagatcatgcagattcccaggaatgtgctagagatgaccttcgagtgccagaacttggggaagcttactactgtccagattggccatgataactctgggctgtatgccaaatggctggtggagtatgtgatggtcaggaatgagatcacaggacatacctacaagttcccgtgtggccggtggttagggaagggcatggatgatggaagcctggagcggatcctagttggggagctgctcacatcccagcctgaggtggatgagaggccatgccggaccccgccgctgcagcagtcccccagtgtcatccggaggcttgttaccatctcacccaacaacaagcccaagctgaacactgggcagatccaggagtccatcggggaggcagtcaatggcattgtgaagcacttccataagcctgagaaagagcgaggcagtctgacgctgttgctctgtggagagtgtggccttgtctcggccttggaacaggctttccagcatggatttaaatcgccccggctcttcaaaaatgtcttcatttgggatttcctggaaaaagcacaaacctattatgagacattagagaagaatgaagtagtccctgaggaaaactggcatacaagagcccggaacttctgccgatttgtcactgcaatcaacaatactccccggaacatcggcaaggatggcaagtttcagatgctggtgtgcttgggagccagagatcacctcctacaccactggattgccctgctggctgactgccccatcactgcacacatgtatgaggatgtggcactgatcaaagaccatacacttgtcaattccttgattcgtgtgctgcagacattgcaggagttcaacatcacgctggagacgtcccttgtcaagggcatcgacatctgacctcccagcaccagccagcagcaggactgagaaagactcaccctgcagctctgaccttttttcccaaagggacttaagcgattgtgcaggagtaggagacaaaatgtacactcactgtaaaaagaaaactagaggatttttggaataaataatctattttagagtttatttgctgatttgctttttacacactttcatgtgaaagagtgatagggagagggagcgaggctggtgccgcttattttgaagctggtgccctccctcgccgtggccacatgctggaagcctgaggcctccctggactgagcctgtggcactgcgtgcgggacagttatgtttccttgccccgtcgcattaatgaggcccttccacatcatttttaaactaatgtttttctatattaacattattatggatatttggctttcataggccacacacaggtgtgctgcgcgggaagccccatgctccaatcaaagggatttttagtagtgcctctaagcaagcaccgatgagtcagtcccacgtattttcttttttgtcagtattgtttgggaaggagacatgccgggatgtgtcatcgtgccaaataccacatttcctgttggcacagtttcacagaagtaaacataagcatgttttaacaggtttttcttttcttttttcttttttaaaatgttttatttatttaacccgccattgtgtgtttttaagtattttctttttttaaggaaaggaaaagcttgtcacaatctaactggctatgttattattattaaatttatgttttgcaacttagaaaccagctacagtatggcccacttaataaaacacctgaaacaaaaa

SEQ ID NO: 60498 - DNA, 2596 bp, Homo sapiens
accagtcagcaagtagtagctgaatacatcactactgaagtacatccaggaagccaggactatgggcagcactatccgccagcccaaactgtccaacctctctccatcagtgattgcccagaccaattggaagtttgtagagggcctgctgaaggaatgccgcaataagaccaagaggatgctggtggaaaagatgggccgagaagctgtggagctagggcatggggaggtgaacatcacaggggtggaagagaacaccctgattgccagcctttgtgatctcctggaaaggatctggagtcatggactacaagtgaaacaggggaaatcagccttatggtcccacctgttacattatcaggacaaccggcagagaaaactcacatcaggaagcctcagtacctcaggaatacttcttgattcagaacgtaggaagtctgatgccagctcactcatgcctcccctgaggatctccctgattcaggatatgaggcacatccagaacatcggggaaatcaagactgatgtgggaaaggccagagcatgggtgcgactgtccatggaaaaaaagttactttccagacacctgaagcagctcctctcagaccatgagctcaccaaaaagttatataagcgctatgccttcctgcgctgtgatgacgagaaggagcagttcctctatcacctcctgtctttcaatgccgtcgattacttttgcttcaccaatgtcttcacaactatcctgatcccgtaccacattctgatcgtaccaagcaagaagctggggggctccatgttcactgccaacccatggatctgtatatcaggagaattgggtgagacacagatcatgcagattcccaggaatgtgctagagatgaccttcgagtgccagaacttggggaagcttactactgtccagattggccatgataactctgggctgtatgccaaatggctggtggagtatgtgatggtcaggaatgagatcacaggacatacctacaagttcccgtgtggccggtggttagggaagggcatggatgatggaagcctggagcggatcctagttggggagctgctcacatcccagcctgaggtggatgagaggccatgccggaccccgccgctgcagcagtcccccagtgtcatccggaggcttgttaccatctcacccaacaacaagcccaagctgaacactgggcagatccaggagtccatcggggaggcagtcaatggcattgtgaagcacttccataagcctgagaaagagcgaggcagtctgacgctgttgctctgtggagagtgtggccttgtctcggccttggaacaggctttccagcatggatttaaatcgccccggctcttcaaaaatgtcttcatttgggatttcctggaaaaagcacaaacctattatgagacattagagaagaatgaagtagtccctgaggaaaactggcatacaagagcccggaacttctgccgatttgtcactgcaatcaacaatactccccggaacatcggcaaggatggcaagtttcagatgctggtgtgcttgggagccagagatcacctcctacaccactggattgccctgctggctgactgccccatcactgcacacatgtatgaggatgtggcactgatcaaagaccatacacttgtcaattccttgattcgtgtgctgcagacattgcaggagttcaacatcacgctggagacgtcccttgtcaagggcatcgacatctgacctcccagcaccagccagcagcaggactgagaaagactcaccctgcagctctgaccttttttcccaaagggacttaagcgattgtgcaggagtaggagacaaaatgtacactcactgtaaaaagaaaactagaggatttttggaataaataatctattttagagtttatttgctgatttgctttttacacactttcatgtgaaagagtgatagggagagggagcgaggctggtgccgcttattttgaagctggtgccctccctcgccgtggccacatgctggaagcctgaggcctccctggactgagcctgtggcactgcgtgcgggacagttatgtttccttgccccgtcgcattaatgaggcccttccacatcatttttaaactaatgtttttctatattaacattattatggatatttggctttcataggccacacacaggtgtgctgcgcgggaagccccatgctccaatcaaagggatttttagtagtgcctctaagcaagcaccgatgagtcagtcccacgtattttcttttttgtcagtattgtttgggaaggagacatgccgggatgtgtcatcgtgccaaataccacatttcctgttggcacagtttcacagaagtaaacataagcatgttttaacaggtttttcttttcttttttcttttttaaaatgttttatttatttaacccgccattgtgtgtttttaagtattttctttttttaaggaaaggaaaagcttgtcacaatctaactggctatgttattattattaaatttatgttttgcaacttagaaaccagctacagtatggcccacttaataaaacacctgaaacaaaaa

SEQ ID NO: 60499 - DNA, 4869 bp, Homo sapiens
  misc_feature (10)..(10): n is a, c, g, or t
  misc_feature (12)..(13): n is a, c, g, or t
  misc_feature (16)..(16): n is a, c, g, or t
  misc_feature (18)..(19): n is a, c, g, or t
  misc_feature (22)..(22): n is a, c, g, or t
  misc_feature (37)..(37): n is a, c, g, or t
aaggcatccngnntcngnnggncggcccgtgcccccncgccccgtcacggcaccgcggcggccgaggggaccggccagggccgggggcggcggcccgagccgcggtagcggcggcggcgggaggggcggcctgagggcggacgggcgggcgcccgggttgcgggggctcggtgccgctccgcactgcccggccggtctcggccccggcgccatgagtggcggcggcggcggagggggctcggcgcccagtcgcttcgccgactactttgtcatctgcggactggacacggagaccgggctggagccggacgagctgtcggcattatgccagtacatacaggcttctaaagccagggatggtgccagccctttcatttcaagtacgactgaaggagaaaattttgagcagacaccattgagaagaacattcaaatctaaggtccttgcacgatatcctgagaacgtagaatggaatccctttgaccaagatgcagtaggaatgctatgtatgccgaaagggctggcattcaagacccaggctgatcccagggagccccaattccatgcctttattatcacaagggaggatggctctcggacatttgggtttgccctcacattttatgaagaggtgactagcaagcagatctgcagtgcaatgcagaccctctaccacatgcacaatgctgagtatgatgtcctacatgctccccctgctgatgacagagaccagagcagcatggaggatggtgaagacactcctgtgaccaaactgcagcgcttcaactcctatgacattagccgggacactctctacgtctctaagtgcatctgcctcatcacacccatgtctttcatgaaggcatgtcggagcgtgctggagcaactccaccaggcagtcacttcacctcagccccctccactgccccttgagagctacatatacaacgtactctacgaggtgccgctcccacctcctggccggtccttgaagttttctggggtctatgggccaataatctgccagagaccaagtaccaatgagcttcccctatttgactttcctgtcaaagaggtttttgaactgctcggggtggagaatgtgtttcagctttttacttgtgcccttctggagtttcaaatcctgctctactcacagcattaccagagactgatgactgtggcggagacgattacagctctcatgtttcctttccagtggcagcatgtctatgtccctattctcccagcttctctcctgcatttcttagatgctcctgttccatacctgatgggtttgcattccaatggcctggatgaccggtcaaagctggagctgcctcaagaggctaacctctgctttgtggacattgacaaccacttcattgagttgccagaggacttgccacagttccccaacaaattggagtttgtccaggaagtctctgagattctcatggcatttggaattccccctgaagggaatcttcattgcagtgagagtgcctccaagctgaagaggctgcgggcctctgagcttgtctcggacaagaggaatgggaacattgctggctcccctttgcattcctacgagcttcttaaggagaatgaaactattgcccggctgcaagccttggtcaagagaactggggtgagcctggaaaagttggaagtgcgtgaagaccccagcagcaataaggatctcaaagttcagtgtgatgaagaagaactcaggatttaccagctaaacattcagatccgggaagtttttgcaaatcgtttcactcagatgtttgcagattatgaggtgtttgtcatccaacccagccaggataaggaatcctggtttaccaacagggagcaaatgcaaaactttgataaagcatcttttctgtcagatcagcctgagccctacctgcccttcctctcaagattcctggagacccagatgtttgcatctttcattgacaacaaaataatgtgtcatgatgatgatgataaagaccctgtactccgggtatttgattcccgagttgacaagatcaggctgttgaatgttcggacacctactctccgtacatccatgtaccagaagtgtaccactgtggatgaagcagagaaagcaattgagctgcgtctggcaaaaattgaccatactgcaattcacccacatttacttgacatgaagattggacaagggaaatatgagccgggcttcttccctaagctgcagtctgatgtactttccactgggccagccagcaacaagtggacgaaaaggaatgcccctgcccagtggaggcggaaagatcggcagaagcagcacacagaacacctgcgtttagataatgaccagagggagaagtacatccaggaagccaggactatgggcagcactatccgccagcccaaactgtccaacctctctccatcagtgattgcccagaccaattggaagtttgtagagggcctgctgaaggaatgccgcaataagaccaagaggatgctggtggaaaagatgggccgagaagctgtggagctagggcatggggaggtgaacatcacaggggtggaagagaacaccctgattgccagcctttgtgatctcctggaaaggatctggagtcatggactacaagtgaaacaggggaaatcagccttatggtcccacctgttacattatcaggacaaccggcagagaaaactcacatcaggaagcctcagtacctcaggaatacttcttgattcagaacgtaggaagtctgatgccagctcactcatgcctcccctgaggatctccctgattcaggatatgaggcacatccagaacatcggggaaatcaagactgatgtgggaaaggccagagcatgggtgcgactgtccatggaaaaaaagttactttccagacacctgaagcagctcctctcagaccatgagctcaccaaaaagttatataagcgctatgccttcctgcgctgtgatgacgagaaggagcagttcctctatcacctcctgtctttcaatgccgtcgattacttttgcttcaccaatgtcttcacaactatcctgatcccgtaccacattctgatcgtaccaagcaagaagctggggggctccatgttcactgccaacccatggatctgtatatcaggagaattgggtgagacacagatcatgcagattcccaggaatgtgctagagatgaccttcgagtgccagaacttggggaagcttactactgtccagattggccatgataactctgggctgtatgccaaatggctggtggagtatgtgatggtcaggaatgagatcacaggacatacctacaagttcccgtgtggccggtggttagggaagggcatggatgatggaagcctggagcggatcctagttggggagctgctcacatcccagctgtcatccggaggcttgttaccatctcacccaacaacaagcccaagctgaacactgggcagatccaggagtccatcggggaggcagtcaatggcattgtgaagcacttccataagcctgagaaagagcgaggcagtctgacgctgttgctctgtggagagtgtggccttgtctcggccttggaacaggctttccagcatggatttaaatcgccccggctcttcaaaaatgtcttcatttgggatttcctggaaaaagcacaaacctattatgagacattagagaagaatgaagtagtccctgaggaaaactggcatacaagagcccggaacttctgccgatttgtcactgcaatcaacaatactccccggaacatcggcaaggatggcaagtttcagatgctggtgtgcttgggagccagagatcacctcctacaccactggattgccctgctggctgactgccccatcactgcacacatgtatgaggatgtggcactgatcaaagaccatacacttgtcaattccttgattcgtgtgctgcagacattgcaggagttcaacatcacgctggagacgtcccttgtcaagggcatcgacatctgacctcccagcaccagccagcagcaggactgagaaagactcaccctgcagctctgaccttttttcccaaagggacttaagcgattgtgcaggagtaggagacaaaatgtacactcactgtaaaaagaaaactagaggatttttggaataaataatctattttagagtttatttgctgatttgctttttacacactttcatgtgaaagagtgatagggagagggagcgaggctggtgccgcttattttgaagctggtgccctccctcgccgtggccacatgctggaagcctgaggcctccctggactgagcctgtggcactgcgtgcgggacagttatgtttccttgccccgtcgcattaatgaggcccttccacatcatttttaaactaatgtttttctatattaacattattatggatatttggctttcataggccacacacaggtgtgctgcgcgggaagccccatgctccaatcaaagggatttttagtagtgcctctaagcaagcaccgatgagtcagtcccacgtattttcttttttgtcagtattgtttgggaaggagacatgccgggatgtgtcatcgtgccaaataccacatttcctgttggcacagtttcacagaagtaaacataagcatgttttaacaggtttttcttttcttttttcttttttaaaatgttttatttatttaacccgccattgtgtgtttttaagtattttctttttttaaggaaaggaaaagcttgtcacaatctaactggctatgttattattattaaatttatgttttgcaacttagaaaccagctacagtatggcccacttaataaaacacctgaaacaaaaa

SEQ ID NO: 60500 - DNA, 4863 bp, Homo sapiens
  misc_feature (10)..(10): n is a, c, g, or t
  misc_feature (12)..(13): n is a, c, g, or t
  misc_feature (16)..(16): n is a, c, g, or t
  misc_feature (18)..(19): n is a, c, g, or t
  misc_feature (22)..(22): n is a, c, g, or t
  misc_feature (37)..(37): n is a, c, g, or t
aaggcatccngnntcngnnggncggcccgtgcccccncgccccgtcacggcaccgcggcggccgaggggaccggccagggccgggggcggcggcccgagccgcggtagcggcggcggcgggaggggcggcctgagggcggacgggcgggcgcccgggttgcgggggctcggtgccgctccgcactgcccggccggtctcggccccggcgccatgagtggcggcggcggcggagggggctcggcgcccagtcgcttcgccgactactttgtcatctgcggactggacacggagaccgggctggagccggacgagctgtcggcattatgccagtacatacaggcttctaaagccagggatggtgccagccctttcatttcaagtacgactgaaggagaaaattttgagcagacaccattgagaagaacattcaaatctaaggtccttgcacgatatcctgagaacgtagaatggaatccctttgaccaagatgcagtaggaatgctatgtatgccgaaagggctggcattcaagacccaggctgatcccagggagccccaattccatgcctttattatcacaagggaggatggctctcggacatttgggtttgccctcacattttatgaagaggtgactagcaagcagatctgcagtgcaatgcagaccctctaccacatgcacaatgctgagtatgatgtcctacatgctccccctgctgatgacagagaccagagcagcatggaggatggtgaagacactcctgtgaccaaactgcagcgcttcaactcctatgacattagccgggacactctctacgtctctaagtgcatctgcctcatcacacccatgtctttcatgaaggcatgtcggagcgtgctggagcaactccaccaggcagtcacttcacctcagccccctccactgccccttgagagctacatatacaacgtactctacgaggtgccgctcccacctcctggccggtccttgaagttttctggggtctatgggccaataatctgccagagaccaagtaccaatgagcttcccctatttgactttcctgtcaaagaggtttttgaactgctcggggtggagaatgtgtttcagctttttacttgtgcccttctggagtttcaaatcctgctctactcacagcattaccagagactgatgactgtggcggagacgattacagctctcatgtttcctttccagtggcagcatgtctatgtccctattctcccagcttctctcctgcatttcttagatgctcctgttccatacctgatgggtttgcattccaatggcctggatgaccggtcaaagctggagctgcctcaagaggctaacctctgctttgtggacattgacaaccacttcattgagttgccagaggacttgccacagttccccaacaaattggagtttgtccaggaagtctctgagattctcatggcatttggaattccccctgaagggaatcttcattgcagtgagagtgcctccaagctgaagaggctgcgggcctctgagcttgtctcggacaagaggaatgggaacattgctggctcccctttgcattcctacgagcttcttaaggagaatgaaactattgcccggctgcaagccttggtcaagagaactggggtgagcctggaaaagttggaagtgcgtgaagaccccagcagcaataaggatctcaaagttcagtgtgatgaagaagaactcaggatttaccagctaaacattcagatccgggaagtttttgcaaatcgtttcactcagatgtttgcagattatgaggtgtttgtcatccaacccagccaggataaggaatcctggtttaccaacagggagcaaatgcaaaactttgataaagcatcttttctgtcagatcagcctgagccctacctgcccttcctctcaagattcctggagacccagatgtttgcatctttcattgacaacaaaataatgtgtcatgatgatgatgataaagaccctgtactccgggtatttgattcccgagttgacaagatcaggctgttgaatgttcggacacctactctccgtacatccatgtaccagaagtgtaccactgtggatgaagcagagaaagcaattgagctgcgtctggcaaaaattgaccatactgcaattcacccacatttacttgacatgaagattggacaagggaaatatgagccgggcttcttccctaagctgcagtctgatgtactttccactgggccagccagcaacaagtggacgaaaaggaatgcccctgcccagtggaggcggaaagatcggcagaagcagcacacagaacacctgcgtttagataatgaccagagggagaagtacatccaggaagccaggactatgggcagcactatccgccagcccaaactgtccaacctctctccatcagtgattgcccagaccaattggaagtttgtagagggcctgctgaaggaatgccgcaataagaccaagaggatgctggtggaaaagatgggccgagaagctgtggagctagggcatggggaggtgaacatcacaggggtggaagagaacaccctgattgccagcctttgtgatctcctggaaaggatctggagtcatggactacaagtgaaacaggggaaatcagccttatggtcccacctgttacattatcaggacaaccggcagagaaaactcacatcaggaagcctcagtacctcaggaatacttcttgattcagaacgtaggaagtctgatgccagctcactcatgcctcccctgaggatctccctgattcaggatatgaggcacatccagaacatcggggaaatcaagactgatgtgggaaaggccagagcatgggtgcgactgtccatggaaaaaaagttactttccagacacctgaagcagctcctctcagaccatgagctcaccaaaaagttatataagcgctatgccttcctgcgctgtgatgacgagaaggagcagttcctctatcactgatcccgtaccacattctgatcgtaccaagcaagaagctggggggctccatgttcactgccaacccatggatctgtatatcaggagaattgggtgagacacagatcatgcagattcccaggaatgtgctagagatgaccttcgagtgccagaacttggggaagcttactactgtccagattggccatgataactctgggctgtatgccaaatggctggtggagtatgtgatggtcaggaatgagatcacaggacatacctacaagttcccgtgtggccggtggttagggaagggcatggatgatggaagcctggagcggatcctagttggggagctgctcacatcccagcctgaggtggatgagaggccatgccggaccccgccgctgcagcagtcccccagtgtcatccggaggcttgttaccatctcacccaacaacaagcccaagctgaacactgggcagatccaggagtccatcggggaggcagtcaatggcattgtgaagcacttccataagcctgagaaagagcgaggcagtctgacgctgttgctctgtggagagtgtggccttgtctcggccttggaacaggctttccagcatggatttaaatcgccccggctcttcaaaaatgtcttcatttgggatttcctggaaaaagcacaaacctattatgagacattagagaagaatgaagtagtccctgaggaaaactggcatacaagagcccggaacttctgccgatttgtcactgcaatcaacaatactccccggaacatcggcaaggatggcaagtttcagatgctggtgtgcttgggagccagagatcacctcctacaccactggattgccctgctggctgactgccccatcactgcacacatgtatgaggatgtggcactgatcaaagaccatacacttgtcaattccttgattcgtgtgctgcagacattgcaggagttcaacatcacgctggagacgtcccttgtcaagggcatcgacatctgacctcccagcaccagccagcagcaggactgagaaagactcaccctgcagctctgaccttttttcccaaagggacttaagcgattgtgcaggagtaggagacaaaatgtacactcactgtaaaaagaaaactagaggatttttggaataaataatctattttagagtttatttgctgatttgctttttacacactttcatgtgaaagagtgatagggagagggagcgaggctggtgccgcttattttgaagctggtgccctccctcgccgtggccacatgctggaagcctgaggcctccctggactgagcctgtggcactgcgtgcgggacagttatgtttccttgccccgtcgcattaatgaggcccttccacatcatttttaaactaatgtttttctatattaacattattatggatatttggctttcataggccacacacaggtgtgctgcgcgggaagccccatgctccaatcaaagggatttttagtagtgcctctaagcaagcaccgatgagtcagtcccacgtattttcttttttgtcagtattgtttgggaaggagacatgccgggatgtgtcatcgtgccaaataccacatttcctgttggcacagtttcacagaagtaaacataagcatgttttaacaggtttttcttttcttttttcttttttaaaatgttttatttatttaacccgccattgtgtgtttttaagtattttctttttttaaggaaaggaaaagcttgtcacaatctaactggctatgttattattattaaatttatgttttgcaacttagaaaccagctacagtatggcccacttaataaaacacctgaaacaaaaa

SEQ ID NO: 60501 - DNA, 4799 bp, Homo sapiens
  misc_feature (10)..(10): n is a, c, g, or t
  misc_feature (12)..(13): n is a, c, g, or t
  misc_feature (16)..(16): n is a, c, g, or t
  misc_feature (18)..(19): n is a, c, g, or t
  misc_feature (22)..(22): n is a, c, g, or t
  misc_feature (37)..(37): n is a, c, g, or t
aaggcatccngnntcngnnggncggcccgtgcccccncgccccgtcacggcaccgcggcggccgaggggaccggccagggccgggggcggcggcccgagccgcggtagcggcggcggcgggaggggcggcctgagggcggacgggcgggcgcccgggttgcgggggctcggtgccgctccgcactgcccggccggtctcggccccggcgccatgagtggcggcggcggcggagggggctcggcgcccagtcgcttcgccgactactttgtcatctgcggactggacacggagaccgggctggagccggacgagctgtcggcattatgccagtacatacaggcttctaaagccagggatggtgccagccctttcatttcaagtacgactgaaggagaaaattttgagcagacaccattgagaagaacattcaaatctaaggtccttgcacgatatcctgagaacgtagaatggaatccctttgaccaagatgcagtaggaatgctatgtatgccgaaagggctggcattcaagacccaggctgatcccagggagccccaattccatgcctttattatcacaagggaggatggctctcggacatttgggtttgccctcacattttatgaagaggtgactagcaagcagatctgcagtgcaatgcagaccctctaccacatgcacaatgctgagtatgatgtcctacatgctccccctgctgatgacagagaccagagcagcatggaggatggtgaagacactcctgtgaccaaactgcagcgcttcaactcctatgacattagccgggacactctctacgtctctaagtgcatctgcctcatcacacccatgtctttcatgaaggcatgtcggagcgtgctggagcaactccaccaggcagtcacttcacctcagccccctccactgccccttgagagctacatatacaacgtactctacgaggtgccgctcccacctcctggccggtccttgaagttttctggggtctatgggccaataatctgccagagaccaagtaccaatgagcttcccctatttgactttcctgtcaaagaggtttttgaactgctcggggtggagaatgtgtttcagctttttacttgtgcccttctggagtttcaaatcctgctctactcacagcattaccagagactgatgactgtggcggagacgattacagctctcatgtttcctttccagtggcagcatgtctatgtccctattctcccagcttctctcctgcatttcttagatgctcctgttccatacctgatgggtttgcattccaatggcctggatgaccggtcaaagctggagctgcctcaagaggctaacctctgctttgtggacattgacaaccacttcattgagttgccagaggacttgccacagttccccaacaaattggagtttgtccaggaagtctctgagattctcatggcatttggaattccccctgaagggaatcttcattgcagtgagagtgcctccaagctgaagaggctgcgggcctctgagcttgtctcggacaagaggaatgggaacattgctggctcccctttgcattcctacgagcttcttaaggagaatgaaactattgcccggctgcaagccttggtcaagagaactggggtgagcctggaaaagttggaagtgcgtgaagaccccagcagcaataaggatctcaaagttcagtgtgatgaagaagaactcaggatttaccagctaaacattcagatccgggaagtttttgcaaatcgtttcactcagatgtttgcagattatgaggtgtttgtcatccaacccagccaggataaggaatcctggtttaccaacagggagcaaatgcaaaactttgataaagcatcttttctgtcagatcagcctgagccctacctgcccttcctctcaagattcctggagacccagatgtttgcatctttcattgacaacaaaataatgtgtcatgatgatgatgataaagaccctgtactccgggtatttgattcccgagttgacaagatcaggctgttgaatgttcggacacctactctccgtacatccatgtaccagaagtgtaccactgtggatgaagcagagaaagcaattgagctgcgtctggcaaaaattgaccatactgcaattcacccacatttacttgacatgaagattggacaagggaaatatgagccgggcttcttccctaagctgcagtctgatgtactttccactgggccagccagcaacaagtggacgaaaaggaatgcccctgcccagtggaggcggaaagatcggcagaagcagcacacagaacacctgcgtttagataatgaccagagggagaagtacatccaggaagccaggactatgggcagcactatccgccagcccaaactgtccaacctctctccatcagtgattgcccagaccaattggaagtttgtagagggcctgctgaaggaatgccgcaataagaccaagaggatgctggtggaaaagatgggccgagaagctgtggagctagggcatggggaggtgaacatcacaggggtggaagagaacaccctgattgccagcctttgtgatctcctggaaaggatctggagtcatggactacaagtgaaacaggggaaatcagccttatggtcccacctgttacattatcaggacaaccggcagagaaaactcacatcaggaagcctcagtacctcaggaatacttcttgattcagaacgtaggaagtctgatgccagctcactcatgcctcccctgaggatctccctgattcaggatatgaggcacatccagaacatcggggaaatcaagactgatgtgggaaaggccagagcatgggtgcgactgtccatggaaaaaaagttactttccagacacctgaagcagctcctctcagaccatgagctcaccaatgatcccgtaccacattctgatcgtaccaagcaagaagctggggggctccatgttcactgccaacccatggatctgtatatcaggagaattgggtgagacacagatcatgcagattcccaggaatgtgctagagatgaccttcgagtgccagaacttggggaagcttactactgtccagattggccatgataactctgggctgtatgccaaatggctggtggagtatgtgatggtcaggaatgagatcacaggacatacctacaagttcccgtgtggccggtggttagggaagggcatggatgatggaagcctggagcggatcctagttggggagctgctcacatcccagcctgaggtggatgagaggccatgccggaccccgccgctgcagcagtcccccagtgtcatccggaggcttgttaccatctcacccaacaacaagcccaagctgaacactgggcagatccaggagtccatcggggaggcagtcaatggcattgtgaagcacttccataagcctgagaaagagcgaggcagtctgacgctgttgctctgtggagagtgtggccttgtctcggccttggaacaggctttccagcatggatttaaatcgccccggctcttcaaaaatgtcttcatttgggatttcctggaaaaagcacaaacctattatgagacattagagaagaatgaagtagtccctgaggaaaactggcatacaagagcccggaacttctgccgatttgtcactgcaatcaacaatactccccggaacatcggcaaggatggcaagtttcagatgctggtgtgcttgggagccagagatcacctcctacaccactggattgccctgctggctgactgccccatcactgcacacatgtatgaggatgtggcactgatcaaagaccatacacttgtcaattccttgattcgtgtgctgcagacattgcaggagttcaacatcacgctggagacgtcccttgtcaagggcatcgacatctgacctcccagcaccagccagcagcaggactgagaaagactcaccctgcagctctgaccttttttcccaaagggacttaagcgattgtgcaggagtaggagacaaaatgtacactcactgtaaaaagaaaactagaggatttttggaataaataatctattttagagtttatttgctgatttgctttttacacactttcatgtgaaagagtgatagggagagggagcgaggctggtgccgcttattttgaagctggtgccctccctcgccgtggccacatgctggaagcctgaggcctccctggactgagcctgtggcactgcgtgcgggacagttatgtttccttgccccgtcgcattaatgaggcccttccacatcatttttaaactaatgtttttctatattaacattattatggatatttggctttcataggccacacacaggtgtgctgcgcgggaagccccatgctccaatcaaagggatttttagtagtgcctctaagcaagcaccgatgagtcagtcccacgtattttcttttttgtcagtattgtttgggaaggagacatgccgggatgtgtcatcgtgccaaataccacatttcctgttggcacagtttcacagaagtaaacataagcatgttttaacaggtttttcttttcttttttcttttttaaaatgttttatttatttaacccgccattgtgtgtttttaagtattttctttttttaaggaaaggaaaagcttgtcacaatctaactggctatgttattattattaaatttatgttttgcaacttagaaaccagctacagtatggcccacttaataaaacacctgaaacaaaaa

SEQ ID NO: 60502 - DNA, 4981 bp, Homo sapiens
  misc_feature (10)..(10): n is a, c, g, or t
  misc_feature (12)..(13): n is a, c, g, or t
  misc_feature (16)..(16): n is a, c, g, or t
  misc_feature (18)..(19): n is a, c, g, or t
  misc_feature (22)..(22): n is a, c, g, or t
  misc_feature (37)..(37): n is a, c, g, or t
aaggcatccngnntcngnnggncggcccgtgcccccncgccccgtcacggcaccgcggcggccgaggggaccggccagggccgggggcggcggcccgagccgcggtagcggcggcggcgggaggggcggcctgagggcggacgggcgggcgcccgggttgcgggggctcggtgccgctccgcactgcccggccggtctcggccccggcgccatgagtggcggcggcggcggagggggctcggcgcccagtcgcttcgccgactactttgtcatctgcggactggacacggagaccgggctggagccggacgagctgtcggcattatgccagtacatacaggcttctaaagccagggatggtgccagccctttcatttcaagtacgactgaaggagaaaattttgagcagacaccattgagaagaacattcaaatctaaggtccttgcacgatatcctgagaacgtagaatggaatccctttgaccaagatgcagtaggaatgctatgtatgccgaaagggctggcattcaagacccaggctgatcccagggagccccaattccatgcctttattatcacaagggaggatggctctcggacatttgggtttgccctcacattttatgaagaggtgactagcaagcagatctgcagtgcaatgcagaccctctaccacatgcacaatgctgagtatgatgtcctacatgctccccctgctgatgacagagaccagagcagcatggaggatggtgaagacactcctgtgaccaaactgcagcgcttcaactcctatgacattagccgggacactctctacgtctctaagtgcatctgcctcatcacacccatgtctttcatgaaggcatgtcggagcgtgctggagcaactccaccaggcagtcacttcacctcagccccctccactgccccttgagagctacatatacaacgtactctacgaggtgccgctcccacctcctggccggtccttgaagttttctggggtctatgggccaataatctgccagagaccaagtaccaatgagcttcccctatttgactttcctgtcaaagaggtttttgaactgctcggggtggagaatgtgtttcagctttttacttgtgcccttctggagtttcaaatcctgctctactcacagcattaccagagactgatgactgtggcggagacgattacagctctcatgtttcctttccagtggcagcatgtctatgtccctattctcccagcttctctcctgcatttcttagatgctcctgttccatacctgatgggtttgcattccaatggcctggatgaccggtcaaagctggagctgcctcaagaggctaacctctgctttgtggacattgacaaccacttcattgagttgccagaggacttgccacagttccccaacaaattggagtttgtccaggaagtctctgagattctcatggcatttggaattccccctgaagggaatcttcattgcagtgagagtgcctccaagctgaagaggctgcgggcctctgagcttgtctcggacaagaggaatgggaacattgctggctcccctttgcattcctacgagcttcttaaggagaatgaaactattgcccggctgcaagccttggtcaagagaactggggtgagcctggaaaagttggaagtgcgtgaagaccccagcagcaataaggatctcaaagttcagtgtgatgaagaagaactcaggatttaccagctaaacattcagatccgggaagtttttgcaaatcgtttcactcagatgtttgcagattatgaggtgtttgtcatccaacccagccaggataaggaatcctggtttaccaacagggagcaaatgcaaaactttgataaagcatcttttctgtcagatcagcctgagccctacctgcccttcctctcaagattcctggagacccagatgtttgcatctttcattgacaacaaaataatgtgtcatgatgatgatgataaagaccctgtactccgggtatttgattcccgagttgacaagatcaggctgttgaatgttcggacacctactctccgtacatccatgtaccagaagtgtaccactgtggatgaagcagagaaagcaattgagctgcgtctggcaaaaattgaccatactgcaattcacccacatttacttgacatgaagattggacaagggaaatatgagccgggcttcttccctaagctgcagtctgatgtactttccactgggccagccagcaacaagtggacgaaaaggaatgcccctgcccagtggaggcggaaagatcggcagaagcagcacacagaacacctgcgtttagataatgaccagagggagaagtacatccaggaagccaggactatgggcagcactatccgccagcccaaactgtccaacctctctccatcagtgattgcccagaccaattggaagtttgtagagggcctgctgaaggaatgccgcaataagaccaagaggatgctggtggaaaagatgggccgagaagctgtggagctagggcatggggaggtgaacatcacaggggtggaagagaacaccctgattgccagcctttgtgatctcctggaaaggatctggagtcatggactacaagtgaaacaggggaaatcagccttatggtcccacctgttacattatcaggacaaccggcagagaaaactcacatcaggaagcctcagtacctcaggaatacttcttgattcagaacgtaggaagtctgatgccagctcactcatgcctcccctgaggatctccctgattcaggatatgaggcacatccagaacatcggggaaatcaagactgatgtgggaaaggccagagcatgggtgcgactgtccatggaaaaaaagttactttccagacacctgaagcagctcctctcagaccatgagctcaccaaaaagttatataagcgctatgccttcctgcgctgtgatgacgagaaggagcagttcctctatcacctcctgtctttcaatgccgtcgattacttttgcttcaccaatgtcttcacaactatcctgatcccgtaccacattctgatcgtaccaagcaagaagctggggggctccatgttcactgccaacccatggatctgtatatcaggagaattgggtgagacacagatcatgcagattcccaggaatgtgctagagatgaccttcgagtgccagaacttggggaagcttactactgtccagattggccatgataactctgggctgtatgccaaatggctggtggagtatgtgatggtcaggaatgagatcacaggacatacctacaagttcccgtgtggccggtggttagggaagggcatggatgatggaagcctggagcggatcctagttggggagctgctcacatcccagcctgaggtggatgagaggccatgccggaccccgccgctgcagcagtcccccagtgtcatccggaggcttgttaccatctcacccaacaacaagcccaagctgaacactgggcagatccaggagtccatcggggaggcagtcaatggcattgtgaagcacttccataagcctgagaaagagcgaggcagtctgacgctgttgctctgtggagagtgtggccttgtctcggccttggaacaggctttccagcatggatttaaatcgccccggctcttcaaaaatgtcttcatttgggatttcctggaaaaagcacaaacctattatgagacattagagaagaatgaagtagtccctgaggaaaactggcatacaagagcccggaacttctgccgatttgtcactgcaatcaacaatactccccggaacatcggcaaggatggcaagtttcagatgctggtgtgcttgggagccagggttatcatgaagattaaatctcttatgtcagtgccagcacatgctgagtgttatgtgagagatcacctcctacaccactggattgccctgctggctgactgccccatcactgcacacatgtatgaggatgtggcactgatcaaagaccatacacttgtcaattccttgattcgtgtgctgcagacattgcaggagttcaacatcacgctggagacgtcccttgtcaagggcatcgacatctgacctcccagcaccagccagcagcaggactgagaaagactcaccctgcagctctgaccttttttcccaaagggacttaagcgattgtgcaggagtaggagacaaaatgtacactcactgtaaaaagaaaactagaggatttttggaataaataatctattttagagtttatttgctgatttgctttttacacactttcatgtgaaagagtgatagggagagggagcgaggctggtgccgcttattttgaagctggtgccctccctcgccgtggccacatgctggaagcctgaggcctccctggactgagcctgtggcactgcgtgcgggacagttatgtttccttgccccgtcgcattaatgaggcccttccacatcatttttaaactaatgtttttctatattaacattattatggatatttggctttcataggccacacacaggtgtgctgcgcgggaagccccatgctccaatcaaagggatttttagtagtgcctctaagcaagcaccgatgagtcagtcccacgtattttcttttttgtcagtattgtttgggaaggagacatgccgggatgtgtcatcgtgccaaataccacatttcctgttggcacagtttcacagaagtaaacataagcatgttttaacaggtttttcttttcttttttcttttttaaaatgttttatttatttaacccgccattgtgtgtttttaagtattttctttttttaaggaaaggaaaagcttgtcacaatctaactggctatgttattattattaaatttatgttttgcaacttagaaaccagctacagtatggcccacttaataaaacacctgaaacaaaaa

SEQ ID NO: 60503 - DNA, 4887 bp, Homo sapiens
  misc_feature (10)..(10): n is a, c, g, or t
  misc_feature (12)..(13): n is a, c, g, or t
  misc_feature (16)..(16): n is a, c, g, or t
  misc_feature (18)..(19): n is a, c, g, or t
  misc_feature (22)..(22): n is a, c, g, or t
  misc_feature (37)..(37): n is a, c, g, or t
aaggcatccngnntcngnnggncggcccgtgcccccncgccccgtcacggcaccgcggcggccgaggggaccggccagggccgggggcggcggcccgagccgcggtagcggcggcggcgggaggggcggcctgagggcggacgggcgggcgcccgggttgcgggggctcggtgccgctccgcactgcccggccggtctcggccccggcgccatgagtggcggcggcggcggagggggctcggcgcccagtcgcttcgccgactactttgtcatctgcggactggacacggagaccgggctggagccggacgagctgtcggcattatgccagtacatacaggcttctaaagccagggatggtgccagccctttcatttcaagtacgactgaaggagaaaattttgagcagacaccattgagaagaacattcaaatctaaggtccttgcacgatatcctgagaacgtagaatggaatccctttgaccaagatgcagtaggaatgctatgtatgccgaaagggctggcattcaagacccaggctgatcccagggagccccaattccatgcctttattatcacaagggaggatggctctcggacatttgggtttgccctcacattttatgaagaggtgactagcaagcagatctgcagtgcaatgcagaccctctaccacatgcacaatgctgagtatgatgtcctacatgctccccctgctgatgacagagaccagagcagcatggaggatggtgaagacactcctgtgaccaaactgcagcgcttcaactcctatgacattagccgggacactctctacgtctctaagtgcatctgcctcatcacacccatgtctttcatgaaggcatgtcggagcgtgctggagcaactccaccaggcagtcacttcacctcagccccctccactgccccttgagagctacatatacaacgtactctacgaggtgccgctcccacctcctggccggtccttgaagttttctggggtctatgggccaataatctgccagagaccaagtaccaatgagcttcccctatttgactttcctgtcaaagaggtttttgaactgctcggggtggagaatgtgtttcagctttttacttgtgcccttctggagtttcaaatcctgctctactcacagcattaccagagactgatgactgtggcggagacgattacagctctcatgtttcctttccagtggcagcatgtctatgtccctattctcccagcttctctcctgcatttcttagatgctcctgttccatacctgatgggtttgcattccaatggcctggatgaccggtcaaagctggagctgcctcaagaggctaacctctgctttgtggacattgacaaccacttcattgagttgccagaggacttgccacagttccccaacaaattggagtttgtccaggaagtctctgagattctcatggcatttggaattccccctgaagggaatcttcattgcagtgagagtgcctccaagctgaagaggctgcgggcctctgagcttgtctcggacaagaggaatgggaacattgctggctcccctttgcattcctacgagcttcttaaggagaatgaaactattgcccggctgcaagccttggtcaagagaactggggtgagcctggaaaagttggaagtgcgtgaagaccccagcagcaataaggatctcaaagttcagtgtgatgaagaagaactcaggatttaccagctaaacattcagatccgggaagtttttgcaaatcgtttcactcagatgtttgcagattatgaggtgtttgtcatccaacccagccaggataaggaatcctggtttaccaacagggagcaaatgcaaaactttgataaagcatcttttctgtcagatcagcctgagccctacctgcccttcctctcaagattcctggagacccagatgtttgcatctttcattgacaacaaaataatgtgtcatgatgatgatgataaagaccctgtactccgggtatttgattcccgagttgacaagatcaggctgttgaatgttcggacacctactctccgtacatccatgtaccagaagtgtaccactgtggatgaagcagagaaagcaattgagctgcgtctggcaaaaattgaccatactgcaattcacccacatttacttgacatgaagattggacaagggaaatatgagccgggcttcttccctaagctgcagtctgatgtactttccactgggccagccagcaacaagtggacgaaaaggaatgcccctgcccagtggaggcggaaagatcggcagaagcagcacacagaacacctgcgtttagataatgaccagagggagaagtacatccaggaagccaggactatgggcagcactatccgccagcccaaactgtccaacctctctccatcagtgattgcccagaccaattggaagtttgtagagggcctgctgaaggaatgccgcaataagaccaagaggatgctggtggaaaagatgggccgagaagctgtggagctagggcatggggaggtgaacatcacaggggtggaagagaacaccctgattgccagcctttgtgatctcctggaaaggatctggagtcatggactacaagtgaaacaggggaaatcagccttatggtcccacctgttacattatcaggacaaccggcagagaaaactcacatcaggaagcctcagtacctcaggaatacttcttgattcagaacgtaggaagtctgatgccagctcactcatgcctcccctgaggatctccctgattcaggatatgaggcacatccagaacatcggggaaatcaagactgatgtgggaaaggccagagcatgggtgcgactgtccatggaaaaaaagttactttccagacacctgaagcagctcctctcagaccatgagctcaccaaaaagttatataagcgctatgccttcctgcgctgtgatgacgagaaggagcagttcctctatcacctcctgtctttcaatgccgtcgattacttttgcttcaccaatgtcttcacaactatcctgatcccgtaccacattctgatcgtaccaagcaagaagctggggggctccatgttcactgccaacccatggatctgtatatcaggagaattgggtgagacacagatcatgcagattcccaggaatgtgctagagatgaccttcgagtgccagaacttggggaagcttactactgtccagattggccatgataactctgggctgtatgccaaatggctggtggagtatgtgatggtcaggaatgagatcacaggacatacctacaagttcccgtgtggccggtggttagggaagggcatggatgatggaagcctggagcggatcctagttggggagctgctcacatcccagcctgaggtggatgagaggccatgccggaccccgccgctgcagcagtcccccagtgtcatccggaggcttgttaccatctcacccaacaacaagcccaagctgaacactgggcagatccaggagtccatcggggaggcagtcaatggcattgtgaagcacttccataagcctgagaaagagcgaggcagtctgacgctgttgctctgtggagagtgtggccttgtctcggccttggaacaggctttccagcatggatttaaatcgccccggctcttcaaaaatgtcttcatttgggatttcctggaaaaagcacaaacctattatgagacattagagaagaatgaagtagtccctgaggaaaactggcatacaagagcccggaacttctgccgatttgtcactgcaatcaacaatactccccggaacatcggcaaggatgagatcacctcctacaccactggattgccctgctggctgactgccccatcactgcacacatgtatgaggatgtggcactgatcaaagaccatacacttgtcaattccttgattcgtgtgctgcagacattgcaggagttcaacatcacgctggagacgtcccttgtcaagggcatcgacatctgacctcccagcaccagccagcagcaggactgagaaagactcaccctgcagctctgaccttttttcccaaagggacttaagcgattgtgcaggagtaggagacaaaatgtacactcactgtaaaaagaaaactagaggatttttggaataaataatctattttagagtttatttgctgatttgctttttacacactttcatgtgaaagagtgatagggagagggagcgaggctggtgccgcttattttgaagctggtgccctccctcgccgtggccacatgctggaagcctgaggcctccctggactgagcctgtggcactgcgtgcgggacagttatgtttccttgccccgtcgcattaatgaggcccttccacatcatttttaaactaatgtttttctatattaacattattatggatatttggctttcataggccacacacaggtgtgctgcgcgggaagccccatgctccaatcaaagggatttttagtagtgcctctaagcaagcaccgatgagtcagtcccacgtattttcttttttgtcagtattgtttgggaaggagacatgccgggatgtgtcatcgtgccaaataccacatttcctgttggcacagtttcacagaagtaaacataagcatgttttaacaggtttttcttttcttttttcttttttaaaatgttttatttatttaacccgccattgtgtgtttttaagtattttctttttttaaggaaaggaaaagcttgtcacaatctaactggctatgttattattattaaatttatgttttgcaacttagaaaccagctacagtatggcccacttaataaaacacctgaaacaaaaa

SEQ ID NO: 60504 - DNA, 4847 bp, Homo sapiens
  misc_feature (10)..(10): n is a, c, g, or t
  misc_feature (12)..(13): n is a, c, g, or t
  misc_feature (16)..(16): n is a, c, g, or t
  misc_feature (18)..(19): n is a, c, g, or t
  misc_feature (22)..(22): n is a, c, g, or t
  misc_feature (37)..(37): n is a, c, g, or t
aaggcatccngnntcngnnggncggcccgtgcccccncgccccgtcacggcaccgcggcggccgaggggaccggccagggccgggggcggcggcccgagccgcggtagcggcggcggcgggaggggcggcctgagggcggacgggcgggcgcccgggttgcgggggctcggtgccgctccgcactgcccggccggtctcggccccggcgccatgagtggcggcggcggcggagggggctcggcgcccagtcgcttcgccgactactttgtcatctgcggactggacacggagaccgggctggagccggacgagctgtcggcattatgccagtacatacaggcttctaaagccagggatggtgccagccctttcatttcaagtacgactgaaggagaaaattttgagcagacaccattgagaagaacattcaaatctaaggtccttgcacgatatcctgagaacgtagaatggaatccctttgaccaagatgcagtaggaatgctatgtatgccgaaagggctggcattcaagacccaggctgatcccagggagccccaattccatgcctttattatcacaagggaggatggctctcggacatttgggtttgccctcacattttatgaagaggtgactagcaagcagatctgcagtgcaatgcagaccctctaccacatgcacaatgctgagtatgatgtcctacatgctccccctgctgatgacagagaccagagcagcatggaggatggtgaagacactcctgtgaccaaactgcagcgcttcaactcctatgacattagccgggacactctctacgtctctaagtgcatctgcctcatcacacccatgtctttcatgaaggcatgtcggagcgtgctggagcaactccaccaggcagtcacttcacctcagccccctccactgccccttgagagctacatatacaacgtactctacgaggtgccgctcccacctcctggccggtccttgaagttttctggggtctatgggccaataatctgccagagaccaagtaccaatgagcttcccctatttgactttcctgtcaaagaggtttttgaactgctcggggtggagaatgtgtttcagctttttacttgtgcccttctggagtttcaaatcctgctctactcacagcattaccagagactgatgactgtggcggagacgattacagctctcatgtttcctttccagtggcagcatgtctatgtccctattctcccagcttctctcctgcatttcttagatgctcctgttccatacctgatgggtttgcattccaatggcctggatgaccggtcaaagctggagctgcctcaagaggctaacctctgctttgtggacattgacaaccacttcattgagttgccagaggacttgccacagttccccaacaaattggagtttgtccaggaagtctctgagattctcatggcatttggaattccccctgaagggaatcttcattgcagtgagagtgcctccaagctgaagaggctgcgggcctctgagcttgtctcggacaagaggaatgggaacattgctggctcccctttgcattcctacgagcttcttaaggagaatgaaactattgcccggctgcaagccttggtcaagagaactggggtgagcctggaaaagttggaagtgcgtgaagaccccagcagcaataaggatctcaaagttcagtgtgatgaagaagaactcaggatttaccagctaaacattcagatccgggaagtttttgcaaatcgtttcactcagatgtttgcagattatgaggtgtttgtcatccaacccagccaggataaggaatcctggtttaccaacagggagcaaatgcaaaactttgataaagcatcttttctgtcagatcagcctgagccctacctgcccttcctctcaagattcctggagacccagatgtttgcatctttcattgacaacaaaataatgtgtcatgatgatgatgataaagaccctgtactccgggtatttgattcccgagttgacaagatcaggctgttgaatgttcggacacctactctccgtacatccatgtaccagaagtgtaccactgtggatgaagcagagaaagcaattgagctgcgtctggcaaaaattgaccatactgcaattcacccacatttacttgacatgaagattggacaagggaaatatgagccgggcttcttccctaagctgcagtctgatgtactttccactgggccagccagcaacaagtggacgaaaaggaatgcccctgcccagtggaggcggaaagatcggcagaagcagcacacagaacacctgcgtttagataatgaccagagggagaagtacatccaggaagccaggactatgggcagcactatccgccagcccaaactgtccaacctctctccatcagtgattgcccagaccaattggaagtttgtagagggcctgctgaaggaatgccgcaataagaccaagaggatgctggtggaaaagatgggccgagaagctgtggagctagggcatggggaggtgaacatcacaggggtggaagagaacaccctgattgccagcctttgtgatctcctggaaaggatctggagtcatggactacaagtgaaacaggggaaatcagccttatggtcccacctgttacattatcaggacaaccggcagagaaaactcacatcaggaagcctcagtacctcaggaatacttcttgattcagaacgtaggaagtctgatgccagctcactcatgcctcccctgaggatctccctgattcaggatatgaggcacatccagaacatcggggaaatcaagactgatgtgggaaaggccagagcatgggtgcgactgtccatggaaaaaaagttactttccagacacctgaagcagctcctctcagaccatgagctcaccaaaaagttatataagcgctatgccttcctgcgctgtgatgacgagaaggagcagttcctctatcacctcctgtctttcaatgccgtcgattacttttgcttcaccaatgtcttcacaactatcctgatcccgtaccacattctgatcgtaccaagcaagaagctggggggctccatgttcactgccaacccatggatctgtatatcaggagaattgggtgagacacagatcatgcagattcccaggaatgtgctagagatgaccttcgagtgccagaacttggggaagcttactactgtccagattggccatgataactctgggctgtatgccaaatggctggtggagtatgtgatggtcaggaatgagatcacaggacatacctacaagttcccgtgtggccggtggttagggaagggcatggatgatggaagcctggagcggatcctagttggggagctgctcacatcccagcctgaggtggatgagaggccatgccggaccccgccgctgcagcagtcccccagtgtcatccggaggcttgttaccatctcacccaacaacaagcccaagctgaacactgggcagatccaggagtccatcggggaggcagtcaatggcattgtgaagcacttccataagcctgagaaagagcgaggcagtctgacgctgttgctctgtggagagtgtggccttgtctcggccttggaacaggctttccagcatggatttaaatcgccccggctcttcaaaaatgtcttcatttgggatttcctggaaaaagcacaaacctattatgagacattagagaagaatgaagtagtccctgaggaaaactggcatacaagagcccggaacttctgccgatttgtcactgcaatcaacaatactccccggaacatcggcaaggatgagatcacctcctacaccactggattgccctgctggactgatcaaagaccatacacttgtcaattccttgattcgtgtgctgcagacattgcaggagttcaacatcacgctggagacgtcccttgtcaagggcatcgacatctgacctcccagcaccagccagcagcaggactgagaaagactcaccctgcagctctgaccttttttcccaaagggacttaagcgattgtgcaggagtaggagacaaaatgtacactcactgtaaaaagaaaactagaggatttttggaataaataatctattttagagtttatttgctgatttgctttttacacactttcatgtgaaagagtgatagggagagggagcgaggctggtgccgcttattttgaagctggtgccctccctcgccgtggccacatgctggaagcctgaggcctccctggactgagcctgtggcactgcgtgcgggacagttatgtttccttgccccgtcgcattaatgaggcccttccacatcatttttaaactaatgtttttctatattaacattattatggatatttggctttcataggccacacacaggtgtgctgcgcgggaagccccatgctccaatcaaagggatttttagtagtgcctctaagcaagcaccgatgagtcagtcccacgtattttcttttttgtcagtattgtttgggaaggagacatgccgggatgtgtcatcgtgccaaataccacatttcctgttggcacagtttcacagaagtaaacataagcatgttttaacaggtttttcttttcttttttcttttttaaaatgttttatttatttaacccgccattgtgtgtttttaagtattttctttttttaaggaaaggaaaagcttgtcacaatctaactggctatgttattattattaaatttatgttttgcaacttagaaaccagctacagtatggcccacttaataaaacacctgaaacaaaaa

SEQ ID NO: 60505 - DNA, 4656 bp, Homo sapiens
  misc_feature (10)..(10): n is a, c, g, or t
  misc_feature (12)..(13): n is a, c, g, or t
  misc_feature (16)..(16): n is a, c, g, or t
  misc_feature (18)..(19): n is a, c, g, or t
  misc_feature (22)..(22): n is a, c, g, or t
  misc_feature (37)..(37): n is a, c, g, or t
aaggcatccngnntcngnnggncggcccgtgcccccncgccccgtcacggcaccgcggcggccgaggggaccggccagggccgggggcggcggcccgagccgcggtagcggcggcggcgggaggggcggcctgagggcggacgggcgggcgcccgggttgcgggggctcggtgccgctccgcactgcccggccggtctcggccccggcgccatgagtggcggcggcggcggagggggctcggcgcccagtcgcttcgccgactactttgtcatctgcggactggacacggagaccgggctggagccggacgagctgtcggcattatgccagtacatacaggcttctaaagccagggatggtgccagccctttcatttcaagtacgactgaaggagaaaattttgagcagacaccattgagaagaacattcaaatctaaggtccttgcacgatatcctgagaacgtagaatggaatccctttgaccaagatgcagtaggaatgctatgtatgccgaaagggctggcattcaagacccaggctgatcccagggagccccaattccatgcctttattatcacaagggaggatggctctcggacatttgggtttgccctcacattttatgaagaggtgactagcaagcagatctgcagtgcaatgcagaccctctaccacatgcacaatgctgagtatgatgtcctacatgctccccctgctgatgacagagaccagagcagcatggaggatggtgaagacactcctgtgaccaaactgcagcgcttcaactcctatgacattagccgggacactctctacgtctctaagtgcatctgcctcatcacacccatgtctttcatgaaggcatgtcggagcgtgctggagcaactccaccaggcagtcacttcacctcagccccctccactgccccttgagagctacatatacaacgtactctacgaggtgccgctcccacctcctggccggtccttgaagttttctggggtctatgggccaataatctgccagagaccaagtaccaatgagcttcccctatttgactttcctgtcaaagaggtttttgaactgctcggggtggagaatgtgtttcagctttttacttgtgcccttctggagtttcaaatcctgctctactcacagcattaccagagactgatgactgtggcggagacgattacagctctcatgtttcctttccagtggcagcatgtctatgtccctattctcccagcttctctcctgcatttcttagatgctcctgttccatacctgatgggtttgcattccaatggcctggatgaccggtcaaagctggagctgcctcaagaggctaacctctgctttgtggacattgacaaccacttcattgagttgccagaggacttgccacagttccccaacaaattggagtttgtccaggaagtctctgagattctcatggcatttggaattccccctgaagggaatcttcattgcagtgagagtgcctccaagctgaagaggctgcgggcctctgagcttgtctcggacaagaggaatgggaacattgctggctcccctttgcattcctacgagcttcttaaggagaatgaaactattgcccggctgcaagccttggtcaagagaactggggtgagcctggaaaagttggaagtgcgtgaagaccccagcagcaataaggatctcaaagttcagtgtgatgaagaagaactcaggatttaccagctaaacattcagatccgggaagtttttgcaaatcgtttcactcagatgtttgcagattatgaggtgtttgtcatccaacccagccaggataaggaatcctggtttaccaacagggagcaaatgcaaaactttgataaagcatcttttctgtcagatcagcctgagccctacctgcccttcctctcaagattcctggagacccagatgtttgcatctttcattgacaacaaaataatgtgtcatgatgatgatgataaagaccctgtactccgggtatttgattcccgagttgacaagatcaggctgttgaatgttcggacacctactctccgtacatccatgtaccagaagtgtaccactgtggatgaagcagagaaagcaattgagctgcgtctggcaaaaattgaccatactgcaattcacccacatttacttgacatgaagattggacaagggaaatatgagccgggcttcttccctaagctgcagtctgatgtactttccactgggccagccagcaacaagtggacgaaaaggaatgcccctgcccagtggaggcggaaagatcggcagaagcagcacacagaacacctgcgtttagataatgaccagagggagaagtacatccaggaagccaggactatgggcagcactatccgccagcccaaactgtccaacctctctccatcagtgattgcccagaccaattggaagtttgtagagggcctgctgaaggaatgccgcaataagaccaagaggatgctggtggaaaagatgggccgagaagctgtggagctagggcatggggaggtgaacatcacaggggtggaagagaacaccctgattgccagcctttgtgatctcctggaaaggatctggagtcatggactacaagtgaaacaggggaaatcagccttatggtcccacctgttacattatcaggacaaccggcagagaaaactcacatcaggaagcctcagtacctcaggaatacttcttgattcagaacgtaggaagtctgatgccagctcactcatgcctcccctgaggatctccctgattcaggatatgaggcacatccagaacatcggggaaatcaagactgatgtgggaaaggccagagcatgggtgcgactgtccatggaaaaaaagttactttccagacacctgaagcagctcctctcagaccatgagctcaccaaaaagttatataagcgctatgccttcctgcgctgtgatgacgagaaggagcagttcctctatcactgatcccgtaccacattctgatcgtaccaagcaagaagctggggggctccatgttcactgccaacccatggatctgtatatcaggagaattgggtgagacacagatcatgcagattcccaggaatgtgctagagatgaccttcgagtgccagaacttggggaagcttactactgtccagattggccatgataactctgggctgtatgccaaatggctggtggagtatgtgatggtcaggaatgagatcacaggacatacctacaagttcccgtgtggccggtggttagggaagggcatggatgatggaagcctggagcggatcctagttggggagctgctcacatcccagcctgaggtggatgagaggccatgccggaccccgccgctgcagcagtcccccagtgtcatccggaggcttgttaccatctcacccaacaacaagcccaaaaaagcacaaacctattatgagacattagagaagaatgaagtagtccctgaggaaaactggcatacaagagcccggaacttctgccgatttgtcactgcaatcaacaatactccccggaacatcggcaaggatggcaagtttcagatgctggtgtgcttgggagccagagatcacctcctacaccactggattgccctgctggctgactgccccatcactgcacacatgtatgaggatgtggcactgatcaaagaccatacacttgtcaattccttgattcgtgtgctgcagacattgcaggagttcaacatcacgctggagacgtcccttgtcaagggcatcgacatctgacctcccagcaccagccagcagcaggactgagaaagactcaccctgcagctctgaccttttttcccaaagggacttaagcgattgtgcaggagtaggagacaaaatgtacactcactgtaaaaagaaaactagaggatttttggaataaataatctattttagagtttatttgctgatttgctttttacacactttcatgtgaaagagtgatagggagagggagcgaggctggtgccgcttattttgaagctggtgccctccctcgccgtggccacatgctggaagcctgaggcctccctggactgagcctgtggcactgcgtgcgggacagttatgtttccttgccccgtcgcattaatgaggcccttccacatcatttttaaactaatgtttttctatattaacattattatggatatttggctttcataggccacacacaggtgtgctgcgcgggaagccccatgctccaatcaaagggatttttagtagtgcctctaagcaagcaccgatgagtcagtcccacgtattttcttttttgtcagtattgtttgggaaggagacatgccgggatgtgtcatcgtgccaaataccacatttcctgttggcacagtttcacagaagtaaacataagcatgttttaacaggtttttcttttcttttttcttttttaaaatgttttatttatttaacccgccattgtgtgtttttaagtattttctttttttaaggaaaggaaaagcttgtcacaatctaactggctatgttattattattaaatttatgttttgcaacttagaaaccagctacagtatggcccacttaataaaacacctgaaacaaaaa

SEQ ID NO: 60506 - DNA, 4433 bp, Homo sapiens
  misc_feature (10)..(10): n is a, c, g, or t
  misc_feature (12)..(13): n is a, c, g, or t
  misc_feature (16)..(16): n is a, c, g, or t
  misc_feature (18)..(19): n is a, c, g, or t
  misc_feature (22)..(22): n is a, c, g, or t
  misc_feature (37)..(37): n is a, c, g, or t
aaggcatccngnntcngnnggncggcccgtgcccccncgccccgtcacggcaccgcggcggccgaggggaccggccagggccgggggcggcggcccgagccgcggtagcggcggcggcgggaggggcggcctgagggcggacgggcgggcgcccgggttgcgggggctcggtgccgctccgcactgcccggccggtctcggccccggcgccatgagtggcggcggcggcggagggggctcggcgcccagtcgcttcgccgactactttgtcatctgcggactggacacggagaccgggctggagccggacgagctgtcggcattatgccagtacatacaggcttctaaagccagggatggtgccagccctttcatttcaagtacgactgaaggagaaaattttgagcagacaccattgagaagaacattcaaatctaaggtccttgcacgatatcctgagaacgtagaatggaatccctttgaccaagatgcagtaggaatgctatgtatgccgaaagggctggcattcaagacccaggctgatcccagggagccccaattccatgcctttattatcacaagggaggatggctctcggacatttgggtttgccctcacattttatgaagaggtgactagcaagcagatctgcagtgcaatgcagaccctctaccacatgcacaatgctgagtatgatgtcctacatgctccccctgctgatgacagagaccagagcagcatggaggatggtgaagacactcctgtgaccaaactgcagcgcttcaactcctatgacattagccgggacactctctacgtctctaagtgcatctgcctcatcacacccatgtctttcatgaaggcatgtcggagcgtgctggagcaactccaccaggcagtcacttcacctcagccccctccactgccccttgagagctacatatacaacgtactctacgaggtgccgctcccacctcctggccggtccttgaagttttctggggtctatgggccaataatctgccagagaccaagtaccaatgagcttcccctatttgactttcctgtcaaagaggtttttgaactgctcggggtggagaatgtgtttcagctttttacttgtgcccttctggagtttcaaatcctgctctactcacagcattaccagagactgatgactgtggcggagacgattacagctctcatgtttcctttccagtggcagcatgtctatgtccctattctcccagcttctctcctgcatttcttagatgctcctgttccatacctgatgggtttgcattccaatggcctggatgaccggtcaaagctggagctgcctcaagaggctaacctctgctttgtggacattgacaaccacttcattgagttgccagaggacttgccacagttccccaacaaattggagtttgtccaggaagtctctgagattctcatggcatttggaattccccctgaagggaatcttcattgcagtgagagtgcctccaagctgaagaggctgcgggcctctgagcttgtctcggacaagaggaatgggaacattgctggctcccctttgcattcctacgagcttcttaaggagaatgaaactattgcccggctgcaagccttggtcaagagaactggggtgagcctggaaaagttggaagtgcgtgaagaccccagcagcaataaggatctcaaagttcagtgtgatgaagaagaactcaggatttaccagctaaacattcagatccgggaagtttttgcaaatcgtttcactcagatgtttgcagattatgaggtgtttgtcatccaacccagccaggataaggaatcctggtttaccaacagggagcaaatgcaaaactttgataaagcatcttttctgtcagatcagcctgagccctacctgcccttcctctcaagattcctggagacccagatgtttgcatctttcattgacaacaaaataatgtgtcatgatgatgatgataaagaccctgtactccgggtatttgattcccgagttgacaagatcaggctgttgaatgttcggacacctactctccgtacatccatgtaccagaagtgtaccactgtggatgaagcagagaaagcaattgagctgcgtctggcaaaaattgaccatactgcaattcacccacatttacttgacatgaagattggacaagggaaatatgagccgggcttcttccctaagctgcagtctgatgtactttccactgggccagccagcaacaagtggacgaaaaggaatgcccctgcccagtggaggcggaaagatcggcagaagcagcacacagaacacctgcgtttagataatgaccagagggagaagtacatccaggaagccaggactatgggcagcactatccgccagcccaaactgtccaacctctctccatcagtgattgcccagaccaattggaagtttgtagagggcctgctgaaggaatgccgcaataagaccaagaggatgctggtggaaaagatgggccgagaagctgtggagctagggcatggggaggtgaacatcacaggggtggaagagaacaccctgattgccagcctttgtgatctcctggaaaggatctggagtcatggactacaagtgaaacaggggaaatcagccttatggtcccacctgttacattatcaggacaaccggcagagaaaactcacatcaggaagcctcagtacctcaggaatacttcttgattcagaacgtaggaagtctgatgccagctcactcatgcctcccctgaggatctccctgattcaggatatgaggcacatccagaacatcggggaaatcaagactgatgtgggaaaggccagagcatgggtgcgactgtccatggaaaaaaagttactttccagacacctgaagcagctcctctcagaccatgagctcaccaaaaagttatataagcgctatgccttcctgcgctgtgatgacgagaaggagcagttcctctatcacctcctgtctttcaatgccgtcgattacttttgcttcaccaatgtcttcacaactatcctgatcccgtaccacattctgatcgtaccaagcaagaagctggggggctccatgttcactgccaacccatggatctgtatatcaggagaattgggtgagacacagatcatgcagattcccaggaatgtgctagagatgaccttcgagtgccagaacttggggaagcttactactgtccagattggccatgataactctgggctgtatgccaaatggctggtggagtatgtgatggtcaggaatgagatcacaggacatacctacaagttcccgtgtggccggtggttagggaagggcatggatgatggaagcctggagcggatcctagttggggagctgctcacatcccagcctgaggtggatgagaggccatgccggaccccgccgctgcagcagtcccccagtgtcatccggaggcttgttaccatctcacccaacaacaagcccaagctgaacactgggcagatccaggagtccatcggggaggcagtcaatggcattgtgaagcacttccataagcctgagaaagagcgaggcagtctgacgctgttgctctgtggagagtgtggccttgtctcggccttggaacaggctttccagcatggatttaaatcgccccggctcttcaaaaatgtcttcatttgggatttcctggaaaaagcacaaacctattatgagacattagagaagaatgaagtagtccctgaggaaaactggcatacaagagcccggaacttctgccgatttgtcactgcaatcaacaatactccccggaacatcggcaaggatggcaagtttcagatgctggtgtgcttgggagccagagatcacctcctacaccactggattgccctgctggctgactgccccatcactgcacacatgtatgaggatgtggcactgatcaaagaccatacacttgtcaattccttgattcgtgtgctgcagacattgcaggagttcaacatcacgctggagacgtcccttgtcaagggcatcgacatctgacctcccagcaccagccagcagcaggactgagaaagactcaccctgcagctctgaccttttttcccaaagggacttaagcgattgtgcaggagtaggagacaaaatgtacactcactgtaaaaagaaaactagaggatttttggaataaatctacagctatgtagaaggattacactagccgaaatgccttttaccccccctttcacgtggcaaacggtggatggagacagagcgcaggacaggagccgcaaaatagagaagcgggaggccacccccgacggtgcccaaggtggaaacccgagggccccgagatgagccgtgcaccggggcggaaagctatgtacgtagcccggcaata

SEQ ID NO: 60507 - DNA, 1789 bp, Homo sapiens
tcgaaggtcatctctagcacattcctgggaatctgcatgatctgtgtctcacccaattctcctgatatacagatccatgggttgccagaacttggggaagcttactactgtccagattggccatgataactctgggctgtatgccaaatggctggtggagtatgtgatggtcaggaatgagatcacaggacatacctacaagttcccgtgtggccggtggttagggaagggcatggatgatggaagcctggagcggatcctagttggggagctgctcacatcccagcctgaggtggatgagaggccatgccggaccccgccgctgcagcagtcccccagtgtcatccggaggcttgttaccatctcacccaacaacaagcccaagctgaacactgggcagatccaggagtccatcggggaggcagtcaatggcattgtgaagcacttccataagcctgagaaagagcgaggcagtctgacgctgttgctctgtggagagtgtggccttgtctcggccttggaacaggctttccagcatggatttaaatcgccccggctcttcaaaaatgtcttcatttgggatttcctggaaaaagcacaaacctattatgagacattagagaagaatgaagtagtccctgaggaaaactggcatacaagagcccggaacttctgccgatttgtcactgcaatcaacaatactccccggaacatcggcaaggatggcaagtttcagatgctggtgtgcttgggagccagagatcacctcctacaccactggattgccctgctggctgactgccccatcactgcacacatgtatgaggatgtggcactgatcaaagaccatacacttgtcaattccttgattcgtgtgctgcagacattgcaggagttcaacatcacgctggagacgtcccttgtcaagggcatcgacatctgacctcccagcaccagccagcagcaggactgagaaagactcaccctgcagctctgaccttttttcccaaagggacttaagcgattgtgcaggagtaggagacaaaatgtacactcactgtaaaaagaaaactagaggatttttggaataaataatctattttagagtttatttgctgatttgctttttacacactttcatgtgaaagagtgatagggagagggagcgaggctggtgccgcttattttgaagctggtgccctccctcgccgtggccacatgctggaagcctgaggcctccctggactgagcctgtggcactgcgtgcgggacagttatgtttccttgccccgtcgcattaatgaggcccttccacatcatttttaaactaatgtttttctatattaacattattatggatatttggctttcataggccacacacaggtgtgctgcgcgggaagccccatgctccaatcaaagggatttttagtagtgcctctaagcaagcaccgatgagtcagtcccacgtattttcttttttgtcagtattgtttgggaaggagacatgccgggatgtgtcatcgtgccaaataccacatttcctgttggcacagtttcacagaagtaaacataagcatgttttaacaggtttttcttttcttttttcttttttaaaatgttttatttatttaacccgccattgtgtgtttttaagtattttctttttttaaggaaaggaaaagcttgtcacaatctaactggctatgttattattattaaatttatgttttgcaacttagaaaccagctacagtatggcccacttaataaaacacctgaaacaaaaa

SEQ ID NO: 60508 - DNA, 1877 bp, Homo sapiens
cgtcaatatttttcactgcatttttcacatcaacagagttgggtttagggttccccaggagagcaagggagatggatgggtccctcccaggggtgcgaggaagagggctacgtccagcatgtggggagtgagggacaagggcacagggcacacactcatacactgggcactggagaaggcagtcttttgagcacagacaccaaagagttaaacagtcaccacctggtacagtgttacaaaatggggagagtgaccacagcaggaatgagatcacaggacatacctacaagttcccgtgtggccggtggttagggaagggcatggatgatggaagcctggagcggatcctagttggggagctgctcacatcccagcctgaggtggatgagaggccatgccggaccccgccgctgcagcagtcccccagtgtcatccggaggcttgttaccatctcacccaacaacaagcccaagctgaacactgggcagatccaggagtccatcggggaggcagtcaatggcattgtgaagcacttccataagcctgagaaagagcgaggcagtctgacgctgttgctctgtggagagtgtggccttgtctcggccttggaacaggctttccagcatggatttaaatcgccccggctcttcaaaaatgtcttcatttgggatttcctggaaaaagcacaaacctattatgagacattagagaagaatgaagtagtccctgaggaaaactggcatacaagagcccggaacttctgccgatttgtcactgcaatcaacaatactccccggaacatcggcaaggatggcaagtttcagatgctggtgtgcttgggagccagagatcacctcctacaccactggattgccctgctggctgactgccccatcactgcacacatgtatgaggatgtggcactgatcaaagaccatacacttgtcaattccttgattcgtgtgctgcagacattgcaggagttcaacatcacgctggagacgtcccttgtcaagggcatcgacatctgacctcccagcaccagccagcagcaggactgagaaagactcaccctgcagctctgaccttttttcccaaagggacttaagcgattgtgcaggagtaggagacaaaatgtacactcactgtaaaaagaaaactagaggatttttggaataaataatctattttagagtttatttgctgatttgctttttacacactttcatgtgaaagagtgatagggagagggagcgaggctggtgccgcttattttgaagctggtgccctccctcgccgtggccacatgctggaagcctgaggcctccctggactgagcctgtggcactgcgtgcgggacagttatgtttccttgccccgtcgcattaatgaggcccttccacatcatttttaaactaatgtttttctatattaacattattatggatatttggctttcataggccacacacaggtgtgctgcgcgggaagccccatgctccaatcaaagggatttttagtagtgcctctaagcaagcaccgatgagtcagtcccacgtattttcttttttgtcagtattgtttgggaaggagacatgccgggatgtgtcatcgtgccaaataccacatttcctgttggcacagtttcacagaagtaaacataagcatgttttaacaggtttttcttttcttttttcttttttaaaatgttttatttatttaacccgccattgtgtgtttttaagtattttctttttttaaggaaaggaaaagcttgtcacaatctaactggctatgttattattattaaatttatgttttgcaacttagaaaccagctacagtatggcccacttaataaaacacctgaaacaaaaa

SEQ ID NO: 60509 - DNA, 1693 bp, Homo sapiens
taccctgttttccctccatactgatgacccaatagagtccctgggcccctagtgaacagtgcctattcctgtcctcttctagatttgcctgggtctccttgaatagtggccacactggctttgtcctccagtggagaatctccttgtgtgtgacccagatccatcatctcttctttcatccatttattcagcagctcttcactgggagctgctctgagccaggcactgtgccaggtgttagggaaacagacaaagtcctagcctgtcttttgcagccctcccaactctgggctgtgggtttagggatgcaatggtgggagggcagctcggctgagacaagcctggcaccctcccctgtttccttacgtagcgaggcagtctgacgctgttgctctgtggagagtgtggccttgtctcggccttggaacaggctttccagcatggatttaaatcgccccggctcttcaaaaatgtcttcatttgggatttcctggaaaaagcacaaacctattatgagacattagagaagaatgaagtagtccctgaggaaaactggcatacaagagcccggaacttctgccgatttgtcactgcaatcaacaatactccccggaacatcggcaaggatggcaagtttcagatgctggtgtgcttgggagccagagatcacctcctacaccactggattgccctgctggctgactgccccatcactgcacacatgtatgaggatgtggcactgatcaaagaccatacacttgtcaattccttgattcgtgtgctgcagacattgcaggagttcaacatcacgctggagacgtcccttgtcaagggcatcgacatctgacctcccagcaccagccagcagcaggactgagaaagactcaccctgcagctctgaccttttttcccaaagggacttaagcgattgtgcaggagtaggagacaaaatgtacactcactgtaaaaagaaaactagaggatttttggaataaataatctattttagagtttatttgctgatttgctttttacacactttcatgtgaaagagtgatagggagagggagcgaggctggtgccgcttattttgaagctggtgccctccctcgccgtggccacatgctggaagcctgaggcctccctggactgagcctgtggcactgcgtgcgggacagttatgtttccttgccccgtcgcattaatgaggcccttccacatcatttttaaactaatgtttttctatattaacattattatggatatttggctttcataggccacacacaggtgtgctgcgcgggaagccccatgctccaatcaaagggatttttagtagtgcctctaagcaagcaccgatgagtcagtcccacgtattttcttttttgtcagtattgtttgggaaggagacatgccgggatgtgtcatcgtgccaaataccacatttcctgttggcacagtttcacagaagtaaacataagcatgttttaacaggtttttcttttcttttttcttttttaaaatgttttatttatttaacccgccattgtgtgtttttaagtattttctttttttaaggaaaggaaaagcttgtcacaatctaactggctatgttattattattaaatttatgttttgcaacttagaaaccagctacagtatggcccacttaataaaacacctgaaacaaaaa

SEQ ID NO: 60510 - DNA, 3716 bp, Homo sapiens
  misc_feature (10)..(10): n is a, c, g, or t
  misc_feature (12)..(13): n is a, c, g, or t
  misc_feature (16)..(16): n is a, c, g, or t
  misc_feature (18)..(19): n is a, c, g, or t
  misc_feature (22)..(22): n is a, c, g, or t
  misc_feature (37)..(37): n is a, c, g, or t
aaggcatccngnntcngnnggncggcccgtgcccccncgccccgtcacggcaccgcggcggccgaggggaccggccagggccgggggcggcggcccgagccgcggtagcggcggcggcgggaggggcggcctgagggcggacgggcgggcgcccgggttgcgggggctcggtgccgctccgcactgcccggccggtctcggccccggcgccatgagtggcggcggcggcggagggggctcggcgcccagtcgcttcgccgactactttgtcatctgcggactggacacggagaccgggctggagccggacgagctgtcggcattatgccagtacatacaggcttctaaagccagggatggtgccagccctttcatttcaagtacgactgaaggagaaaattttgagcagacaccattgagaagaacattcaaatctaaggtccttgcacgatatcctgagaacgtagaatggaatccctttgaccaagatgcagtaggaatgctatgtatgccgaaagggctggcattcaagacccaggctgatcccagggagccccaattccatgcctttattatcacaagggaggatggctctcggacatttgggtttgccctcacattttatgaagaggtgactagcaagcagatctgcagtgcaatgcagaccctctaccacatgcacaatgctgagtatgatgtcctacatgctccccctgctgatgacagagaccagagcagcatggaggatggtgaagacactcctgtgaccaaactgcagcgcttcaactcctatgacattagccgggacactctctacgtctctaagtgcatctgcctcatcacacccatgtctttcatgaaggcatgtcggagcgtgctggagcaactccaccaggcagtcacttcacctcagccccctccactgccccttgagagctacatatacaacgtactctacgaggtgccgctcccacctcctggccggtccttgaagttttctggggtctatgggccaataatctgccagagaccaagtaccaatgagcttcccctatttgactttcctgtcaaagaggtttttgaactgctcggggtggagaatgtgtttcagctttttacttgtgcccttctggagtttcaaatcctgctctactcacagcattaccagagactgatgactgtggcggagacgattacagctctcatgtttcctttccagtggcagcatgtctatgtccctattctcccagcttctctcctgcatttcttagatgctcctgttccatacctgatgggtttgcattccaatggcctggatgaccggtcaaagctggagctgcctcaagaggctaacctctgctttgtggacattgacaaccacttcattgagttgccagaggacttgccacagttccccaacaaattggagtttgtccaggaagtctctgagattctcatggcatttggaattccccctgaagggaatcttcattgcagtgagagtgcctccaagctgaagaggctgcgggcctctgagcttgtctcggacaagaggaatgggaacattgctggctcccctttgcattcctacgagcttcttaaggagaatgaaactattgcccggctgcaagccttggtcaagagaactggggtgagcctggaaaagttggaagtgcgtgaagaccccagcagcaataaggatctcaaagttcagtgtgatgaagaagaactcaggatttaccagctaaacattcagatccgggaagtttttgcaaatcgtttcactcagatgtttgcagattatgaggtgtttgtcatccaacccagccaggataaggaatcctggtttaccaacagggagcaaatgcaaaactttgataaagcatcttttctgtcagatcagcctgagccctacctgcccttcctctcaagattcctggagacccagatgtttgcatctttcattgacaacaaaataatgtgtcatgatgatgatgataaagaccctgtactccgggtatttgattcccgagttgacaagatcaggctgttgaatgttcggacacctactctccgtacatccatgtaccagaagtgtaccactgtggatgaagcagagaaagcaattgagctgcgtctggcaaaaattgaccatactgcaattcacccacatttacttgacatgaagattggacaagggaaatatgagccgggcttcttccctaagctgcagtctgatgtactttccactgggccagccagcaacaagtggacgaaaaggaatgcccctgcccagtggaggcggaaagatcggcagaagcagcacacagaacacctgcgtttagataatgaccagagggagaagtacatccaggaagccaggactatgggcagcactatccgccagcccaaactgtccaacctctctccatcagtgattgcccagaccaattggaagtttgtagagggcctgctgaaggaatgccgcaataagaccaagaggatgctggtggaaaagatgggccgagaagctgtggagctagggcatggggaggtgaacatcacaggggtggaagagaacaccctgattgccagcctttgtgatctcctggaaaggatctggagtcatggactacaagtgaaacaggggaaatcagccttatggtcccacctgttacattatcaggacaaccggcagagaaaactcacatcaggaagcctcagtacctcaggaatacttcttgattcagaacgtaggaagtctgatgccagctcactcatgcctcccctgaggatctccctgattcaggatatgaggcacatccagaacatcggggaaatcaagactgatgtgggaaaggccagagcatgggtgcgactgtccatggaaaaaaagttactttccagacacctgaagcagctcctctcagaccatgagctcaccaaaaagttatataagcgctatgccttcctgcgctgtgatgacgagaaggagcagttcctctatcacctcctgtctttcaatgccgtcgattacttttgcttcaccaatgtcttcacaactatcctgatcccgtaccacattctgatcgtaccaagcaagaagctggggggctccatgttcactgccaacccatggatctgtatatcaggagaattgggtgagacacagatcatgcagattcccaggaatgtgctagagatgaccttcgagtgccagaacttggggaagcttactactgtccagattggccatgataactctgggctgtatgccaaatggctggtggagtatgtgatggtcaggaatgagatcacaggacatacctacaagttcccgtgtggccggtggttagggaagggcatggatgatggaagcctggagcggatcctagttggggagctgctcacatcccagcctgaggtggatgagaggccatgccggaccccgccgctgcagcagtcccccagtgtcatccggaggcttgttaccatctcacccaacaacaagcccaagctgaacactgggcagatccaggagtccatcggggaggcagtcaatggcattgtgaagcacttccataagcctgagaaagaggtgagccttcctgccctccaatccagggccttacattgaataagagagaataattttgtttttccgattatcttgttatgctcttccaggcccatgtgctgtggacaccctagagtct

SEQ ID NO: 60511 - DNA, 2572 bp, Homo sapiens
  misc_feature (10)..(10): n is a, c, g, or t
  misc_feature (12)..(13): n is a, c, g, or t
  misc_feature (16)..(16): n is a, c, g, or t
  misc_feature (18)..(19): n is a, c, g, or t
  misc_feature (22)..(22): n is a, c, g, or t
  misc_feature (37)..(37): n is a, c, g, or t
aaggcatccngnntcngnnggncggcccgtgcccccncgccccgtcacggcaccgcggcggccgaggggaccggccagggccgggggcggcggcccgagccgcggtagcggcggcggcgggaggggcggcctgagggcggacgggcgggcgcccgggttgcgggggctcggtgccgctccgcactgcccggccggtctcggccccggcgccatgagtggcggcggcggcggagggggctcggcgcccagtcgcttcgccgactactttgtcatctgcggactggacacggagaccgggctggagccggacgagctgtcggcattatgccagtacatacaggcttctaaagccagggatggtgccagccctttcatttcaagtacgactgaaggagaaaattttgagcagacaccattgagaagaacattcaaatctaaggtccttgcacgatatcctgagaacgtagaatggaatccctttgaccaagatgcagtaggaatgctatgtatgccgaaagggctggcattcaagacccaggctgatcccagggagccccaattccatgcctttattatcacaagggaggatggctctcggacatttgggtttgccctcacattttatgaagaggtgactagcaagcagatctgcagtgcaatgcagaccctctaccacatgcacaatgctgagtatgatgtcctacatgctccccctgctgatgacagagaccagagcagcatggaggatggtgaagacactcctgtgaccaaactgcagcgcttcaactcctatgacattagccgggacactctctacgtctctaagtgcatctgcctcatcacacccatgtctttcatgaaggcatgtcggagcgtgctggagcaactccaccaggcagtcacttcacctcagccccctccactgccccttgagagctacatatacaacgtactctacgaggtgccgctcccacctcctggccggtccttgaagttttctggggtctatgggccaataatctgccagagaccaagtaccaatgagcttcccctatttgactttcctgtcaaagaggtttttgaactgctcggggtggagaatgtgtttcagctttttacttgtgcccttctggagtttcaaatcctgctctactcacagcattaccagagactgatgactgtggcggagacgattacagctctcatgtttcctttccagtggcagcatgtctatgtccctattctcccagcttctctcctgcatttcttagatgctcctgttccatacctgatgggtttgcattccaatggcctggatgaccggtcaaagctggagctgcctcaagaggctaacctctgctttgtggacattgacaaccacttcattgagttgccagaggacttgccacagttccccaacaaattggagtttgtccaggaagtctctgagattctcatggcatttggaattccccctgaagggaatcttcattgcagtgagagtgcctccaagctgaagaggctgcgggcctctgagcttgtctcggacaagaggaatgggaacattgctggctcccctttgcattcctacgagcttcttaaggagaatgaaactattgcccggctgcaagccttggtcaagagaactggggtgagcctggaaaagttggaagtgcgtgaagaccccagcagcaataaggatctcaaagttcagtgtgatgaagaagaactcaggatttaccagctaaacattcagatccgggaagtttttgcaaatcgtttcactcagatgtttgcagattatgaggtgtttgtcatccaacccagccaggataaggaatcctggtttaccaacagggagcaaatgcaaaactttgataaagcatcttttctgtcagatcagcctgagccctacctgcccttcctctcaagattcctggagacccagatgtttgcatctttcattgacaacaaaataatgtgtcatgatgatgatgataaagaccctgtactccgggtatttgattcccgagttgacaagatcaggctgttgaatgttcggacacctactctccgtacatccatgtaccagaagtgtaccactgtggatgaagcagtctgtatatgtgttcgtctacttctggattctctgttctgtttcattgatctgttggtctacatttataccaataccacactgtcttgattactgtagcttacattaaatgattactgtagcttatattaaatcttgaaatcaagtagtgttaatcttgtaactttgttcttttcaaagttgttttggctattctgggttctttgtatttccatacatatttagagtcaacttgccaacttctgcaaagaaacctttcaagattttgattgatatttgacatcctaacagtaccgagtcttctgatccattaacatggcatatctttccatttatttaggtcatctttaatttttctcaacagcattatgtacttttcagggtacaggttttatatgtcttatcagatttttccctaagtagttcatattttttggtgttattttaaattgtttt

SEQ ID NO: 60512 - DNA, 2321 bp, Homo sapiens
  misc_feature (10)..(10): n is a, c, g, or t
  misc_feature (12)..(13): n is a, c, g, or t
  misc_feature (16)..(16): n is a, c, g, or t
  misc_feature (18)..(19): n is a, c, g, or t
  misc_feature (22)..(22): n is a, c, g, or t
  misc_feature (37)..(37): n is a, c, g, or t
aaggcatccngnntcngnnggncggcccgtgcccccncgccccgtcacggcaccgcggcggccgaggggaccggccagggccgggggcggcggcccgagccgcggtagcggcggcggcgggaggggcggcctgagggcggacgggcgggcgcccgggttgcgggggctcggtgccgctccgcactgcccggccggtctcggccccggcgccatgagtggcggcggcggcggagggggctcggcgcccagtcgcttcgccgactactttgtcatctgcggactggacacggagaccgggctggagccggacgagctgtcggcattatgccagtacatacaggcttctaaagccagggatggtgccagccctttcatttcaagtacgactgaaggagaaaattttgagcagacaccattgagaagaacattcaaatctaaggtccttgcacgatatcctgagaacgtagaatggaatccctttgaccaagatgcagtaggaatgctatgtatgccgaaagggctggcattcaagacccaggctgatcccagggagccccaattccatgcctttattatcacaagggaggatggctctcggacatttgggtttgccctcacattttatgaagaggtgactagcaagcagatctgcagtgcaatgcagaccctctaccacatgcacaatgctgagtatgatgtcctacatgctccccctgctgatgacagagaccagagcagcatggaggatggtgaagacactcctgtgaccaaactgcagcgcttcaactcctatgacattagccgggacactctctacgtctctaagtgcatctgcctcatcacacccatgtctttcatgaaggcatgtcggagcgtgctggagcaactccaccaggcagtcacttcacctcagccccctccactgccccttgagagctacatatacaacgtactctacgaggtgccgctcccacctcctggccggtccttgaagttttctggggtctatgggccaataatctgccagagaccaagtaccaatgagcttcccctatttgactttcctgtcaaagaggtttttgaactgctcggggtggagaatgtgtttcagctttttacttgtgcccttctggagtttcaaatcctgctctactcacagcattaccagagactgatgactgtggcggagacgattacagctctcatgtttcctttccagtggcagcatgtctatgtccctattctcccagcttctctcctgcatttcttagatgctcctgttccatacctgatgggtttgcattccaatggcctggatgaccggtcaaagctggagctgcctcaagaggctaacctctgctttgtggacattgacaaccacttcattgagttgccagaggacttgccacagttccccaacaaattggagtttgtccaggaagtctctgagattctcatggcatttggaattccccctgaagggaatcttcattgcagtgagagtgcctccaagctgaagaggctgcgggcctctgagcttgtctcggacaagaggaatgggaacattgctggctcccctttgcattcctacgagcttcttaaggagaatgaaactattgcccggctgcaagccttggtcaagagaactggggtgagcctggaaaagttggaagtgcgtgaagaccccagcagcaataaggatctcaaagttcagtgtgatgaagaagaactcaggatttaccagctaaacattcagatccgggaagtttttgcaaatcgtttcactcagatgtttgcagattatgaggtgtttgtcatccaacccagccaggataaggaatcctggtttaccaacagggagcaaatgcaaaactttgataaagcatcttttctgtcagatcagcctgagccctacctgcccttcctctcaagattcctggagacccagatgtttgcatctttcattgacaacaaaataatgtgtcatgatgatgatgataaagaccctgtactccgggtatttgattcccgagttgacaagatcaggctgttgaatgttcggacacctactctccgtacatccatgtaccagaagtgtaccactgtggatgaagcaggtaaggcctccttggaaatgtacattcaggcctcttggattatggcattaacatgtcccttttcctaaatatgccagcctctttatctgtttctgcctttgtgtatgtggttcccattgcctgcagtcttcttccttgttttctttttgcctggttatcttcttctcatcctttaacactgttagttaggaatggatctcattg

SEQ ID NO: 60513 - DNA, 2543 bp, Homo sapiens
  misc_feature (10)..(10): n is a, c, g, or t
  misc_feature (12)..(13): n is a, c, g, or t
  misc_feature (16)..(16): n is a, c, g, or t
  misc_feature (18)..(19): n is a, c, g, or t
  misc_feature (22)..(22): n is a, c, g, or t
  misc_feature (37)..(37): n is a, c, g, or t
aaggcatccngnntcngnnggncggcccgtgcccccncgccccgtcacggcaccgcggcggccgaggggaccggccagggccgggggcggcggcccgagccgcggtagcggcggcggcgggaggggcggcctgagggcggacgggcgggcgcccgggttgcgggggctcggtgccgctccgcactgcccggccggtctcggccccggcgccatgagtggcggcggcggcggagggggctcggcgcccagtcgcttcgccgactactttgtcatctgcggactggacacggagaccgggctggagccggacgagctgtcggcattatgccagtacatacaggcttctaaagccagggatggtgccagccctttcatttcaagtacgactgaaggagaaaattttgagcagacaccattgagaagaacattcaaatctaaggtccttgcacgatatcctgagaacgtagaatggaatccctttgaccaagatgcagtaggaatgctatgtatgccgaaagggctggcattcaagacccaggctgatcccagggagccccaattccatgcctttattatcacaagggaggatggctctcggacatttgggtttgccctcacattttatgaagaggtgactagcaagcagatctgcagtgcaatgcagaccctctaccacatgcacaatgctgagtatgatgtcctacatgctccccctgctgatgacagagaccagagcagcatggaggatggtgaagacactcctgtgaccaaactgcagcgcttcaactcctatgacattagccgggacactctctacgtctctaagtgcatctgcctcatcacacccatgtctttcatgaaggcatgtcggagcgtgctggagcaactccaccaggcagtcacttcacctcagccccctccactgccccttgagagctacatatacaacgtactctacgaggtgccgctcccacctcctggccggtccttgaagttttctggggtctatgggccaataatctgccagagaccaagtaccaatgagcttcccctatttgactttcctgtcaaagaggtttttgaactgctcggggtggagaatgtgtttcagctttttacttgtgcccttctggagtttcaaatcctgctctactcacagcgtaagtcagtgcttactagagccttctgcctgcctcaggcttctttgctttccatgttcagatacagtgaggctgactgtaaaggttaagagctattacagtttgagcaaaacccagatcttttgcaggtaggtggtggatggcaaattgatagacatgagagggccagtatttctgattaactatcttcatggccttttgctgggcattccagtcttggaggggaacattgcttcctatgtcccttctgattgaagtgaaaagaggggtgggtaggaggtgatggtcacaggaagctgactttccatcagttctgttctgtcattctgcagagttatttctgcctcttcctcagcctagtaaaattgaggattcacaaaggataatcctttatatattgagaaaatgtggatgtgttgcatctttttgttgtttgcttaactgaattgttttcataaatgggaggttgagtgtaagcagcatatttggacaaaatagtaaagtagattagaaagaaacagatgcttacttaatgagccaggctagtaacatgaaattcattcattcagtacatatttactgagagtgcactatgtgtcaggcattgtttcaagggtagtggtggacaagacagaaaaattgttgctatagtggaacttaaattttagtgggagaagagaggtgattaaataaatatataaaatatgtagtttgtaaggtacttaataagggttataaagaaaaataaaacagggaaagggatagtatttggggaagagaagttccagtttgtaatagggtggttaggtaggcatccctgagtgacctgttaatatctgtaggaaaagtattccaggcaaagggcacaggaagtataaacggtctaagacaagaatgtgcttcgtgtattcaagaaccagaagctgggtggatggaatggagtgaatgagcgggagtatagtaggagatggtgttagagacttaactggaggccagatggtatagaatcttgtaggccattgtaaggactttggcttttactcttaaatggctcttagatagccatcagagttttcaattttttttactttttattttaaaataatttctagctacggaagattcgcgaggggtattcaaaggactcttgtataacctatcccaaattcaccaattgttaacattttgccacatttgctttattatgatctctgtgtgtgaacataactgaaccattgagagttattgtgactcctaaattctcatgtgtttatttcctaagaataaaaacattctcttaaataactatcattgatcaaatttggaaaacctaacattgagacaatactatattaaagtttctctggtacccgataatgtctg

SEQ ID NO: 60514 - DNA, 1906 bp, Homo sapiens
  misc_feature (10)..(10): n is a, c, g, or t
  misc_feature (12)..(13): n is a, c, g, or t
  misc_feature (16)..(16): n is a, c, g, or t
  misc_feature (18)..(19): n is a, c, g, or t
  misc_feature (22)..(22): n is a, c, g, or t
  misc_feature (37)..(37): n is a, c, g, or t
  misc_feature (1894)..(1894): n is a, c, g, or t
aaggcatccngnntcngnnggncggcccgtgcccccncgccccgtcacggcaccgcggcggccgaggggaccggccagggccgggggcggcggcccgagccgcggtagcggcggcggcgggaggggcggcctgagggcggacgggcgggcgcccgggttgcgggggctcggtgccgctccgcactgcccggccggtctcggccccggcgccatgagtggcggcggcggcggagggggctcggcgcccagtcgcttcgccgactactttgtcatctgcggactggacacggagaccgggctggagccggacgagctgtcggcattatgccagtacatacaggcttctaaagccagggatggtgccagccctttcatttcaagtacgactgaaggagaaaattttgagcagacaccattgagaagaacattcaaatctaaggtccttgcacgatatcctgagaacgtagaatggaatccctttgaccaagatgcagtaggaatgctatgtatgccgaaagggctggcattcaagacccaggctgatcccagggagccccaattccatgcctttattatcacaagggaggatggctctcggacatttgggtttgccctcacattttatgaagaggtgactagcaagcagatctgcagtgcaatgcagaccctctaccacatgcacaatgctgagtatgatgtcctacatgctccccctgctgatgacagagaccagagcagcatggaggatggtgaagacactcctgtgaccaaactgcagcgcttcaactcctatgacattagccgggacactctctacgtctctaagtgcatctgcctcatcacacccatgtctttcatgaaggcatgtcggagcgtgctggagcaactccaccaggcagtcacttcacctcagccccctccactgccccttgagagctacatatacaacgtactctacgaggtgccgctcccacctcctggccggtccttgaagttttctggggtctatgggccaataatctgccagagaccaagtaccaatgagcttcccctatttgactttcctgtcaaagaggtttttgaactgctcggggtggagaatgtgtttcagctttttacttgtgcccttctggagtttcaaatcctgctctactcacagcattaccagagactgatgactgtggcggagacgattacagctctcatgtttcctttccagtggcagcatgtctatgtccctattctcccagcttctctcctgcatttcttagatgctcctgttccatacctgatgggtttgcattccaatggcctggatgaccggtcaaagctggagctgcctcaagaggctaacctctgctttgtggacattgacaaccacttcattgagttgccagaggacttgccacagttccccaacaaattggagtttgtccaggaagtctctgagattctcatggcatttggaattccccctgaagggaatcttcattgcagtgagagtgcctccaagctgaagaggctgcgggcctctgagcttgtctcggacaagaggaatgggaacattgctggctcccctttgcattcctacgagcttcttaaggagaatgaaactattgcccggctgcaagccttggtcaagagaactggggtgagcctggaaaagttggaagtgcgtgaagaccccagcagcaataaggatctcaaagttcagtgtgatgaagaagaactcaggatttaccagctaaacattcagatccgggaagtttttgcaaatcgtttcactcagatgtttgcagattatgaggtgtttgtcatccaacccagccaggataaggaatcctggtttaccaacagggagcggcacatgcgttgggggtcctctagatcgacngcaggcagcaag

SEQ ID NO: 60515 - DNA, 2102 bp, Homo sapiens
  misc_feature (10)..(10): n is a, c, g, or t
  misc_feature (12)..(13): n is a, c, g, or t
  misc_feature (16)..(16): n is a, c, g, or t
  misc_feature (18)..(19): n is a, c, g, or t
  misc_feature (22)..(22): n is a, c, g, or t
  misc_feature (37)..(37): n is a, c, g, or t
aaggcatccngnntcngnnggncggcccgtgcccccncgccccgtcacggcaccgcggcggccgaggggaccggccagggccgggggcggcggcccgagccgcggtagcggcggcggcgggaggggcggcctgagggcggacgggcgggcgcccgggttgcgggggctcggtgccgctccgcactgcccggccggtctcggccccggcgccatgagtggcggcggcggcggagggggctcggcgcccagtcgcttcgccgactactttgtcatctgcggactggacacggagaccgggctggagccggacgagctgtcggcattatgccagtacatacaggcttctaaagccagggatggtgccagccctttcatttcaagtacgactgaaggagaaaattttgagcagacaccattgagaagaacattcaaatctaaggtccttgcacgatatcctgagaacgtagaatggaatccctttgaccaagatgcagtaggaatgctatgtatgccgaaagggctggcattcaagacccaggctgatcccagggagccccaattccatgcctttattatcacaagggaggatggctctcggacatttgggtttgccctcacattttatgaagaggtgactagcaagcagatctgcagtgcaatgcagaccctctaccacatgcacaatgctgagtatgatgtcctacatgctccccctgctgatgacagagaccagagcagcatggaggatggtgaagacactcctgtgaccaaactgcagcgcttcaactcctatgacattagccgggacactctctacgtctctaagtgcatctgcctcatcacacccatgtctttcatgaaggcatgtcggagcgtgctggagcaactccaccaggcagtcacttcacctcagccccctccactgccccttgagagctacatatacaacgtactctacgaggtgccgctcccacctcctggccggtccttgaagttttctggggtctatgggccaataatctgccagagaccaagtaccaatgagcttcccctatttgactttcctgtcaaagaggtttttgaactgctcggggtggagaatgtgtttcagctttttacttgtgcccttctggagtttcaaatcctgctctactcacagcattaccagagactgatgactgtggcggagacgattacagctctcatgtttcctttccagtggcagcatgtctatgtccctattctcccagcttctctcctgcatttcttagatgctcctgttccatacctgatgggtttgcattccaatggcctggatgaccggtcaaagctggagctgcctcaagaggctaacctctgctttgtggacattgacaaccacttcattgagttgccagaggacttgccacagttccccaacaaattggagtttgtccaggaagtctctgagattctcatggcatttggaattccccctgaagggaatcttcattgcagtgagagtgcctccaagctgaagaggctgcgggcctctgagcttgtctcggacaagaggaatgggaacattgctggctcccctttgcattcctacgagcttcttaaggagaatgaaactattgcccggctgcaagccttggtcaagagaactggggtgagcctggaaaagttggaagtgcgtgaagaccccagcagcaataaggatctcaaagttcagtgtgatgaagaagaactcaggatttaccagctaaacattcagatccgggaagtttttgcaaatcgtttcactcagatgtttgcagattatgaggtgtttgtcatccaacccagccaggataaggaatcctggtttaccaacagggagcaaatgcaaaactttgataaagcatcttttctgtcagatcagcctgagccctacctgcccttcctctcaagattcctggagacccagatgtttgcatctttcattgacaacaaaataatgtgtcatgatgatgatgataaagaccctgtactccgggtatttgattcccgagttgacaagatcaggctgcacgcttagaggaacgaagcccgtgctcatactttccgcttgtccaaatctt

SEQ ID NO: 60516 - DNA, 251 bp, Homo sapiens
cagatgctggtgtgcttgggagccaggtactgcagacccagggcccagagtgcacagcggttagccttggtggtggtgttggaggcctggtgcagtgcaggggtgaggaatggctcatcaggtgcccttagggagatgaggccttagaaggtttcctagaagccctgaatttcctctgtgtatcgtgtatggtcacacactgcataaaatgtgctgcgtaacaacatttgtcagtgacggactgtttatgg

SEQ ID NO: 60517 - DNA, 449 bp, Homo sapiens
tttgtgtatttttagtagagacagggtttcaccatgttggccaggctggaatcgaactcctgacctcaagtgatctgcccgcctcggcttcctgaagtgttgggattacaggtgtgagccaccgtgcccagctgcttttttctttcttatccactggtcccttaccaggctctctttcccatctcctttctattcccagtaggggaccctttcctttttctgttaccttccattgtttatatttcttctggattttagtaaattgatatatttgcatacactgtgtcctggatgtacattgaaacaagaaacagtacatatatttttttagcaaaagcttctatctgtatgttgaaagccttgacccctgaaatctaaactgataggtgtttctcccttgcattggttccaggggaaatcagccttatggtcccacctgttacattatc

SEQ ID NO: 60518 - DNA, 226 bp, Homo sapiens
gggaagcttactactgtccagattggccatgataactctgggctgtatgccaaatggctggtggagtatgtgatggtcaggaatgagatcacaggacatacctacaagtaagtatacctcaggctgtaaggtagaggggcaaggtgtatctacaggagctcttcgatgcttgggtatgtggagttcccaaggagaccctttaggttgtgataacctgaggcaactt

SEQ ID NO: 60519 - DNA, 3519 bp, Homo sapiens
ggagaaaacgtctgactccagccaccggccttcaaggcacggctttttattccttcggctggtcggcctctcgcccttcagctacctgtgcgtccctccgtcccgtcccgtcccggggtcaccccggagcctgtccgctatgcggctcctgcctctagccccaggtcggctccggcggggcagcccccgccacctgccctcctgcagcccagcgctgctactgctggtgctgggcggctgcctgggggtcttcggggtggctgcgggaacccggaggcccaacgtggtgctgctcctcacggacgaccaggacgaagtgctcggcggcatgacaccactaaagaaaaccaaagctctcatcggagagatggggatgactttttccagtgcttatgtgccaagtgctctctgctgccccagcagagccagtatcctgacaggaaagtacccacataatcatcacgttgtgaacaacactctggaggggaactgcagtagtaagtcctggcagaagatccaagaaccaaatactttcccagcaattctcagatcaatgtgtggttatcagaccttttttgcagggaaatatttaaatgagtacggagccccagatgcaggtggactagaacacgttcctctgggttggagttactggtatgccttggaaaagaattctaagtattataattacaccctgtctatcaatgggaaggcacggaagcatggtgaaaactatagtgtggactacctgacagatgttttggctaatgtctccttggactttctggactacaagtccaactttgagcccttcttcatgatgatcgccactccagcgcctcattcgccttggacagctgcacctcagtaccagaaggctttccagaatgtctttgcaccaagaaacaagaacttcaacatccatggaacgaacaagcactggttaattaggcaagccaagactccaatgactaattcttcaatacagtttttagataatgcatttaggaaaaggtggcaaactctcctctcagttgatgaccttgtggagaaactggtcaagaggctggagttcactggggagctcaacaacacttacatcttctatacctcagacaatggctatcacacaggacagttttccttgccaatagacaagagacagctgtatgagtttgatatcaaagttccactgttggttcgaggacctgggatcaaaccaaatcagacaagcaagatgctggttgccaacattgacttgggtcctactattttggacattgctggctacgacctaaataagacacagatggatgggatgtccttattgcccattttgagaggtgccagtaacttgacctggcgatcagatgtcctggtggaataccaaggagaaggccgtaacgtcactgacccaacatgcccttccctgagtcctggcgtatctcaatgcttcccagactgtgtatgtgaagatgcttataacaatacctatgcctgtgtgaggacaatgtcagcattgtggaatttgcagtattgcgagtttgatgaccaggaggtgtttgtagaagtctataatctgactgcagacccagaccagatcactaacattgctaaaaccatagacccagagcttttaggaaagatgaactatcggttaatgatgttacagtcctgttctgggccaacctgtcgcactccaggggtttttgaccccggatacaggtttgacccccgtctcatgttcagcaatcgcggcagtgtcaggactcgaagattttccaaacatcttctgtagcgacctcacacagcctctgcagatggatccctgcacgcctctttctgatgaagtgattgtagtaggtgtctgtagctagtcttcaagaccacacctggaagagtttctgggctggctttaagtcctgtttgaaaaagcaacccagtcagctgacttcctcgtgcaatgtgttaaactgtgaactctgcccatgtgtcaggagtggctgtctctggtctcttcctttagctgacaaggacactcctgaggtctttgttctcactgtattttttttatcctggggccacagttcttgattattcctcttgtggttaaagactgaatttgtaaacccattcagataaatggcagtactttaggacacacacaaacacacagatacaccttttgatatgtaagcttgacctaaagtcaaaggacctgtgtagcatttcagattgagcacttcactatcaaaaatactaacatcacatggcttgaagagtaaccatcagagctgaatcatccaagtaagaacaagtaccattgttgattgataagtagagatacattttttatgatgttcatcacagtgtggtaaggttgcaaattcaaaacatgtcacccaagctctgttcatgtttttgtgaattctaggctggtgctgcactgaaatagagcagtaagcttgtgataaaggccaattccaggtagctcttgaaggtgatagccatctactttccagtggctgccaaccacagggagtgccagttaacactggaaggattaaggcaaggtcccttctcttgagactcccctctgagatctgaaaaatgaagtggcttaggaacatcagcagtgaagaactgccaagagttggtgaaggttgtctcttccgagggccttctgaagacagggctcttgaacagacaagtggaagggctgtaccagggataaaggaaagaagtgcctgtccagcagggagcttgaatttaagttccatgtatgaagtcattggctctatctgcatttttctgtcattctcttcatttgttttaaggtggaaaattttcttacagttgatgcaaagtatcaactactttaccctaccttctccccttttagatgggttcttcctgagttttggagtcttgtatgattatcagtattcccctgtcaaaatcaaatctattcaggtttcttcactgttgagaacacctaaatgtttttatttttgagaagtggggacagagtctcactatgtcacccaggctggagtgcaatggcatgatctcagctcactgcaaccttcgcctcctgggttcaagcgattctcctgcctccgcctcctgagtagctgggattataggcacacaccaccacgcccagctaattttttgtatttttagtagagacagagtttcaccatgttggccaggctggtcttgaactcctgaccttgtgatccacccacctcggcctcccagagtgctgggattacaggcatgagccaccacgcttggctaagaacacctaaatttttatgtttcttggctcaaaaaccagttccatttctaatgttgtcctcacaagaaggctaattggtggtgagacagcaggggaggaggaagagctgtggtttgtaacttgttcaactcaggcaataagcgatttagctttatttaaagtcttctgtccagctttaagcactttgtaagacatggctgaaagtagcttttcta

SEQ ID NO: 60520 - DNA, 1729 bp, Homo sapiens
agggcggcgcttaagattgtacattactggtcccgtcgttttacaatttaaactgatgaagtgattgtagtaggtgtctgtagctagtcttcaagaccacacctggaagagtttctgggctggctttaagtcctgtttgaaaaagcaacccagtcagctgacttcctcgtgcaatgtgttaaactgtgaactctgcccatgtgtcaggagtggctgtctctggtctcttcctttagctgacaaggacactcctgaggtctttgttctcactgtattttttttatcctggggccacagttcttgattattcctcttgtggttaaagactgaatttgtaaacccattcagataaatggcagtactttaggacacacacaaacacacagatacaccttttgatatgtaagcttgacctaaagtcaaaggacctgtgtagcatttcagattgagcacttcactatcaaaaatactaacatcacatggcttgaagagtaaccatcagagctgaatcatccaagtaagaacaagtaccattgttgattgataagtagagatacattttttatgatgttcatcacagtgtggtaaggttgcaaattcaaaacatgtcacccaagctctgttcatgtttttgtgaattctaggctggtgctgcactgaaatagagcagtaagcttgtgataaaggccaattccaggtagctcttgaaggtgatagccatctactttccagtggctgccaaccacagggagtgccagttaacactggaaggattaaggcaaggtcccttctcttgagactcccctctgagatctgaaaaatgaagtggcttaggaacatcagcagtgaagaactgccaagagttggtgaaggttgtctcttccgagggccttctgaagacagggctcttgaacagacaagtggaagggctgtaccagggataaaggaaagaagtgcctgtccagcagggagcttgaatttaagttccatgtatgaagtcattggctctatctgcatttttctgtcattctcttcatttgttttaaggtggaaaattttcttacagttgatgcaaagtatcaactactttaccctaccttctccccttttagatgggttcttcctgagttttggagtcttgtatgattatcagtattcccctgtcaaaatcaaatctattcaggtttcttcactgttgagaacacctaaatgtttttatttttgagaagtggggacagagtctcactatgtcacccaggctggagtgcaatggcatgatctcagctcactgcaaccttcgcctcctgggttcaagcgattctcctgcctccgcctcctgagtagctgggattataggcacacaccaccacgcccagctaattttttgtatttttagtagagacagagtttcaccatgttggccaggctggtcttgaactcctgaccttgtgatccacccacctcggcctcccagagtgctgggattacaggcatgagccaccacgcttggctaagaacacctaaatttttatgtttcttggctcaaaaaccagttccatttctaatgttgtcctcacaagaaggctaattggtggtgagacagcaggggaggaggaagagctgtggtttgtaacttgttcaactcaggcaataagcgatttagctttatttaaagtcttctgtccagctttaagcactttgtaagacatggctgaaagtagcttttcta

SEQ ID NO: 60521 - DNA, 443 bp, Homo sapiens
ggaatgtgcagtagcagaaggaatcacgtatataacatgttttcaggtagctcacagacaaatgaaaaaagctacctttctgtgtatacacagaaaaaccaacatcataccacttttgaagacctttttaaatagcgcagaatatacgcagtagcagctgaatgtgtatgtgggagaaaacgcgagaaaaaatggtctgtgccagtgtaccaaatacccgcagtttgctgaagatctttaaattttctgtccatctttctgcagccttatcctgaacatatgttctctccataaactcatttggccaaggaactatatagctacttgaaaaatatttgtcccacaggtgataagtgatgtattctcctttcaattaataagcaaatagaacatcataatcctcttttaacctcccatccctaatcctggtccctttcctcctt

SEQ ID NO: 60522 - DNA, 337 bp, Homo sapiens
ataactacaacattttaagacatagtgtaataagatataagtagaaacatcagaaggttaaaaagcaggggatgggctgggcacggtggctcacgcctttaatcccagcactttgggaggccaaggtgggcaaatcacgaggtcaagagatcaagaccatcctggccaacatggtgaaacctcatctctactaaaaatataaaaatcagctgggcatggtggtgcgtgcctgtagtcccggctacttgggcggctgaagcaggagaattgcttgaatccgggaggtggaggttgcagtgagctgagattgcaccactgtactccagcctggcgacag

SEQ ID NO: 60523 - DNA, 322 bp, Homo sapiens
aaaacaaagtcagttgtacaaatggaaaaagtgcaaatgaaaaatgatgacctttaacaaggcaaggacagtaagaataagaaaatactggattgcctctcattctctgaaaaatcctaatgaatatcagatgtagtgattttctaccttccccaatttatttcactctcctcccacagctgataaataatctatgaaatacagttgtcctgccccttattttacttgtcattatttgttttcatttattttgactgggttaatgcactaatggctcatttatctacgatgatcaaaatttggttgcaaagacagccctaaa

SEQ ID NO: 60524 - DNA, 375 bp, Homo sapiens
gggtccaggggagaatcaatatatctagtatagtttatatttgtaccttctctccttaagagttacagtgagtgactctactcctcaaatggagcacctctctccaggagagtaagaagatcacataaatagaaagtgagctttggactctaacagacataggttcatattcaactctgctacttaatatccatattggtttgagttatttaaccttgacaatccacactgtaaaatgggtaaataataaataccctcctctcagaagtgttacaaagtttatatgaaataatgtgcttaaaaagctgggtacatagtaggagcttagtcattgtttattttctccctcatacccatacatgattcattctactg

SEQ ID NO: 60525 - DNA, 996 bp, Homo sapiens
  misc_feature (2)..(2): n is a, c, g, or t
  misc_feature (25)..(25): n is a, c, g, or t
  misc_feature (87)..(87): n is a, c, g, or t
tnccccgagttttgggggtccattnccatgcccctatccaatggaaggggccagaccagaggagagaataccctcaagtcctttccngataaaaggccttgccttgaggggagccttataaccttggcacctagagggtttacccactttgtggatttgatttatccaccaaccacagcaaccaataatgtcaagattctaggagtttatgaaagaggctagtatgttttcattttgagtcagacattcttttctcattctcaaatctgttttaaatgctccaattttaaaaatgccaatgaaaattttataatgcttctgtagtaaccatatgcagtttactttgaatttaggaaaacagttttgtatgatgaaatattgtgcagaatctcactaaggccatctagttgataatcgactggctactttccatttttttttcttggtcttcctgctctggagatttttgtctcttttctcttgagactaatctctctcaagaaccttactatttaaagtgtgatctgtgaagcagtagcattagtatcacttgggaacttgttagaaataccgagtctcaggccctgtcctacacatttttaattagaatctgcattctaacaagatccccaggtgatttttgtgtgcattagtttgagaagcagtcctgtagaatattaatttttatccctactgctcctggatgagttcaagtttgtatcatgttagttccaaggtcagcaagttgtcagcaagttggtactatattccctgactccttagtgcaaacctatgtgcacccttttcacactcctgtaatattaggttacatatacattttttcttctttgtgtatccttatactgtaactttcttgaaggtagtgatcatatccatttacatttgtatctccatgttcaaacagcgtaggtacccaaatatttttgtaaatacatgaacaaaaaatgaataaattcttctttggcaaaaaaaaaa

SEQ ID NO: 60526 - DNA, 676 bp, Homo sapiens
tttcttgtccctacctccttcctatttatttctaaatacatatcatctagcttctcacctaccactccactgaaactacttccactaaggccatctagttgataatcgactggctactttccatttttttttcttggtcttcctgctctggagatttttgtctcttttctcttgagactaatctctctcaagaaccttactatttaaagtgtgatctgtgaagcagtagcattagtatcacttgggaacttgttagaaataccgagtctcaggccctgtcctacacatttttaattagaatctgcattctaacaagatccccaggtgatttttgtgtgcattagtttgagaagcagtcctgtagaatattaatttttatccctactgctcctggatgagttcaagtttgtatcatgttagttccaaggtcagcaagttgtcagcaagttggtactatattccctgactccttagtgcaaacctatgtgcacccttttcacactcctgtaatattaggttacatatacattttttcttctttgtgtatccttatactgtaactttcttgaaggtagtgatcatatccatttacatttgtatctccatgttcaaacagcgtaggtacccaaatatttttgtaaatacatgaacaaaaaatgaataaattcttctttgg

SEQ ID NO: 60527 - DNA, 15170 bp, Homo sapiens
gcagcaaaaataaaggacgcgaccgaattccgcctctgcggagccgggctcgggtcgccggagccgcgccccaccccgccagctccagagccacgtgactaatggctgaaggataaatcaacatggcaactatgattccaccagtgaagctgaaatggcttgaacacttgaacagctcctggattacagaggacagtgaatctattgctacaagagagggagttgctgttctgtattctaaactggttagcaataaggaagtagtacctttgccccaacaagttttatgcctcaaaggaccacagttgccagactttgaacgtgagtctctttcaagtgatgagcaggaccactatttggatgcccttcttagcagccagctagcattggcaaagatggtatgttcagattccccatttgccggggcacttagaaaacgactgcttgtactccagcgtgtcttttatgcactttctaataaataccatgacaaaggcaaggtgaagcagcagcagcattctccggagagcagttctggttcagcagatgtccattctgttagtgaacgcccccggtcaagcactgatgcacttatagaaatgggtgttcgaactggtctaagtttattatttgcgcttctaagacaaagttggatgatgcctgtgtcaggacctggtctcagtctttgcaacgatgtcattcatactgcaattgaagttgtgagctctttgccaccattatcattagcaaatgaaagcaagattcctcctatgggcttggactgcttatcgcaagtaacaacatttcttaaaggagtcactattcctaattctggggcagacactttaggtcgtagattagcttctgagttgctgcttggtttggcagctcaacgaggctcattgcgatatcttcttgaatggatagaaatggctttgggggcttcggcagttgtacacaccatggagaaaggcaaactactctcaagccaggaaggaatgatcagctttgactgctttatgaccatattaatgcagatgaggcgttctttgggttcatctgctgatcggagtcagtggagagaaccaaccagaacatcggatggcttgtgctccctttacgaggcagcattatgtctctttgaagaggtttgcagaatggcttctgattattcgagaacatgtgctagcccagatagcattcagactggtgatgctcccattgtctccgaaacctgtgaggtttatgtttgggggagcaatagcagccatcagttggtagaaggtacacaggagaaaatactgcaacccaaactggctcctagtttctctgatgcacagaccattgaagctggacagtactgcacttttgtcatttctacggatggctcagttagagcttgcgggaaaggcagctatgggagactgggccttggagactccaataatcagtcaactttaaaaaagttaacattcgagcctcacagatccattaaaaaggtttcatcttctaaaggatctgatggtcacactttagcctttacgacagaaggagaagtcttcagttggggagatggtgattatgggaaactggggcatggaaatagttcaacacagaaatatcccaagcttattcagggacctctacaaggaaaggtagttgtttgtgtgtcagctggatacagacatagtgctgctgtcacagaggatggggaattatacacatggggtgaaggagactttggaagattaggtcatggtgacagcaatagtcgtaacattccaacattagtaaaagacatcagcaatgtaggagaggtttcttgtggcagttcacatactattgctctgtctaaagatgggagaactgtatggtcttttggaggaggagacaatggtaaacttggtcatggtgataccaacagagtgtataaacctaaagttattgaagctttacaaggaatgttcattcgcaaagtttgtgctgggagccagtcttcacttgctttgacatcaacagggcaggtctatgcttggggctgtggagcttgtctaggttgtggttcttcagaagctactgctttgagacccaagcttattgaagaactggctgccacaagaatagttgatgtttctattggagacagtcattgtttggctctttctcatgataatgaagtttatgcctggggcaataactcaatggggcaatgtggtcagggaaattccacaggtcctattactaaaccaaagaaagtgagtggcttagatggcatagctattcagcagatttcggctggaacatcacatagtctggcatggactgctcttcctagggacagacaagttgttgcatggcaccgaccttattgtgtagatcttgaagagagtaccttctcacacctgcgttcttttcttgagagatactgtgataaaataaacagtgagattcccccactccctttcccttcatcaagagaacaccacagttttctcaagctgtgcctgaagctactttcaaatcaccttgctcttgcacttgcgggaggggtagctaccagcattctcgggaggcaggcaggtccacttcgaaatttgctcttcagactgatggactcaactgtcccagatgaaatccaagaggtggtaattgaaactttatcagtgggagcaaccatgctgttacctccattacgagaacggatggaattacttcattctcttttacctcaaggacctgatagatgggaaagcttatctaaaggacagagaatgcaactggatatcatcctgacaagtttgcaagatcatacccacgtagcctccctacttggctatagttcaccctctgatgctgctgacctatcttctgtgtgtactggctacggaaatctgtcagatcaaccttacggcactcagagctgccatccagatacccacctggctgaaattttgatgaagaccctcttaagaaatttaggattttatacagatcaagcatttggagagctagaaaagaatagtgataaatttctacttggaacatcatcatcagaaaacagtcagcctgctcatcttcatgaactgctatgttcactacagaaacagctgctggcattttgccatatcaataacattagtgagaactcaagcagtgtggcattgcttcataaacatcttcagcttttgttgcctcatgccacagatatttattcacgttctgcaaatttgctcaaagaaagtccttggaatggcagtgttggagaaaaattaagagatgtgatatacgtctcagctgctggcagtatgctctgccagattgttaactccctgctgttactccctgtgtcagtggctcggcctttattgagttacctcctcgacttgttgccacctcttgattgccttaatagactcctgccagctgctgatcttttagaagaccaggagttacagtggcctcttcatggagggccagaactaattgatcctgctggtctgccattacctcagccagctcagtcctgggtatggcttgtggatctagaaagaacaattgctctccttattgggcggtgtcttggtggcatgcttcagggctcccctgtgtctccagaggaacaggacactgcatattggatgaaaacgccactgttcagtgacggtgtagaaatggacactcctcaattggataaatgtatgagttgcctgttagaagtagcactttctggaaatgaagaacagaagccttttgattataaattgcggcctgaaattgctgtctatgtagacttggcattgggttgttctaaagagcctgcccgaagcctttggatcagcatgcaggactatgctgttagtaaagattgggacagtgcaactttaagtaatgagtcactcttggacactgtgtctagatttgttcttgcagctcttctgaaacacacaaatttacttagtcaagcatgtggagaaagccgatatcaacctggtaaacacttatcagaagtgtaccgttgtgtatacaaagttcgaagtcgtttacttgcttgcaagaaccttgaacttattcaaacaaggtcatcatcacgggacagatggatatcagaaaaccaggactctgcagatgttgatcctcaggagcattcatttactcgaactattgatgaagaagctgaaatggaagaacaggctgagagagaccgggaagaggggcatccggagccagaggatgaagaggaggaacgggaacatgaagtgatgacagctggcaaaatctttcagtgtttcctctcagcccgtgaagtagctcgtagccgagaccgagatagaatgaacagtggggcagggtctggggctcgagctgatgatccacctcctcagtctcagcaagagcgaagggtcagcacagaccttcctgagggtcaggatgtgtacactgctgcatgcaactccgtgatccatcggtgtgccctgttaatattaggagtaagtcctgtgatagatgagcttcagaagcgaagagaagaaggacagttgcagcaaccttcaacaagtgcctctgaagggggtggacttatgaccaggagtgaaagtcttactgcagagagccggctagtccacacaagcccaaattatagactgatcaaatcgaggagtgaatctgatttgtctcagcctgaatcagatgaagagggttacgcactgagtggcagacgaaatgttgatttggatttggcagcatctcacagaaagagaggtcctatgcacagtcaattggaatccctgagtgactcttgggctcgcctgaaacatagcagagactggttatgcaactcctcctattcctttgagtcagattttgatcttaccaagtctttgggagttcacactttgattgaaaatgttgtaagctttgtgagtggagatgtggggaatgccccaggttttaaagagccagaggaaagtatgtctacaagtccccaggcctccatcattgcaatggaacagcagcagttaagggcagaacttcgtttagaggcacttcatcagatcctcgttctattgtctgggatggaagaaaaaggtagcatctcactggcaggaagcagattgagttcaggcttccagtcctccacactactcacgtctgtgaggctgcagttcctagcagggtgttttggtttaggcactgttggacacacaggagccaagggagagagtggccgattgcatcactatcaggatgggatcagagcagctaagagaaatattcagattgaaatccaggtagctgtgcataaaatttatcaacagttgtctgctaccctggaaagagccctgcaagcaaacaagcatcacattgaagcccagcaacgtctgcttctggttacagtttttgccctaagtgttcattatcaaccagtagatgtttctttggcaatttccactggtctgctaaacgtattgtcacagttgtgtggtacagacaccatgctaggacagcccctgcagttgttgccaaagacgggtgtttcccagcttagcacagctttgaaagtggccagtacaaggttgctccagattctagccatcactactgggacctatgctgataaactgagtcccaaagtagttcaatccttgttggatctactctgtagtcagttgaagaatttattgtcccaaactggtgtactacatatggcctctttcggagaaggggagcaagaagacggtgaagaagaagaaaaaaaagttgactccagtggagaaactgagaagaaagatttcagagctgctcttaggaaacaacatgcagccgaactccatctaggggattttttagtttttcttcgcagagttgtatcttcaaaagcaattcaatcaaaaatggcttccccaaagtggaccgaagtgcttctaaatatagcatctcagaaatgttcttcaggtatccctctggttggtaacttaagaacaaggctccttgcacttcatgtccttgaagctgtgctgccagcttgtgaatctggtgtagaagatgatcaaatggcccagattgttgagcgcttattttcccttctctctgattgtatgtgggagacacccattgctcaggccaaacatgctattcagataaaggaaaaagaacaagaaataaaactacagaagcagggcgagttggaagaagaagatgagaatcttcctatccaagaagtatcctttgacccggagaaagctcagtgttgcctagtggagaatggacagattttaactcacggcagtggagggaaaggatatggattggcatctacaggagtaacttctgggtgctatcagtggaagttttatattgtgaaggaaaacagaggtaatgaaggcacgtgtgttggagtttctcgctggccagtacatgactttaatcaccgcactacctcggatatgtggctctatagggcctacagtggtaacctctatcacaatggagaacagactctcacattgtccagctttactcaaggagatttcattacctgtgtgttagacatggaagccaggaccatttcttttgggaaaaatggagaggaacccaaattagcttttgaagatgtggatgcagcagagttgtacccatgtgtgatgttctatagtagcaatccaggggaaaaggtgaaaatttgtgatatgcagatgcgtggcacaccccgagacttacttccaggagaccctatttgtagtccagtagcagcagtgctggctgaggccactattcagctcatccgtatccttcaccgaacagaccgttggacttactgcattaacaaaaaaatgatggaaaggcttcacaaaattaagatatgtattaaagagtcaggtcagaagctaaagaaaagccgctcggttcagagccgagaggaaaatgaaatgagagaggagaaggagagcaaagaggaagagaaaggtaaacatactaggcatggcctcgctgacctctcagagctgcagctgaggactctttgcatagaggtgtggcccgtgctggctgtgataggaggagttgatgctggtcttagagttggaggtcggtgtgttcacaagcaaactgggcgccatgccacgctgctgggagtggtcaaagagggcagcacgtctgccaaggtccaatgggatgaagcagaaattactatcagcttcccaactttttggtcgcctagtgatactccattgtataatctggaaccctgtgaaccattgccgtttgatgtggcgcgattccgaggcctgacggcttctgtgctgctggacctaacatatctcactggcgttcatgaagacatgggcaaacagagcaccaaacgacatgaaaagaaacaccgacatgaatccgaggagaaaggggatgttgagcagaaacctgagagtgaatccgctttagatatgcgaacaggcctaacatctgatgacgtcaaaagtcagagtaccacaagctccaaatcagaaaatgaaatcgcttcattttctttagatccaacactgccaagtgtggaatcccaacatcaaataacagaagggaaaagaaaaaatcatgaacacatgtccaaaaaccatgatgtagcccagtcagaaatcagagcagtccagctgtcctatctttacctcggtgctatgaagtcacttagtgcccttcttggctgtagtaaatatgctgagctgttgctgataccaaaagttctggctgaaaatggccacaactcagactgtgcaagttctccagttgttcatgaagacgtggagatgcgagcagccctgcagttcttgatgcgacacatggtgaagcgagcagtcatgcggtcacccataaagagagcattgggattagctgatctggaacgagcgcaagccatgatctataaattagtggttcatgggcttttggaagaccagtttgggggcaaaattaagcaagagattgatcaacaagctgaagaaagtgaccctgcccagcaggcacagacaccagttactactagcccatcagcctcaagcacgacctcctttatgagcagctctctggaggacaccacaactgccaccactccagtcactgacacagaaacagtgcctgcatccgagtccccgggagtgatgcctcttagtcttctcaggcaaatgttctctagttacccaactaccactgtacttcccacacgtcgggcacagactcctccaatatcttcgttaccaacctctccttctgatgaagtaggaaggaggcaaagtttaacttctcctgattcccagtcagcaaggccagctaaccgcacagccttgtcagacccaagcagtagactttcaacttctcctcctcctccagcaattgcagttcccttgctggaaatggggttctctcttcggcagattgccaaagccatggaagctacaggtgctaggggagaggctgatgcccagaatatcactgtccttgccatgtggatgatagagcaccctgggcatgaggatgaagaggagccccagtcgggcagcacagcagactctaggcctggagcagccgttctaggcagtggcgggaagtcaaatgatccctgttatttgcagtcacctggagacataccatcagctgatgctgctgaaatggaggaaggttttagtgaaagccctgataatttggatcatacagagaatgcagcttctggaagtggaccatcagctagaggtcgctcagcggtaacaagaagacacaagtttgacttagctgctcgcacactgctagcaagagcagcgggattataccgctctgtgcaggcccacaggaatcaaagtcggagagaaggaatatctttgcagcaagacccaggggcgttgtatgactttaatttagatgaggaattggaaattgatcttgatgatgaggcgatggaagctatgtttggacaagacctgaccagtgacaatgatattctgggaatgtggatcccagaggtactggattggcctacctggcatgtttgtgagtctgaagacagggaagaagtggtggtgtgtgaactgtgtgaatgcagcgtcgtcagcttcaatcagcacatgaagagaaaccatccaggctgtgggcgcagtgcaaaccgccagggctatcgcagcaatggttcctatgtggatggctggtttggcggtgaatgtgggagtggaaatccatactacctgttatgtggcacctgcagggagaagtacttagccatgaagaccaaatctaagtcaacaagttctgaaaggtacaagggacaagctccagatctaattggcaagcaagacagtgtgtatgaagaagactgggacatgttggatgttgatgaagatgaaaagctaactggtgaagaagaatttgaattacttgctggaccgcttggtttaaatgaccggcgcattgtaccagaaccagttcagttccctgacagcgatccactgggagcatcagtagcaatggtcacagccaccaacagtatggaagagactctgatgcaaataggttgccatggctccgtagaaaagagctcctctgggagaataacgttaggagagcaggcagctgccctagcaaaccctcatgaccgtgtggtggctttaaggagagtgactgctgctgctcaggttcttctggccagaaccatggtcatgagagcgctgtctcttctctcagtcagtggttccagttgtagcctggctgctggtcttgagtctctggggctaacagatatccgaacgctagttcgattaatgtgcttggcagcagcagggagagctggcctctccaccagcccttctgccatggctagcacctcagaacgatcacgaggtgggcatagcaaggctaacaagcctatctcttgcctggcctatttgagcacagcagtgggatgtctggcatcaaatgctcctagtgctgccaaactgcttgtacagttgtgtacacagaacttgatttctgctgcaacaggtgtaaatctaaccacagttgatgactcaattcagcgaaagtttctacccagctttctccgaggaattgctgaagagaacaagcttgtgacctccccaaactttgttgtaacacaggcccttgtggcattgctagcagacaaaggggccaaactaagacctaactatgataagtcagaagttgaaaagaaaggccctctggagttggctaatgccctggcagcctgctgcctctcctccaggctgtcctcacagcatcggcaatgggcagctcagcaactcgtgcgcactcttgctgcacacgaccgtgacaaccaaactactctgcagacacttgctgatatgggaggagatcttagaaaatgctcctttatcaaattggaggctcatcagaacagagtaatgacatgtgtttggtgtaataaaaaaggtcttttggctacaagtggcaatgatggcaccatccgcgtatggaatgttaccaagaagcaatattcactgcaacagacctgtgtgttcaacagattggaaggggatgctgaggaaagcctgggatcacccagtgatccaagtttctcaccagtttcctggagtatcagtggcaaatatctagcaggcgctttggaaaagatggtgaatatctggcaagttaatggaggaaaaggattagtagatattcagcctcattgggtatctgccctggcttggccagaagagggtccggctacagcctggtcaggagagtctccagaattgttgttggtgggacggatggatggatctctgggactgattgaagttgttgatgtgtccaccatgcaccgtcgagaattggagcattgctatcgaaaggatgtgtctgttacttgcattgcatggttcagtgaagacagaccatttgcagtgggatattttgatggaaaactgttactgggaacaaaggaaccacttgagaaaggaggcattgttctaattgatgcacataaggatactcttattagcatgaagtgggaccctacaggtcatattcttatgacatgtgccaaagaagacagtgtgaaactctggggctctatttcgggatgctggtgctgtctacattcactctgccatccatctattgtaaatggcattgcttggtgccgccttccagggaaaggatccaagttgcagttactgatggctactggctgtcagagtggcttagtatgtgtttggcgcattcctcaagatactacacagaccaatgtgactagtgcagaaggatggtgggaccaggaatcaaattgccaggatggatataggaaatcatcaggagccaagtgtgtttatcagctgcggggacacatcactcctgttcggactgttgcctttagttctgatgggttggccctggtgtctggtggactaggtgggctcatgaacatttggtctttaagggatggctctgtcttgcaaactgttgtgataggctctggagctattcagaccacagtatggattccagaagttggagtagctgcttgctcaaatagatcaaaggatgttttggtcgtgaattgtacagcagaatgggcagctgccaatcatgttttggcaacctgtaggacagcattgaaacagcagggtgttctgggattgaacatggctccctgcatgagagcatttttggagcggctccccatgatgcttcaggagcagtatgcctatgaaaagcctcatgtggtttgtggtgaccaacttgttcatagcccctatatgcaatgcttggcttcccttgctgtgggacttcatctggatcagctgttgtgtaaccctccagtgccaccacaccaccagaactgtctgcctgaccctgcatcctggaatccaaatgaatgggcctggttagaatgtttctcaaccactataaaagctgccgaagccctgaccaatggagcccagtttccagaatcttttaccgttccagatctagaacctgttccagaggatgaacttgtatttctaatggataacagtaaatggattaacggcatggatgaacaaattatgtcttgggcaacttccagacctgaggactggcacctgggaggtaaatgtgatgtctacttatggggtgctggtaggcatggacagctggcagaagctggaagaaatgtaatggtacctgcagcagctccctcattctcacaggcccaacaggtcatttgtggtcagaattgtacctttgtcatccaggccaatggcacagtgttggcttgtggggaaggaagttatggcagattaggacaaggaaattcagatgaccttcatgtgctgacagttatttcagccttacaaggctttgtggtgacccagctggtgacttcctgtggttctgatgggcactctatggccctaactgaaagtggtgaggtctttagctggggagatggtgactatggtaaacttggccatgggaacagcgacaggcagcggcggcccaggcagatcgaggccttacaaggagaagaagtggtgcagatgtcttgtggcttcaagcactcagcagtggtcacttcagatggcaaactgttcacctttgggaatggtgactatggtcgtctgggtcttggaaatacctctaacaaaaaacttccagagagagtgactgcactggagggatatcagattggacaggtggcctgtggattaaaccacactttggcagtgtcagcagatggttccatggtgtgggcttttggagatggagactatggaaaactaggcttaggaaattccactgcaaaatcttcacctcagaaaattgacgtcctttgtggaattggaataaaaaaggttgcttgtggaactcagttttctgttgctttgaccaaagatggtcatgtgtatacctttggtcaagatcgcctgataggcttgccagaggggcgtgctcgcaatcacaatcgaccgcaacaaatccctgtcctggctggagtaatcattgaagatgtggcagttggagctgaacacacacttgctttggcatcaaatggagatgtgtatgcctgggggagcaattcagaagggcagctcggcttaggccataccaaccatgttcgagaaccaaccctggtaacaggtctgcaagggaaaaatgttcggcagatctcggctggccgctgccacagtgctgcatggacagcaccacctgtcccaccaagagcaccaggtgtgtcagtacctctgcagctgggcctgcctgacacagtgcccccccagtatggggcgctgagagaagtcagcattcacacggtgcgggccaggctccggctgctctaccacttctctgacctcatgtactcatcctggagactgctgaaccttagccccaacaaccagaacagcacatcccattataatgctggaacttggggcattgtacagggacaacttcggcctttgttagccccaagagtctacactctgccaatggtgcgctccataggaaaaaccatggttcaaggcaaaaactatggacctcagataactgtaaagaggatatcaaccagaggacggaagtgtaagcctatttttgtccaaatagcgagacaagtagttaagctgaatgcttcagacctccgcctgccttcccgagcgtggaaggttaagctggttggagaaggggctgatgatgctggaggagtgtttgatgacaccatcacagagatgtgccaggaacttgaaactggtattgttgaccttcttataccctctcccaatgccaccgcagaagtgggttacaatagggacaggttcctttttaacccttctgcctgcctcgatgaacacttaatgcagtttaagtttttaggaattttaatgggggttgccattcgcacaaagaagcctctggacctccacttggcccctctggtgtggaagcagctgtgctgtgtcccactcaccctagaggacctggaggaggtggatctgctctacgtgcagactctcaacagcattcttcacattgaagacagtgggattaccgaggagagtttccatgagatgattcctcttgattcttttgttggccagagtgctgatggcaaaatggttcctataatccctggtggaaatagtatcccactcacattttccaacaggaaggaatatgtggagagggccattgaatatcgacttcatgagatggacagacaggtggctgcagtccgagaagggatgtcctggattgttcctgtgccgctgctgtccctcctcacagcaaaacaactggagcagatggtgtgtgggatgcccgagatctctgtggaagtcttgaagaaagtggtgcggtaccgtgaggtggatgagcagcatcagctggtgcagtggttctggcacacgctggaagagttctccaatgaggagcgggtgcttttcatgaggtttgtgtcaggaagatctcgactaccagccaacactgctgacatttctcagagatttcaaatcatgaaggttgataggccttacgacagtctgcctacctcacagacctgcttcttccagctgaggctgcccccgtactccagccagctggtcatggccgagcgcctgcgctatgccatcaacaactgccgctcaatcgacatggacaactacatgctctcgagaaacgtggacaacgccgagggctccgacactgactactgaccgtgcgggtgctctcaccctcccttctctccctcaataatgctcacttctgatttgatgttgatatacttttatggtaactacatagatgttataagaacataaaccaacattataaacaatggccacatttagttactctaaatgtaacaaagaaattagatgtttttatttttctgtgattgtacaaaaacaacaaaaacgaagtgctctcagtcaggtttttccctccatatttttggtcacttttgataagtttgcatgaaaccattttggtgcatttttagttgggaatggtacatttttgtaaatccacccagtgaacatgaaattgtacattgtgtataattgttcattagaaaggacagttttacatgaatattcatatatttattttgttttaatttgaattgcctgttcagggttccttatgcagagaaataaagcagattcaggaattgg

SEQ ID NO: 60528 - DNA, 604 bp, Homo sapiens
cgcttgcatgattgtaggtggcatcgataaacaccggtgtttatcgatgccacactgctatgttcactacagaaacagctgctggcattttgccatatcaataacattagtgagaactcaagcagtgtggcattgcttcataaacatcttcagcttttgttgcctcatgccacagatatttattcacgttctgcaaatttgctcaaagaaagtccttggaatggcagtgttggagaaaaattaagagatgtgatatacgtctcagctgctggcagtatgctctgccagattgttaactccctgctgttactccctgtgtcagtggctcggcctttattgagttacctcctcgacttgttgccacctcttgattgccttaatagactcctgccagctgctgatcttttagaagaccaggagttacagtggcctcttcatggagggccagaactaattgatcctgctggtctgccattacctcagccagctcagtcctgggtatggcttgtggatctagaaagaacaattgctctccttattgggcggtgtcttggtggcatccgataaacaccgggtcctctagatcgaccgcagcagcactgca

SEQ ID NO: 60529 - DNA, 496 bp, Homo sapiens
atgtcaatgcatcatttttattttcagattgggacagtgcaactttaagtaatgagtcactcttggacactgtgtctagatttgttcttgcagctcttctgaaacacacaaatttacttagtcaagcatgtggagaaagccggcaagtaacttaaaactatcctcagacaaatatttgctctcatgatgtcagaaattaggtaacttttctattttggttcttcatttagatatcaacctggtaaacacttatcagaagtgtaccgttgtgtatacaaagttcgaagtcgtttacttgcttgcaagaaccttgaacttattcaaacaaggtcatcatcacgggacagatgggtaaagtttgaaatcaattaatttctatgtttttctgcaagctgtgagagctagctctaaattggtttatgtgagaaaaaaatgtgccttggttattgcatatgttcaatacatgttgagtagttcttttcctagcagaaaaaaa

SEQ ID NO: 60530 - DNA, 542 bp, Homo sapiens
gtgactcagttttcccacttgtaaaaatgggatgttagtatctgtttcataggtgctatgtgaaagtagaaaatgagataatccatgtaaagcatttataggagtggctagagcatagccagtcattaatgactgtaactattgctgtcatcctcgttttccttgtcatcaccattattttaggtgactattcgcagttttgctaggttatggctacaaattcaatttaaaactaaagaaattaggccggttactgtggctcatgcctgtaaacccagcgctttgggaggccgaggtgggcggatcacttgaggtcaggagttcatgaccagcctggccagcatggtaaaacccctgtctctacaaaaaatagaaataaatagccaggtgtggtagcacatgcctgtagtcccagctacttgggaggctgaggtgggaggattgcttgagcccaggagtttggggctgcagtgagctgtgatcacaccactgcactccagcctaggtgacagagcaagacactgtctctttaaaatttaaaa

SEQ ID NO: 60531 - DNA, 279 bp, Homo sapiens
gcggccgcctactactactactgctcgaattcaagcttctaacgatgtacgggcttgaagctgtgctgccagcttgtgaatctggtgtagaagatgatcaaatggcccaggtttttatttttaaaattattagaagatgttttccatatttgcaaaatgattcacccaaatctgtacttaacagtctcttcagttgtaaatgtgtcttttattcaatagcataacgtttacttttaggactgctttctttattatttcacccccaaggagagggcaaaa

SEQ ID NO: 60532 - DNA, 304 bp, Homo sapiens
ttttctgacctttccccattctgttctttaagttttcagaattcagtagctgacagcctaagattttgcattagatttcttgaagctgtgctgccagcttgtgaatctggtgtagaagatgatcaaatggcccaggtttttatttttaaaattattagaagatgttttccatatttgcaaaatgattcacccaaatctgtacttaacagtctcttcagttgtaaatgtgtcttttattcaatagcataacgtttacttttaggactgctttctttattatttcacccccaaggagagggcaaaa

SEQ ID NO: 60533 - DNA, 11939 bp, Homo sapiens
gcagcaaaaataaaggacgcgaccgaattccgcctctgcggagccgggctcgggtcgccggagccgcgccccaccccgccagctccagagccacgtaaatggggtttcaccgtgttagccaggatggtctcaatctcctgacctcgtgatccgcccacctcggcctcccaaagtactgggattacaggactaatggctgaaggataaatcaacatggcaactatgattccaccagtgaagctgaaatggcttgaacacttgaacagctcctggattacagaggacagtgaatctattgctacaagagagggagttgctgttctgtattctaaactggttagcaataaggaagtagtacctttgccccaacaagttttatgcctcaaaggaccacagttgccagactttgaacgtgagtctctttcaagtgatgagcaggaccactatttggatgcccttcttagcagccagctagcattggcaaagatggtatgttcagattccccatttgccggggcacttagaaaacgactgcttgtactccagcgtgtcttttatgcactttctaataaataccatgacaaaggcaaggtgaagcagcagcagcattctccggagagcagttctggttcagcagatgtccattctgttagtgaacgcccccggtcaagcactgatgcacttatagaaatgggtgttcgaactggtctaagtttattatttgcgcttctaagacaaagttggatgatgcctgtgtcaggacctggtctcagtctttgcaacgatgtcattcatactgcaattgaagttgtgagctctttgccaccattatcattagcaaatgaaagcaagattcctcctatgggcttggactgcttatcgcaagtaacaacatttcttaaaggagtcactattcctaattctggggcagacactttaggtcgtagattagcttctgagttgctgcttggtttggcagctcaacgaggctcattgcgatatcttcttgaatggatagaaatggctttgggggcttcggcagttgtacacaccatggagaaaggcaaactactctcaagccaggaaggaatgatcagctttgactgctttatgaccatattaatgcagatgaggcgttctttgggttcatctgctgatcggagtcagtggagagaaccaaccagaacatcggatggcttgtgctccctttacgaggcagcattatgtctctttgaagaggtttgcagaatggcttctgattattcgagaacatgtgctagcccagatagcattcagactggtgatgctcccattgtctccgaaacctgtgaggtttatgtttgggggagcaatagcagccatcagttggtagaaggtacacaggagaaaatactgcaacccaaactggctcctagtttctctgatgcacagaccattgaagctggacagtactgcacttttgtcatttctacggatggctcagttagagcttgcgggaaaggcagctatgggagactgggccttggagactccaataatcagtcaactttaaaaaagttaacattcgagcctcacagatccattaaaaaggtttcatcttctaaaggatctgatggtcacactttagcctttacgacagaaggagaagtcttcagttggggagatggtgattatgggaaactggggcatggaaatagttcaacacagaaatatcccaagcttattcagggacctctacaaggaaaggtagttgtttgtgtgtcagctggatacagacatagtgctgctgtcacagaggatggggaattatacacatggggtgaaggagactttggaagattaggtcatggtgacagcaatagtcgtaacattccaacattagtaaaagacatcagcaatgtaggagaggtttcttgtggcagttcacatactattgctctgtctaaagatgggagaactgtatggtcttttggaggaggagacaatggtaaacttggtcatggtgataccaacagagtgtataaacctaaagttattgaagctttacaaggaatgttcattcgcaaagtttgtgctgggagccagtcttcacttgctttgacatcaacagggcaggtctatgcttggggctgtggagcttgtctaggttgtggttcttcagaagctactgctttgagacccaagcttattgaagaactggctgccacaagaatagttgatgtttctattggagacagtcattgtttggctctttctcatgataatgaagtttatgcctggggcaataactcaatggggcaatgtggtcagggaaattccacaggtcctattactaaaccaaagaaagtgagtggcttagatggcatagctattcagcagatttcggctggaacatcacatagtctggcatggactgctcttcctagggacagacaagttgttgcatggcaccgaccttattgtgtagatcttgaagagagtaccttctcacacctgcgttcttttcttgagagatactgtgataaaataaacagtgagattcccccactccctttcccttcatcaagagaacaccacagttttctcaagctgtgcctgaagctactttcaaatcaccttgctcttgcacttgcgggaggggtagctaccagcattctcgggaggcaggcaggtccacttcgaaatttgctcttcagactgatggactcaactgtcccagatgaaatccaagaggtggtaattgaaactttatcagtgggagcaaccatgctgttacctccattacgagaacggatggaattacttcattctcttttacctcaaggacctgatagatgggaaagcttatctaaaggacagagaatgcaactggatatcatcctgacaagtttgcaagatcatacccacgtagcctccctacttggctatagttcaccctctgatgctgctgacctatcttctgtgtgtactggctacggaaatctgtcagatcaaccttacggcactcagagctgccatccagatacccacctggctgaaattttgatgaagaccctcttaagaaatttaggattttatacagatcaagcatttggagagctagaaaagaatagtgataaatttctacttggaacatcatcatcagaaaacagtcagcctgctcatcttcatgaactgctatgttcactacagaaacagctgctggcattttgccatatcaataacattagtgagaactcaagcagtgtggcattgcttcataaacatcttcagcttttgttgcctcatgccacagatatttattcacgttctgcaaatttgctcaaagaaagtccttggaatggcagtgttggagaaaaattaagagatgtgatatacgtctcagctgctggcagtatgctctgccagattgttaactccctgctgttactccctgtgtcagtggctcggcctttattgagttacctcctcgacttgttgccacctcttgattgccttaatagactcctgccagctgctgatcttttagaagaccaggagttacagtggcctcttcatggagggccagaactaattgatcctgctggtctgccattacctcagccagctcagtcctgggtatggcttgtggatctagaaagaacaattgctctccttattgggcggtgtcttggtggcatgcttcagggctcccctgtgtctccagaggaacaggacactgcatattggatgaaaacgccactgttcagtgacggtgtagaaatggacactcctcaattggataaatgtatgagttgcctgttagaagtagcactttctggaaatgaagaacagaagccttttgattataaattgcggcctgaaattgctgtctatgtagacttggcattgggttgttctaaagagcctgcccgaagcctttggatcagcatgcaggactatgctgttagtaaagattgggacagtgcaactttaagtaatgagtcactcttggacactgtgtctagatttgttcttgcagctcttctgaaacacacaaatttacttagtcaagcatgtggagaaagccggcaagtaacttaaaactatcctcagacaaatatttgctctcatgatgtcagaaattaggtaacttttctattttggttcttcatttagatatcaacctggtaaacacttatcagaagtgtaccgttgtgtatacaaagttcgaagtcgtttacttgcttgcaagaaccttgaacttattcaaacaaggtcatcatcacgggacagatggatatcagaaaaccaggactctgcagatgttgatcctcaggagcattcatttactcgaactattgatgaagaagctgaaatggaagaacaggctgagagagaccgggaagaggggcatccggagccagaggatgaagaggaggaacgggaacatgaagtgatgacagctggcaaaatctttcagtgtttcctctcagcccgtgaagtagctcgtagccgagaccgagatagaatgaacagtggggcagggtctggggctcgagctgatgatccacctcctcagtctcagcaagagcgaagggtcagcacagaccttcctgagggtcaggatgtgtacactgctgcatgcaactccgtgatccatcggtgtgccctgttaatattaggagtaagtcctgtgatagatgagcttcagaagcgaagagaagaaggacagttgcagcaaccttcaacaagtgcctctgaagggggtggacttatgaccaggagtgaaagtcttactgcagagagccggctagtccacacaagcccaaattatagactgatcaaatcgaggagtgaatctgatttgtctcagcctgaatcagatgaagagggttacgcactgagtggcagacgaaatgttgatttggatttggcagcatctcacagaaagagaggtcctatgcacagtcaattggaatccctgagtgactcttgggctcgcctgaaacatagcagagactggttatgcaactcctcctattcctttgagtcagattttgatcttaccaagtctttgggagttcacactttgattgaaaatgttgtaagctttgtgagtggagatgtggggaatgccccaggttttaaagagccagaggaaagtatgtctacaagtccccaggcctccatcattgcaatggaacagcagcagttaagggcagaacttcgtttagaggcacttcatcagatcctcgttctattgtctgggatggaagaaaaaggtagcatctcactggcaggaagcagattgagttcaggcttccagtcctccacactactcacgtctgtgaggctgcagttcctagcagggtgttttggtttaggcactgttggacacacaggagccaagggagagagtggccgattgcatcactatcaggatgggatcagagcagctaagagaaatattcagattgaaatccaggtagctgtgcataaaatttatcaacagttgtctgctaccctggaaagagccctgcaagcaaacaagcatcacattgaagcccagcaacgtctgcttctggttacagtttttgccctaagtgttcattatcaaccagtagatgtttctttggcaatttccactggtctgctaaacgtattgtcacagttgtgtggtacagacaccatgctaggacagcccctgcagttgttgccaaagacgggtgtttcccagcttagcacagctttgaaagtggccagtacaaggttgctccagattctagccatcactactgggacctatgctgataaactgagtcccaaagtagttcaatccttgttggatctactctgtagtcagttgaagaatttattgtcccaaactggtgtactacatatggcctctttcggagaaggggagcaagaagacggtgaagaagaagaaaaaaaagttgactccagtggagaaactgagaagaaagatttcagagctgctcttaggaaacaacatgcagccgaactccatctaggggattttttagtttttcttcgcagagttgtatcttcaaaagcaattcaatcaaaaatggcttccccaaagtggaccgaagtgcttctaaatatagcatctcagaaatgttcttcaggtatccctctggttggtaacttaagaacaaggctccttgcacttcatgtccttgaagctgtgctgccagcttgtgaatctggtgtagaagatgatcaaatggcccagattgttgagcgcttattttcccttctctctgattgtatgtgggagacacccattgctcaggccaaacatgctattcagataaaggaaaaagaacaagaaataaaactacagaagcagggcgagttggaagaagaagatgagaatcttcctatccaagaagtatcctttgacccggagaaagctcagtgttgcctagtggagaatggacagattttaactcacggcagtggagggaaaggatatggattggcatctacaggagtaacttctgggtgctatcagtggaagttttatattgtgaaggaaaacagaggtaatgaaggcacgtgtgttggagtttctcgctggccagtacatgactttaatcaccgcactacctcggatatgtggctctatagggcctacagtggtaacctctatcacaatggagaacagactctcacattgtccagctttactcaaggagatttcattacctgtgtgttagacatggaagccaggaccatttcttttgggaaaaatggagaggaacccaaattagcttttgaagatgtggatgcagcagagttgtacccatgtgtgatgttctatagtagcaatccaggggaaaaggtgaaaatttgtgatatgcagatgcgtggcacaccccgagacttacttccaggagaccctatttgtagtccagtagcagcagtgctggctgaggccactattcagctcatccgtatccttcaccgaacagaccgttggacttactgcattaacaaaaaaatgatggaaaggcttcacaaaattaagatatgtattaaagagtcaggtcagaagctaaagaaaagccgctcggttcagagccgagaggaaaatgaaatgagagaggagaaggagagcaaagaggaagagaaaggtaaacatactaggcatggcctcgctgacctctcagagctgcagctgaggactctttgcatagaggtgtggcccgtgctggctgtgataggaggagttgatgctggtcttagagttggaggtcggtgtgttcacaagcaaactgggcgccatgccacgctgctgggagtggtcaaagagggcagcacgtctgccaaggtccaatgggatgaagcagaaattactatcagcttcccaactttttggtcgcctagtgatactccattgtataatctggaaccctgtgaaccattgccgtttgatgtggcgcgattccgaggcctgacggcttctgtgctgctggacctaacatatctcactggcgttcatgaagacatgggcaaacagagcaccaaacgacatgaaaagaaacaccgacatgaatccgaggagaaaggggatgttgagcagaaacctgagagtgaatccgctttagatatgcgaacaggcctaacatctgatgacgtcaaaagtcagagtaccacaagctccaaatcagaaaatgaaatcgcttcattttctttagatccaacactgccaagtgtggaatcccaacatcaaataacagaagggaaaagaaaaaatcatgaacacatgtccaaaaaccatgatgtagcccagtcagaaatcagagcagtccagctgtcctatctttacctcggtgctatgaagtcacttagtgcccttcttggctgtagtaaatatgctgagctgttgctgataccaaaagttctggctgaaaatggccacaactcagactgtgcaagttctccagttgttcatgaagacgtggagatgcgagcagccctgcagttcttgatgcgacacatggtgaagcgagcagtcatgcggtcacccataaagagagcattgggattagctgatctggaacgagcgcaagccatgatctataaattagtggttcatgggcttttggaagaccagtttgggggcaaaattaagcaagagattgatcaacaagctgaagaaagtgaccctgcccagcaggcacagacaccagttactactagcccatcagcctcaagcacgacctcctttatgagcagctctctggaggacaccacaactgccaccactccagtcactgacacagaaacagtgcctgcatccgagtccccgggagtgatgcctcttagtcttctcaggcaaatgttctctagttacccaactaccactgtacttcccacacgtcgggcacagactcctccaatatcttcgttaccaacctctccttctgatgaagtaggaaggaggcaaagtttaacttctcctgattcccagtcagcaaggccagctaaccgcacagccttgtcagacccaagcagtagactttcaacttctcctcctcctccagcaattgcagttcccttgctggaaatggggttctctcttcggcagattgccaaagccatggaagctacaggtgctaggggagaggctgatgcccagaatatcactgtccttgccatgtggatgatagagcaccctgggcatgaggatgaagaggagccccagtcgggcagcacagcagactctaggcctggagcagccgttctaggcagtggcgggaagtcaaatgatccctgttatttgcagtcacctggagacataccatcagctgatgctgctgaaatggaggaaggttttagtgaaagccctgataatttggatcatacagagaatgcagcttctggaagtggaccatcagctagaggtcgctcagcggtaacaagaagacacaagtttgacttagctgctcgcacactgctagcaagagcagcgggattataccgctctgtgcaggcccacaggaatcaaagtcggagagaaggaatatctttgcagcaagacccaggggcgttgtatgactttaatttagatgaggaattggaaattgatcttgatgatgaggcgatggaagctatgtttggacaagacctgaccagtgacaatgatattctgggaatgtggatcccagagcatgtttgtgagtctgaagacagggaagaagtggtggtgtgtgaactgtgtgaatgcagcgtcgtcagcttcaatcagcacatgaagagaaaccatccaggctgtgggcgcagtgcaaaccgccagggctatcgcagcaatggttcctatgtggatggctggtttggcggtgaatgtgggagtggaaatccatactacctgttatgtggcacctgcagggagaagtacttagccatgaagaccaaatctaagtcaacaagttctgaaaggtacaagggacaagctccagatctaattggcaagcaagacagtgtgtatgaagaagactgggacatgttggatgttgatgaagatgaaaagctaactggtgaagaagaatttgaattacttgctggaccgcttggtttaaatgaccggcgcattgtaccagaaccagttcagttccctgacagcgatccactgggagcatcagtagcaatggtcacagccaccaacagtatggaagagactctgatgcaaataggttgccatggctccgtagaaaagagctcctctgggagaataacgttaggagagcaggcagctgccctagcaaaccctcatgaccgtgtggtggctttaaggagagtgactgctgctgctcaggttcttctggccagaaccatggtcatgagagcgctgtctcttctctcagtcagtggttccagttgtagcctggctgctggtcttgagtctctggggctaacagatatccgaacgctagttcgattaatgtgcttggcagcagcagggagagctggcctctccaccagcccttctgccatggctagcacctcagaacgatcacgaggtgggcatagcaaggctaacaagcctatctcttgcctggcctatttgagcacagcagtgggatgtctggcatcaaatgctcctagtgctgccaaactgcttgtacagttgtgtacacagaacttgatttctgctgcaacaggtgtaaatctaaccacagttgatgactcaattcagcgaaagtttctacccagctttctccgaggaattgctgaagagaacaagcttgtgacctccccaaactttgttgtaacacaggcccttgtggcattgctagcagacaaaggggccaaactaagacctaactatgataagtcagaagttgaaaagaaaggccctctggagttggctaatgccctggcagcctgctgcctctcctccaggctgtcctcacagcatcggcaatgggcagctcagcaactcgtgcgcactcttgctgcacacgaccgtgacaaccaaactactctgcagacacttgctgatatgggaggagatcttagaaaatgctcctttatcaaattggaggctcatcagaacagagtaatgacatgtgtttggtgtaataaaaaaggtcttttggctacaagtggcaatgatggcaccatccgcgtatggaatgttaccaagaagcaatattcactgcaacagacctgtgtgttcaacagattggaaggggatgctgaggaaagcctgggatcacccagtgatccaagtttctcaccagtttcctggagtatcagtggcaaatatctagcaggcgctttggaaaagatggtgaatatctggcaagttaatggaggaaaaggattagtagatattcagcctcattgggtatctgccctggcttggccagaagagggtccggctacagcctggtcaggagagtctccagaattgttgttggtgggacggatggatggatctctgggactgattgaagttgttgatgtgtccaccatgcaccgtcgagaattggagcattgctatcgaaaggatgtgtctgttacttgcattgcatggttcagtgaagacagaccatttgcagtgggatattttgatggaaaactgttactgggaacaaaggaaccacttgagaaaggaggcattgttctaattgatgcacataaggatactcttattagcatgaagtgggaccctacaggtcatattcttatgacatgtgccaaagaagacagtgtgaaactctggggctctatttcgggatgctggtgctgtctacattcactctgccatccatctattgtaaatggcattgcttggtgccgccttccagggaaaggatccaagttgcagttactgatggctactggctgtcagagtggcttagtatgtgtttggcgcattcctcaagatactacacagaccaatgtgactagtgcagaaggatggtgggaccaggaatcaaattgccaggtaacattctggtgtttttgaagactgtctgaaactatggaaagtatatgacatcagagtcattctcccttggttactaaaaaagtcattactatatcccaaagggcaagatccattgggaaatataagtaattgtcatcctgaattagcttaattttttataaatcagagataccataattgcttggtaaaatgagatattctatacatattaagtggtgactgttactgtgatagtggatataattgatactacagatagacgagtcataagttgttagtacattaaaatagaaactccatgggagcacatccatccaaagaatctccaactgatgccagaatccttgctatgaagaatgatttatttatattaaacagaagttacaaatgtatatatttatagagagccctctaggcgagtaacataaattcatgaagctagggttagaaggtttggagagggtaaaaagca

SEQ ID NO: 60534 - DNA, 13533 bp, Homo sapiens
ctggccccaaattcgcaactcatggggtgaaggagactttaagattaggtcatggtgacagcaatagtcgtaacattccaacattagtaaaagacatcagcaatgtaggagaggtttcttgtggcagttcacatactattgctctgtctaaagatgggagaactgtatggtcttttggaggaggagacaatggtaaacttggtcatggtgataccaacagagtgtataaacctaaagttattgaagctttacaaggaatgttcattcgcaaagtttgtgctgggagccagtcttcacttgctttgacatcaacagggcaggtctatgcttggggctgtggagcttgtctaggttgtggttcttcagaagctactgctttgagacccaagcttattgaagaactggctgccacaagaatagttgatgtttctattggagacagtcattgtttggctctttctcatgataatgaagtttatgcctggggcaataactcaatggggcaatgtggtcagggaaattccacaggtcctattactaaaccaaagaaagtgagtggcttagatggcatagctattcagcagatttcggctggaacatcacatagtctggcatggactgctcttcctagggacagacaagttgttgcatggcaccgaccttattgtgtagatcttgaagagagtaccttctcacacctgcgttcttttcttgagagatactgtgataaaataaacagtgagattcccccactccctttcccttcatcaagagaacaccacagttttctcaagctgtgcctgaagctactttcaaatcaccttgctcttgcacttgcgggaggggtagctaccagcattctcgggaggcaggcaggtccacttcgaaatttgctcttcagactgatggactcaactgtcccagatgaaatccaagaggtggtaattgaaactttatcagtgggagcaaccatgctgttacctccattacgagaacggatggaattacttcattctcttttacctcaaggacctgatagatgggaaagcttatctaaaggacagagaatgcaactggatatcatcctgacaagtttgcaagatcatacccacgtagcctccctacttggctatagttcaccctctgatgctgctgacctatcttctgtgtgtactggctacggaaatctgtcagatcaaccttacggcactcagagctgccatccagatacccacctggctgaaattttgatgaagaccctcttaagaaatttaggattttatacagatcaagcatttggagagctagaaaagaatagtgataaatttctacttggaacatcatcatcagaaaacagtcagcctgctcatcttcatgaactgctatgttcactacagaaacagctgctggcattttgccatatcaataacattagtgagaactcaagcagtgtggcattgcttcataaacatcttcagcttttgttgcctcatgccacagatatttattcacgttctgcaaatttgctcaaagaaagtccttggaatggcagtgttggagaaaaattaagagatgtgatatacgtctcagctgctggcagtatgctctgccagattgttaactccctgctgttactccctgtgtcagtggctcggcctttattgagttacctcctcgacttgttgccacctcttgattgccttaatagactcctgccagctgctgatcttttagaagaccaggagttacagtggcctcttcatggagggccagaactaattgatcctgctggtctgccattacctcagccagctcagtcctgggtatggcttgtggatctagaaagaacaattgctctccttattgggcggtgtcttggtggcatgcttcagggctcccctgtgtctccagaggaacaggacactgcatattggatgaaaacgccactgttcagtgacggtgtagaaatggacactcctcaattggataaatgtatgagttgcctgttagaagtagcactttctggaaatgaagaacagaagccttttgattataaattgcggcctgaaattgctgtctatgtagacttggcattgggttgttctaaagagcctgcccgaagcctttggatcagcatgcaggactatgctgttagtaaagattgggacagtgcaactttaagtaatgagtcactcttggacactgtgtctagatttgttcttgcagctcttctgaaacacacaaatttacttagtcaagcatgtggagaaagccggcaagtaacttaaaactatcctcagacaaatatttgctctcatgatgtcagaaattaggtaacttttctattttggttcttcatttagatatcaacctggtaaacacttatcagaagtgtaccgttgtgtatacaaagttcgaagtcgtttacttgcttgcaagaaccttgaacttattcaaacaaggtcatcatcacgggacagatggatatcagaaaaccaggactctgcagatgttgatcctcaggagcattcatttactcgaactattgatgaagaagctgaaatggaagaacaggctgagagagaccgggaagaggggcatccggagccagaggatgaagaggaggaacgggaacatgaagtgatgacagctggcaaaatctttcagtgtttcctctcagcccgtgaagtagctcgtagccgagaccgagatagaatgaacagtggggcagggtctggggctcgagctgatgatccacctcctcagtctcagcaagagcgaagggtcagcacagaccttcctgagggtcaggatgtgtacactgctgcatgcaactccgtgatccatcggtgtgccctgttaatattaggagtaagtcctgtgatagatgagcttcagaagcgaagagaagaaggacagttgcagcaaccttcaacaagtgcctctgaagggggtggacttatgaccaggagtgaaagtcttactgcagagagccggctagtccacacaagcccaaattatagactgatcaaatcgaggagtgaatctgatttgtctcagcctgaatcagatgaagagggttacgcactgagtggcagacgaaatgttgatttggatttggcagcatctcacagaaagagaggtcctatgcacagtcaattggaatccctgagtgactcttgggctcgcctgaaacatagcagagactggttatgcaactcctcctattcctttgagtcagattttgatcttaccaagtctttgggagttcacactttgattgaaaatgttgtaagctttgtgagtggagatgtggggaatgccccaggttttaaagagccagaggaaagtatgtctacaagtccccaggcctccatcattgcaatggaacagcagcagttaagggcagaacttcgtttagaggcacttcatcagatcctcgttctattgtctgggatggaagaaaaaggtagcatctcactggcaggaagcagattgagttcaggcttccagtcctccacactactcacgtctgtgaggctgcagttcctagcagggtgttttggtttaggcactgttggacacacaggagccaagggagagagtggccgattgcatcactatcaggatgggatcagagcagctaagagaaatattcagattgaaatccaggtagctgtgcataaaatttatcaacagttgtctgctaccctggaaagagccctgcaagcaaacaagcatcacattgaagcccagcaacgtctgcttctggttacagtttttgccctaagtgttcattatcaaccagtagatgtttctttggcaatttccactggtctgctaaacgtattgtcacagttgtgtggtacagacaccatgctaggacagcccctgcagttgttgccaaagacgggtgtttcccagcttagcacagctttgaaagtggccagtacaaggttgctccagattctagccatcactactgggacctatgctgataaactgagtcccaaagtagttcaatccttgttggatctactctgtagtcagttgaagaatttattgtcccaaactggtgtactacatatggcctctttcggagaaggggagcaagaagacggtgaagaagaagaaaaaaaagttgactccagtggagaaactgagaagaaagatttcagagctgctcttaggaaacaacatgcagccgaactccatctaggggattttttagtttttcttcgcagagttgtatcttcaaaagcaattcaatcaaaaatggcttccccaaagtggaccgaagtgcttctaaatatagcatctcagaaatgttcttcaggtatccctctggttggtaacttaagaacaaggctccttgcacttcatgtccttgaagctgtgctgccagcttgtgaatctggtgtagaagatgatcaaatggcccagattgttgagcgcttattttcccttctctctgattgtatgtgggagacacccattgctcaggccaaacatgctattcagataaaggaaaaagaacaagaaataaaactacagaagcagggcgagttggaagaagaagatgagaatcttcctatccaagaagtatcctttgacccggagaaagctcagtgttgcctagtggagaatggacagattttaactcacggcagtggagggaaaggatatggattggcatctacaggagtaacttctgggtgctatcagtggaagttttatattgtgaaggaaaacagaggtaatgaaggcacgtgtgttggagtttctcgctggccagtacatgactttaatcaccgcactacctcggatatgtggctctatagggcctacagtggtaacctctatcacaatggagaacagactctcacattgtccagctttactcaaggagatttcattacctgtgtgttagacatggaagccaggaccatttcttttgggaaaaatggagaggaacccaaattagcttttgaagatgtggatgcagcagagttgtacccatgtgtgatgttctatagtagcaatccaggggaaaaggtgaaaatttgtgatatgcagatgcgtggcacaccccgagacttacttccaggagaccctatttgtagtccagtagcagcagtgctggctgaggccactattcagctcatccgtatccttcaccgaacagaccgttggacttactgcattaacaaaaaaatgatggaaaggcttcacaaaattaagatatgtattaaagagtcaggtcagaagctaaagaaaagccgctcggttcagagccgagaggaaaatgaaatgagagaggagaaggagagcaaagaggaagagaaaggtaaacatactaggcatggcctcgctgacctctcagagctgcagctgaggactctttgcatagaggtgtggcccgtgctggctgtgataggaggagttgatgctggtcttagagttggaggtcggtgtgttcacaagcaaactgggcgccatgccacgctgctgggagtggtcaaagagggcagcacgtctgccaaggtccaatgggatgaagcagaaattactatcagcttcccaactttttggtcgcctagtgatactccattgtataatctggaaccctgtgaaccattgccgtttgatgtggcgcgattccgaggcctgacggcttctgtgctgctggacctaacatatctcactggcgttcatgaagacatgggcaaacagagcaccaaacgacatgaaaagaaacaccgacatgaatccgaggagaaaggggatgttgagcagaaacctgagagtgaatccgctttagatatgcgaacaggcctaacatctgatgacgtcaaaagtcagagtaccacaagctccaaatcagaaaatgaaatcgcttcattttctttagatccaacactgccaagtgtggaatcccaacatcaaataacagaagggaaaagaaaaaatcatgaacacatgtccaaaaaccatgatgtagcccagtcagaaatcagagcagtccagctgtcctatctttacctcggtgctatgaagtcacttagtgcccttcttggctgtagtaaatatgctgagctgttgctgataccaaaagttctggctgaaaatggccacaactcagactgtgcaagttctccagttgttcatgaagacgtggagatgcgagcagccctgcagttcttgatgcgacacatggtgaagcgagcagtcatgcggtcacccataaagagagcattgggattagctgatctggaacgagcgcaagccatgatctataaattagtggttcatgggcttttggaagaccagtttgggggcaaaattaagcaagagattgatcaacaagctgaagaaagtgaccctgcccagcaggcacagacaccagttactactagcccatcagcctcaagcacgacctcctttatgagcagctctctggaggacaccacaactgccaccactccagtcactgacacagaaacagtgcctgcatccgagtccccgggagtgatgcctcttagtcttctcaggcaaatgttctctagttacccaactaccactgtacttcccacacgtcgggcacagactcctccaatatcttcgttaccaacctctccttctgatgaagtaggaaggaggcaaagtttaacttctcctgattcccagtcagcaaggccagctaaccgcacagccttgtcagacccaagcagtagactttcaacttctcctcctcctccagcaattgcagttcccttgctggaaatggggttctctcttcggcagattgccaaagccatggaagctacaggtgctaggggagaggctgatgcccagaatatcactgtccttgccatgtggatgatagagcaccctgggcatgaggatgaagaggagccccagtcgggcagcacagcagactctaggcctggagcagccgttctaggcagtggcgggaagtcaaatgatccctgttatttgcagtcacctggagacataccatcagctgatgctgctgaaatggaggaaggttttagtgaaagccctgataatttggatcatacagagaatgcagcttctggaagtggaccatcagctagaggtcgctcagcggtaacaagaagacacaagtttgacttagctgctcgcacactgctagcaagagcagcgggattataccgctctgtgcaggcccacaggaatcaaagtcggagagaaggaatatctttgcagcaagacccaggggcgttgtatgactttaatttagatgaggaattggaaattgatcttgatgatgaggcgatggaagctatgtttggacaagacctgaccagtgacaatgatattctgggaatgtggatcccagagcatgtttgtgagtctgaagacagggaagaagtggtggtgtgtgaactgtgtgaatgcagcgtcgtcagcttcaatcagcacatgaagagaaaccatccaggctgtgggcgcagtgcaaaccgccagggctatcgcagcaatggttcctatgtggatggctggtttggcggtgaatgtgggagtggaaatccatactacctgttatgtggcacctgcagggagaagtacttagccatgaagaccaaatctaagtcaacaagttctgaaaggtacaagggacaagctccagatctaattggcaagcaagacagtgtgtatgaagaagactgggacatgttggatgttgatgaagatgaaaagctaactggtgaagaagaatttgaattacttgctggaccgcttggtttaaatgaccggcgcattgtaccagaaccagttcagttccctgacagcgatccactgggagcatcagtagcaatggtcacagccaccaacagtatggaagagactctgatgcaaataggttgccatggctccgtagaaaagagctcctctgggagaataacgttaggagagcaggcagctgccctagcaaaccctcatgaccgtgtggtggctttaaggagagtgactgctgctgctcaggttcttctggccagaaccatggtcatgagagcgctgtctcttctctcagtcagtggttccagttgtagcctggctgctggtcttgagtctctggggctaacagatatccgaacgctagttcgattaatgtgcttggcagcagcagggagagctggcctctccaccagcccttctgccatggctagcacctcagaacgatcacgaggtgggcatagcaaggctaacaagcctatctcttgcctggcctatttgagcacagcagtgggatgtctggcatcaaatgctcctagtgctgccaaactgcttgtacagttgtgtacacagaacttgatttctgctgcaacaggtgtaaatctaaccacagttgatgactcaattcagcgaaagtttctacccagctttctccgaggaattgctgaagagaacaagcttgtgacctccccaaactttgttgtaacacaggcccttgtggcattgctagcagacaaaggggccaaactaagacctaactatgataagtcagaagttgaaaagaaaggccctctggagttggctaatgccctggcagcctgctgcctctcctccaggctgtcctcacagcatcggcaatgggcagctcagcaactcgtgcgcactcttgctgcacacgaccgtgacaaccaaactactctgcagacacttgctgatatgggaggagatcttagaaaatgctcctttatcaaattggaggctcatcagaacagagtaatgacatgtgtttggtgtaataaaaaaggtcttttggctacaagtggcaatgatggcaccatccgcgtatggaatgttaccaagaagcaatattcactgcaacagacctgtgtgttcaacagattggaaggggatgctgaggaaagcctgggatcacccagtgatccaagtttctcaccagtttcctggagtatcagtggcaaatatctagcaggcgctttggaaaagatggtgaatatctggcaagttaatggaggaaaaggattagtagatattcagcctcattgggtatctgccctggcttggccagaagagggtccggctacagcctggtcaggagagtctccagaattgttgttggtgggacggatggatggatctctgggactgattgaagttgttgatgtgtccaccatgcaccgtcgagaattggagcattgctatcgaaaggatgtgtctgttacttgcattgcatggttcagtgaagacagaccatttgcagtgggatattttgatggaaaactgttactgggaacaaaggaaccacttgagaaaggaggcattgttctaattgatgcacataaggatactcttattagcatgaagtgggaccctacaggtcatattcttatgacatgtgccaaagaagacagtgtgaaactctggggctctatttcgggatgctggtgctgtctacattcactctgccatccatctattgtaaatggcattgcttggtgccgccttccagggaaaggatccaagttgcagttactgatggctactggctgtcagagtggcttagtatgtgtttggcgcattcctcaagatactacacagaccaatgtgactagtgcagaaggatggtgggaccaggaatcaaattgccaggatggatataggaaatcatcaggagccaagtgtgtttatcagctgcggggacacatcactcctgttcggactgttgcctttagttctgatgggttggccctggtgtctggtggactaggtgggctcatgaacatttggtctttaagggatggctctgtcttgcaaactgttgtgataggctctggagctattcagaccacagtatggattccagaagttggagtagctgcttgctcaaatagatcaaaggatgttttggtcgtgaattgtacagcagaatgggcagctgccaatcatgttttggcaacctgtaggacagcattgaaacagcagggtgttctgggattgaacatggctccctgcatgagagcatttttggagcggctccccatgatgcttcaggagcagtatgcctatgaaaagcctcatgtggtttgtggtgaccaacttgttcatagcccctatatgcaatgcttggcttcccttgctgtgggacttcatctggatcagctgttgtgtaaccctccagtgccaccacaccaccagaactgtctgcctgaccctgcatcctggaatccaaatgaatgggcctggttagaatgtttctcaaccactataaaagctgccgaagccctgaccaatggagcccagtttccagaatcttttaccgttccagatctagaacctgttccagaggatgaacttgtatttctaatggataacagtaaatggattaacggcatggatgaacaaattatgtcttgggcaacttccagacctgaggactggcacctgggaggtaaatgtgatgtctacttatggggtgctggtaggcatggacagctggcagaagctggaagaaatgtaatggtacctgcagcagctccctcattctcacaggcccaacaggtcatttgtggtcagaattgtacctttgtcatccaggccaatggcacagtgttggcttgtggggaaggaagttatggcagattaggacaaggaaattcagatgaccttcatgtgctgacagttatttcagccttacaaggctttgtggtgacccagctggtgacttcctgtggttctgatgggcactctatggccctaactgaaagtggtgaggtctttagctggggagatggtgactatggtaaacttggccatgggaacagcgacaggcagcggcggcccaggcagatcgaggccttacaaggagaagaagtggtgcagatgtcttgtggcttcaagcactcagcagtggtcacttcagatggcaaactgttcacctttgggaatggtgactatggtcgtctgggtcttggaaatacctctaacaaaaaacttccagagagagtgactgcactggagggatatcagattggacaggtggcctgtggattaaaccacactttggcagtgtcagcagatggttccatggtgtgggcttttggagatggagactatggaaaactaggcttaggaaattccactgcaaaatcttcacctcagaaaattgacgtcctttgtggaattggaataaaaaaggttgcttgtggaactcagttttctgttgctttgaccaaagatggtcatgtgtatacctttggtcaagatcgcctgataggcttgccagaggggcgtgctcgcaatcacaatcgaccgcaacaaatccctgtcctggctggagtaatcattgaagatgtggcagttggagctgaacacacacttgctttggcatcaaatggagatgtgtatgcctgggggagcaattcagaagggcagctcggcttaggccataccaaccatgttcgagaaccaaccctggtaacaggtctgcaagggaaaaatgttcggcagatctcggctggccgctgccacagtgctgcatggacagcaccacctgtcccaccaagagcaccaggtgtgtcagtacctctgcagctgggcctgcctgacacagtgcccccccagtatggggcgctgagagaagtcagcattcacacggtgcgggccaggctccggctgctctaccacttctctgacctcatgtactcatcctggagactgctgaaccttagccccaacaaccagaacagcacatcccattataatgctggaacttggggcattgtacagggacaacttcggcctttgttagccccaagagtctacactctgccaatggtgcgctccataggaaaaaccatggttcaaggcaaaaactatggacctcagataactgtaaagaggatatcaaccagaggacggaagtgtaagcctatttttgtccaaatagcgagacaagtagttaagctgaatgcttcagacctccgcctgccttcccgagcgtggaaggttaagctggttggagaaggggctgatgatgctggaggagtgtttgatgacaccatcacagagatgtgccaggaacttgaaactggtattgttgaccttcttataccctctcccaatgccaccgcagaagtgggttacaatagggacaggttcctttttaacccttctgcctgcctcgatgaacacttaatgcagtttaagtttttaggaattttaatgggggttgccattcgcacaaagaagcctctggacctccacttggcccctctggtgtggaagcagctgtgctgtgtcccactcaccctagaggacctggaggaggtggatctgctctacgtgcagactctcaacagcattcttcacattgaagacagtgggattaccgaggagagtttccatgagatgattcctcttgattcttttgttggccagagtgctgatggcaaaatggttcctataatccctggtggaaatagtatcccactcacattttccaacaggaaggaatatgtggagagggccattgaatatcgacttcatgagatggacagacaggtggctgcagtccgagaagggatgtcctggattgttcctgtgccgctgctgtccctcctcacagcaaaacaactggagcagatggtgtgtgggatgcccgagatctctgtggaagtcttgaagaaagtggtgcggtaccgtgaggtggatgagcagcatcagctggtgcagtggttctggcacacgctggaagagttctccaatgaggagcgggtgcttttcatgaggtttgtgtcaggaagatctcgactaccagccaacactgctgacatttctcagagatttcaaatcatgaaggttgataggccttacgacagtctgcctacctcacagacctgcttcttccagctgaggctgcccccgtactccagccagctggtcatggccgagcgcctgcgctatgccatcaacaactgccgctcaatcgacatggacaactacatgctctcgagaaacgtggacaacgccgagggctccgacactgactactgaccgtgcgggtgctctcaccctcccttctctccctcaataatgctcacttctgatttgatgttgatatacttttatggtaactacatagatgttataagaacataaaccaacattataaacaatggccacatttagttactctaaatgtaacaaagaaattagatgtttttatttttctgtgattgtacaaaaacaacaaaaacgaagtgctctcagtcaggtttttccctccatatttttggtcacttttgataagtttgcatgaaaccattttggtgcatttttagttgggaatggtacatttttgtaaatccacccagtgaacatgaaattgtacattgtgtataattgttcattagaaaggacagttttacatgaatattcatatatttattttgttttaatttgaattgcctgttcagggttccttatgcagagaaataaagcagattcaggaattgg

SEQ ID NO: 60535 - DNA, 9696 bp, Homo sapiens
gcagcaaaaataaaggacgcgaccgaattccgcctctgcggagccgggctcgggtcgccggagccgcgccccaccccgccagctccagagccacgtaaatggggtttcaccgtgttagccaggatggtctcaatctcctgacctcgtgatccgcccacctcggcctcccaaagtactgggattacaggactaatggctgaaggataaatcaacatggcaactatgattccaccagtgaagctgaaatggcttgaacacttgaacagctcctggattacagaggacagtgaatctattgctacaagagagggagttgctgttctgtattctaaactggttagcaataaggaagtagtacctttgccccaacaagttttatgcctcaaaggaccacagttgccagactttgaacgtgagtctctttcaagtgatgagcaggaccactatttggatgcccttcttagcagccagctagcattggcaaagatggtatgttcagattccccatttgccggggcacttagaaaacgactgcttgtactccagcgtgtcttttatgcactttctaataaataccatgacaaaggcaaggtgaagcagcagcagcattctccggagagcagttctggttcagcagatgtccattctgttagtgaacgcccccggtcaagcactgatgcacttatagaaatgggtgttcgaactggtctaagtttattatttgcgcttctaagacaaagttggatgatgcctgtgtcaggacctggtctcagtctttgcaacgatgtcattcatactgcaattgaagttgtgagctctttgccaccattatcattagcaaatgaaagcaagattcctcctatgggcttggactgcttatcgcaagtaacaacatttcttaaaggagtcactattcctaattctggggcagacactttaggtcgtagattagcttctgagttgctgcttggtttggcagctcaacgaggctcattgcgatatcttcttgaatggatagaaatggctttgggggcttcggcagttgtacacaccatggagaaaggcaaactactctcaagccaggaaggaatgatcagctttgactgctttatgaccatattaatgcagatgaggcgttctttgggttcatctgctgatcggagtcagtggagagaaccaaccagaacatcggatggcttgtgctccctttacgaggcagcattatgtctctttgaagaggtttgcagaatggcttctgattattcgagaacatgtgctagcccagatagcattcagactggtgatgctcccattgtctccgaaacctgtgaggtttatgtttgggggagcaatagcagccatcagttggtagaaggtacacaggagaaaatactgcaacccaaactggctcctagtttctctgatgcacagaccattgaagctggacagtactgcacttttgtcatttctacggatggctcagttagagcttgcgggaaaggcagctatgggagactgggccttggagactccaataatcagtcaactttaaaaaagttaacattcgagcctcacagatccattaaaaaggtttcatcttctaaaggatctgatggtcacactttagcctttacgacagaaggagaagtcttcagttggggagatggtgattatgggaaactggggcatggaaatagttcaacacagaaatatcccaagcttattcagggacctctacaaggaaaggtagttgtttgtgtgtcagctggatacagacatagtgctgctgtcacagaggatggggaattatacacatggggtgaaggagactttggaagattaggtcatggtgacagcaatagtcgtaacattccaacattagtaaaagacatcagcaatgtaggagaggtttcttgtggcagttcacatactattgctctgtctaaagatgggagaactgtatggtcttttggaggaggagacaatggtaaacttggtcatggtgataccaacagagtgtataaacctaaagttattgaagctttacaaggaatgttcattcgcaaagtttgtgctgggagccagtcttcacttgctttgacatcaacagggcaggtctatgcttggggctgtggagcttgtctaggttgtggttcttcagaagctactgctttgagacccaagcttattgaagaactggctgccacaagaatagttgatgtttctattggagacagtcattgtttggctctttctcatgataatgaagtttatgcctggggcaataactcaatggggcaatgtggtcagggaaattccacaggtcctattactaaaccaaagaaagtgagtggcttagatggcatagctattcagcagatttcggctggaacatcacatagtctggcatggactgctcttcctagggacagacaagttgttgcatggcaccgaccttattgtgtagatcttgaagagagtaccttctcacacctgcgttcttttcttgagagatactgtgataaaataaacagtgagattcccccactccctttcccttcatcaagagaacaccacagttttctcaagctgtgcctgaagctactttcaaatcaccttgctcttgcacttgcgggaggggtagctaccagcattctcgggaggcaggcaggtccacttcgaaatttgctcttcagactgatggactcaactgtcccagatgaaatccaagaggtggtaattgaaactttatcagtgggagcaaccatgctgttacctccattacgagaacggatggaattacttcattctcttttacctcaaggacctgatagatgggaaagcttatctaaaggacagagaatgcaactggatatcatcctgacaagtttgcaagatcatacccacgtagcctccctacttggctatagttcaccctctgatgctgctgacctatcttctgtgtgtactggctacggaaatctgtcagatcaaccttacggcactcagagctgccatccagatacccacctggctgaaattttgatgaagaccctcttaagaaatttaggattttatacagatcaagcatttggagagctagaaaagaatagtgataaatttctacttggaacatcatcatcagaaaacagtcagcctgctcatcttcatgaactgctatgttcactacagaaacagctgctggcattttgccatatcaataacattagtgagaactcaagcagtgtggcattgcttcataaacatcttcagcttttgttgcctcatgccacagatatttattcacgttctgcaaatttgctcaaagaaagtccttggaatggcagtgttggagaaaaattaagagatgtgatatacgtctcagctgctggcagtatgctctgccagattgttaactccctgctgttactccctgtgtcagtggctcggcctttattgagttacctcctcgacttgttgccacctcttgattgccttaatagactcctgccagctgctgatcttttagaagaccaggagttacagtggcctcttcatggagggccagaactaattgatcctgctggtctgccattacctcagccagctcagtcctgggtatggcttgtggatctagaaagaacaattgctctccttattgggcggtgtcttggtggcatgcttcagggctcccctgtgtctccagaggaacaggacactgcatattggatgaaaacgccactgttcagtgacggtgtagaaatggacactcctcaattggataaatgtatgagttgcctgttagaagtagcactttctggaaatgaagaacagaagccttttgattataaattgcggcctgaaattgctgtctatgtagacttggcattgggttgttctaaagagcctgcccgaagcctttggatcagcatgcaggactatgctgttagtaaagattgggacagtgcaactttaagtaatgagtcactcttggacactgtgtctagatttgttcttgcagctcttctgaaacacacaaatttacttagtcaagcatgtggagaaagccggcaagtaacttaaaactatcctcagacaaatatttgctctcatgatgtcagaaattaggtaacttttctattttggttcttcatttagatatcaacctggtaaacacttatcagaagtgtaccgttgtgtatacaaagttcgaagtcgtttacttgcttgcaagaaccttgaacttattcaaacaaggtcatcatcacgggacagatggatatcagaaaaccaggactctgcagatgttgatcctcaggagcattcatttactcgaactattgatgaagaagctgaaatggaagaacaggctgagagagaccgggaagaggggcatccggagccagaggatgaagaggaggaacgggaacatgaagtgatgacagctggcaaaatctttcagtgtttcctctcagcccgtgaagtagctcgtagccgagaccgagatagaatgaacagtggggcagggtctggggctcgagctgatgatccacctcctcagtctcagcaagagcgaagggtcagcacagaccttcctgagggtcaggatgtgtacactgctgcatgcaactccgtgatccatcggtgtgccctgttaatattaggagtaagtcctgtgatagatgagcttcagaagcgaagagaagaaggacagttgcagcaaccttcaacaagtgcctctgaagggggtggacttatgaccaggagtgaaagtcttactgcagagagccggctagtccacacaagcccaaattatagactgatcaaatcgaggagtgaatctgatttgtctcagcctgaatcagatgaagagggttacgcactgagtggcagacgaaatgttgatttggatttggcagcatctcacagaaagagaggtcctatgcacagtcaattggaatccctgagtgactcttgggctcgcctgaaacatagcagagactggttatgcaactcctcctattcctttgagtcagattttgatcttaccaagtctttgggagttcacactttgattgaaaatgttgtaagctttgtgagtggagatgtggggaatgccccaggttttaaagagccagaggaaagtatgtctacaagtccccaggcctccatcattgcaatggaacagcagcagttaagggcagaacttcgtttagaggcacttcatcagatcctcgttctattgtctgggatggaagaaaaaggtagcatctcactggcaggaagcagattgagttcaggcttccagtcctccacactactcacgtctgtgaggctgcagttcctagcagggtgttttggtttaggcactgttggacacacaggagccaagggagagagtggccgattgcatcactatcaggatgggatcagagcagctaagagaaatattcagattgaaatccaggtagctgtgcataaaatttatcaacagttgtctgctaccctggaaagagccctgcaagcaaacaagcatcacattgaagcccagcaacgtctgcttctggttacagtttttgccctaagtgttcattatcaaccagtagatgtttctttggcaatttccactggtctgctaaacgtattgtcacagttgtgtggtacagacaccatgctaggacagcccctgcagttgttgccaaagacgggtgtttcccagcttagcacagctttgaaagtggccagtacaaggttgctccagattctagccatcactactgggacctatgctgataaactgagtcccaaagtagttcaatccttgttggatctactctgtagtcagttgaagaatttattgtcccaaactggtgtactacatatggcctctttcggagaaggggagcaagaagacggtgaagaagaagaaaaaaaagttgactccagtggagaaactgagaagaaagatttcagagctgctcttaggaaacaacatgcagccgaactccatctaggggattttttagtttttcttcgcagagttgtatcttcaaaagcaattcaatcaaaaatggcttccccaaagtggaccgaagtgcttctaaatatagcatctcagaaatgttcttcaggtatccctctggttggtaacttaagaacaaggctccttgcacttcatgtccttgaagctgtgctgccagcttgtgaatctggtgtagaagatgatcaaatggcccagattgttgagcgcttattttcccttctctctgattgtatgtgggagacacccattgctcaggccaaacatgctattcagataaaggaaaaagaacaagaaataaaactacagaagcagggcgagttggaagaagaagatgagaatcttcctatccaagaagtatcctttgacccggagaaagctcagtgttgcctagtggagaatggacagattttaactcacggcagtggagggaaaggatatggattggcatctacaggagtaacttctgggtgctatcagtggaagttttatattgtgaaggaaaacagaggtaatgaaggcacgtgtgttggagtttctcgctggccagtacatgactttaatcaccgcactacctcggatatgtggctctatagggcctacagtggtaacctctatcacaatggagaacagactctcacattgtccagctttactcaaggagatttcattacctgtgtgttagacatggaagccaggaccatttcttttgggaaaaatggagaggaacccaaattagcttttgaagatgtggatgcagcagagttgtacccatgtgtgatgttctatagtagcaatccaggggaaaaggtgaaaatttgtgatatgcagatgcgtggcacaccccgagacttacttccaggagaccctatttgtagtccagtagcagcagtgctggctgaggccactattcagctcatccgtatccttcaccgaacagaccgttggacttactgcattaacaaaaaaatgatggaaaggcttcacaaaattaagatatgtattaaagagtcaggtcagaagctaaagaaaagccgctcggttcagagccgagaggaaaatgaaatgagagaggagaaggagagcaaagaggaagagaaaggtaaacatactaggcatggcctcgctgacctctcagagctgcagctgaggactctttgcatagaggtgtggcccgtgctggctgtgataggaggagttgatgctggtcttagagttggaggtcggtgtgttcacaagcaaactgggcgccatgccacgctgctgggagtggtcaaagagggcagcacgtctgccaaggtccaatgggatgaagcagaaattactatcagcttcccaactttttggtcgcctagtgatactccattgtataatctggaaccctgtgaaccattgccgtttgatgtggcgcgattccgaggcctgacggcttctgtgctgctggacctaacatatctcactggcgttcatgaagacatgggcaaacagagcaccaaacgacatgaaaagaaacaccgacatgaatccgaggagaaaggggatgttgagcagaaacctgagagtgaatccgctttagatatgcgaacaggcctaacatctgatgacgtcaaaagtcagagtaccacaagctccaaatcagaaaatgaaatcgcttcattttctttagatccaacactgccaagtgtggaatcccaacatcaaataacagaagggaaaagaaaaaatcatgaacacatgtccaaaaaccatgatgtagcccagtcagaaatcagagcagtccagctgtcctatctttacctcggtgctatgaagtcacttagtgcccttcttggctgtagtaaatatgctgagctgttgctgataccaaaagttctggctgaaaatggccacaactcagactgtgcaagttctccagttgttcatgaagacgtggagatgcgagcagccctgcagttcttgatgcgacacatggtgaagcgagcagtcatgcggtcacccataaagagagcattgggattagctgatctggaacgagcgcaagccatgatctataaattagtggttcatgggcttttggaagaccagtttgggggcaaaattaagcaagagattgatcaacaagctgaagaaagtgaccctgcccagcaggcacagacaccagttactactagcccatcagcctcaagcacgacctcctttatgagcagctctctggaggacaccacaactgccaccactccagtcactgacacagaaacagtgcctgcatccgagtccccgggagtgatgcctcttagtcttctcaggcaaatgttctctagttacccaactaccactgtacttcccacacgtcgggcacagactcctccaatatcttcgttaccaacctctccttctgatgaagtaggaaggaggcaaagtttaacttctcctgattcccagtcagcaaggccagctaaccgcacagccttgtcagacccaagcagtagactttcaacttctcctcctcctccagcaattgcagttcccttgctggaaatggggttctctcttcggcagattgccaaagccatggaagctacaggtgctaggggagaggctgatgcccagaatatcactgtccttgccatgtggatgatagagcaccctgggcatgaggatgaagaggagccccagtcgggcagcacagcagactctaggcctggagcagccgttctaggcagtggcgggaagtcaaatgatccctgttatttgcagtcacctggagacataccatcagctgatgctgctgaaatggaggaaggttttagtgaaagccctgataatttggatcatacagagaatgcagcttctggaagtggaccatcagctagaggtcgctcagcggtaacaagaagacacaagtttgacttagctgctcgcacactgctagcaagagcagcgggattataccgctctgtgcaggcccacaggaatcaaagtcggagagaaggaatatctttgcagcaagacccaggggcgttgtatgactttaatttagatgaggaattggaaattgatcttgatgatgaggcgatggaagctatgtttggacaagacctgaccagtgacaatgatattctgggaatgtggatcccagagcatgtttgtgagtctgaagacagggaagaagtggtggtgtgtgaactgtgtgaatgcagcgtcgtcagcttcaatcagcacatgaagagaaaccatccaggctgtgggcgcagtgcaaaccgccagggctatcgcagcaatggttcctatgtggatggctggtttggcggtgaatgtgggagtggaaatccatactacctgttatttgcagtcacctggagacataccatcagctgatgctgctgaaatggaggaaggttttagtgaaagccctgataatttggatcatacagagaatgcagcttctggaagtggaccatcagctagaggtcgctcagcggtaacaagaagacacaagtttgacttagctgctcgcacactgctagcaagagcagcgggattataccgctctgtgcaggcccacaggaatcaaagtcggagagaaggaatatctttgcagcaagacccaggggcgttgtatgactttaatttagatgaggaagtggaaagtgatc

SEQ ID NO: 60536 - DNA, 8238 bp, Homo sapiens
gcagcaaaaataaaggacgcgaccgaattccgcctctgcggagccgggctcgggtcgccggagccgcgccccaccccgccagctccagagccacgtaaatggggtttcaccgtgttagccaggatggtctcaatctcctgacctcgtgatccgcccacctcggcctcccaaagtactgggattacaggactaatggctgaaggataaatcaacatggcaactatgattccaccagtgaagctgaaatggcttgaacacttgaacagctcctggattacagaggacagtgaatctattgctacaagagagggagttgctgttctgtattctaaactggttagcaataaggaagtagtacctttgccccaacaagttttatgcctcaaaggaccacagttgccagactttgaacgtgagtctctttcaagtgatgagcaggaccactatttggatgcccttcttagcagccagctagcattggcaaagatggtatgttcagattccccatttgccggggcacttagaaaacgactgcttgtactccagcgtgtcttttatgcactttctaataaataccatgacaaaggcaaggtgaagcagcagcagcattctccggagagcagttctggttcagcagatgtccattctgttagtgaacgcccccggtcaagcactgatgcacttatagaaatgggtgttcgaactggtctaagtttattatttgcgcttctaagacaaagttggatgatgcctgtgtcaggacctggtctcagtctttgcaacgatgtcattcatactgcaattgaagttgtgagctctttgccaccattatcattagcaaatgaaagcaagattcctcctatgggcttggactgcttatcgcaagtaacaacatttcttaaaggagtcactattcctaattctggggcagacactttaggtcgtagattagcttctgagttgctgcttggtttggcagctcaacgaggctcattgcgatatcttcttgaatggatagaaatggctttgggggcttcggcagttgtacacaccatggagaaaggcaaactactctcaagccaggaaggaatgatcagctttgactgctttatgaccatattaatgcagatgaggcgttctttgggttcatctgctgatcggagtcagtggagagaaccaaccagaacatcggatggcttgtgctccctttacgaggcagcattatgtctctttgaagaggtttgcagaatggcttctgattattcgagaacatgtgctagcccagatagcattcagactggtgatgctcccattgtctccgaaacctgtgaggtttatgtttgggggagcaatagcagccatcagttggtagaaggtacacaggagaaaatactgcaacccaaactggctcctagtttctctgatgcacagaccattgaagctggacagtactgcacttttgtcatttctacggatggctcagttagagcttgcgggaaaggcagctatgggagactgggccttggagactccaataatcagtcaactttaaaaaagttaacattcgagcctcacagatccattaaaaaggtttcatcttctaaaggatctgatggtcacactttagcctttacgacagaaggagaagtcttcagttggggagatggtgattatgggaaactggggcatggaaatagttcaacacagaaatatcccaagcttattcagggacctctacaaggaaaggtagttgtttgtgtgtcagctggatacagacatagtgctgctgtcacagaggatggggaattatacacatggggtgaaggagactttggaagattaggtcatggtgacagcaatagtcgtaacattccaacattagtaaaagacatcagcaatgtaggagaggtttcttgtggcagttcacatactattgctctgtctaaagatgggagaactgtatggtcttttggaggaggagacaatggtaaacttggtcatggtgataccaacagagtgtataaacctaaagttattgaagctttacaaggaatgttcattcgcaaagtttgtgctgggagccagtcttcacttgctttgacatcaacagggcaggtctatgcttggggctgtggagcttgtctaggttgtggttcttcagaagctactgctttgagacccaagcttattgaagaactggctgccacaagaatagttgatgtttctattggagacagtcattgtttggctctttctcatgataatgaagtttatgcctggggcaataactcaatggggcaatgtggtcagggaaattccacaggtcctattactaaaccaaagaaagtgagtggcttagatggcatagctattcagcagatttcggctggaacatcacatagtctggcatggactgctcttcctagggacagacaagttgttgcatggcaccgaccttattgtgtagatcttgaagagagtaccttctcacacctgcgttcttttcttgagagatactgtgataaaataaacagtgagattcccccactccctttcccttcatcaagagaacaccacagttttctcaagctgtgcctgaagctactttcaaatcaccttgctcttgcacttgcgggaggggtagctaccagcattctcgggaggcaggcaggtccacttcgaaatttgctcttcagactgatggactcaactgtcccagatgaaatccaagaggtggtaattgaaactttatcagtgggagcaaccatgctgttacctccattacgagaacggatggaattacttcattctcttttacctcaaggacctgatagatgggaaagcttatctaaaggacagagaatgcaactggatatcatcctgacaagtttgcaagatcatacccacgtagcctccctacttggctatagttcaccctctgatgctgctgacctatcttctgtgtgtactggctacggaaatctgtcagatcaaccttacggcactcagagctgccatccagatacccacctggctgaaattttgatgaagaccctcttaagaaatttaggattttatacagatcaagcatttggagagctagaaaagaatagtgataaatttctacttggaacatcatcatcagaaaacagtcagcctgctcatcttcatgaactgctatgttcactacagaaacagctgctggcattttgccatatcaataacattagtgagaactcaagcagtgtggcattgcttcataaacatcttcagcttttgttgcctcatgccacagatatttattcacgttctgcaaatttgctcaaagaaagtccttggaatggcagtgttggagaaaaattaagagatgtgatatacgtctcagctgctggcagtatgctctgccagattgttaactccctgctgttactccctgtgtcagtggctcggcctttattgagttacctcctcgacttgttgccacctcttgattgccttaatagactcctgccagctgctgatcttttagaagaccaggagttacagtggcctcttcatggagggccagaactaattgatcctgctggtctgccattacctcagccagctcagtcctgggtatggcttgtggatctagaaagaacaattgctctccttattgggcggtgtcttggtggcatgcttcagggctcccctgtgtctccagaggaacaggacactgcatattggatgaaaacgccactgttcagtgacggtgtagaaatggacactcctcaattggataaatgtatgagttgcctgttagaagtagcactttctggaaatgaagaacagaagccttttgattataaattgcggcctgaaattgctgtctatgtagacttggcattgggttgttctaaagagcctgcccgaagcctttggatcagcatgcaggactatgctgttagtaaagattgggacagtgcaactttaagtaatgagtcactcttggacactgtgtctagatttgttcttgcagctcttctgaaacacacaaatttacttagtcaagcatgtggagaaagccggcaagtaacttaaaactatcctcagacaaatatttgctctcatgatgtcagaaattaggtaacttttctattttggttcttcatttagatatcaacctggtaaacacttatcagaagtgtaccgttgtgtatacaaagttcgaagtcgtttacttgcttgcaagaaccttgaacttattcaaacaaggtcatcatcacgggacagatggatatcagaaaaccaggactctgcagatgttgatcctcaggagcattcatttactcgaactattgatgaagaagctgaaatggaagaacaggctgagagagaccgggaagaggggcatccggagccagaggatgaagaggaggaacgggaacatgaagtgatgacagctggcaaaatctttcagtgtttcctctcagcccgtgaagtagctcgtagccgagaccgagatagaatgaacagtggggcagggtctggggctcgagctgatgatccacctcctcagtctcagcaagagcgaagggtcagcacagaccttcctgagggtcaggatgtgtacactgctgcatgcaactccgtgatccatcggtgtgccctgttaatattaggagtaagtcctgtgatagatgagcttcagaagcgaagagaagaaggacagttgcagcaaccttcaacaagtgcctctgaagggggtggacttatgaccaggagtgaaagtcttactgcagagagccggctagtccacacaagcccaaattatagactgatcaaatcgaggagtgaatctgatttgtctcagcctgaatcagatgaagagggttacgcactgagtggcagacgaaatgttgatttggatttggcagcatctcacagaaagagaggtcctatgcacagtcaattggaatccctgagtgactcttgggctcgcctgaaacatagcagagactggttatgcaactcctcctattcctttgagtcagattttgatcttaccaagtctttgggagttcacactttgattgaaaatgttgtaagctttgtgagtggagatgtggggaatgccccaggttttaaagagccagaggaaagtatgtctacaagtccccaggcctccatcattgcaatggaacagcagcagttaagggcagaacttcgtttagaggcacttcatcagatcctcgttctattgtctgggatggaagaaaaaggtagcatctcactggcaggaagcagattgagttcaggcttccagtcctccacactactcacgtctgtgaggctgcagttcctagcagggtgttttggtttaggcactgttggacacacaggagccaagggagagagtggccgattgcatcactatcaggatgggatcagagcagctaagagaaatattcagattgaaatccaggtagctgtgcataaaatttatcaacagttgtctgctaccctggaaagagccctgcaagcaaacaagcatcacattgaagcccagcaacgtctgcttctggttacagtttttgccctaagtgttcattatcaaccagtagatgtttctttggcaatttccactggtctgctaaacgtattgtcacagttgtgtggtacagacaccatgctaggacagcccctgcagttgttgccaaagacgggtgtttcccagcttagcacagctttgaaagtggccagtacaaggttgctccagattctagccatcactactgggacctatgctgataaactgagtcccaaagtagttcaatccttgttggatctactctgtagtcagttgaagaatttattgtcccaaactggtgtactacatatggcctctttcggagaaggggagcaagaagacggtgaagaagaagaaaaaaaagttgactccagtggagaaactgagaagaaagatttcagagctgctcttaggaaacaacatgcagccgaactccatctaggggattttttagtttttcttcgcagagttgtatcttcaaaagcaattcaatcaaaaatggcttccccaaagtggaccgaagtgcttctaaatatagcatctcagaaatgttcttcaggtatccctctggttggtaacttaagaacaaggctccttgcacttcatgtccttgaagctgtgctgccagcttgtgaatctggtgtagaagatgatcaaatggcccagattgttgagcgcttattttcccttctctctgattgtatgtgggagacacccattgctcaggccaaacatgctattcagataaaggaaaaagaacaagaaataaaactacagaagcagggcgagttggaagaagaagatgagaatcttcctatccaagaagtatcctttgacccggagaaagctcagtgttgcctagtggagaatggacagattttaactcacggcagtggagggaaaggatatggattggcatctacaggagtaacttctgggtgctatcagtggaagttttatattgtgaaggaaaacagaggtaatgaaggcacgtgtgttggagtttctcgctggccagtacatgactttaatcaccgcactacctcggatatgtggctctatagggcctacagtggtaacctctatcacaatggagaacagactctcacattgtccagctttactcaaggagatttcattacctgtgtgttagacatggaagccaggaccatttcttttgggaaaaatggagaggaacccaaattagcttttgaagatgtggatgcagcagagttgtacccatgtgtgatgttctatagtagcaatccaggggaaaaggtgaaaatttgtgatatgcagatgcgtggcacaccccgagacttacttccaggagaccctatttgtagtccagtagcagcagtgctggctgaggccactattcagctcatccgtatccttcaccgaacagaccgttggacttactgcattaacaaaaaaatgatggaaaggcttcacaaaattaagatatgtattaaagagtcaggtcagaagctaaagaaaagccgctcggttcagagccgagaggaaaatgaaatgagagaggagaaggagagcaaagaggaagagaaaggtaaacatactaggcatggcctcgctgacctctcagagctgcagctgaggactctttgcatagaggtgtggcccgtgctggctgtgataggaggagttgatgctggtcttagagttggaggtcggtgtgttcacaagcaaactgggcgccatgccacgctgctgggagtggtcaaagagggcagcacgtctgccaaggtccaatgggatgaagcagaaattactatcagcttcccaactttttggtcgcctagtgatactccattgtataatctggaaccctgtgaaccattgccgtttgatgtggcgcgattccgaggcctgacggcttctgtgctgctggacctaacatatctcactggcgttcatgaagacatgggcaaacagagcaccaaacgacatgaaaagaaacaccgacatgaatccgaggagaaaggggatgttgagcagaaacctgagagtgaatccgctttagatatgcgaacaggcctaacatctgatgacgtcaaaagtcagagtaccacaagctccaaatcagaaaatgaaatcgcttcattttctttagatccaacactgccaagtgtggaatcccaacatcaaataacagaagggaaaagaaaaaatcatgaacacatgtccaaaaaccatgatgtagcccagtcagaaatcagagcagtccagctgtcctatctttacctcggtgctatgaagtcacttagtgcccttcttggctgtagtaaatatgctgagctgttgctgataccaaaagttctggctgaaaatggccacaactcagactgtgcaagttctccagttgttcatgaagacgtggagatgcgagcagccctgcagttcttgatgcgacacatggtgaagcgagcagtcatgcggtcacccataaagagagcattgggattagctgatctggaacgagcgcaagccatgatctataaattagtggttcatgggcttttggaagaccagtttgggggcaaaattaagcaaggtatgttatctgattttttttttttttgcttttgtgctgttgagattattttcataattgtcagaagtgatacattctgtaagtgatttgt

SEQ ID NO: 60537 - DNA, 5650 bp, Homo sapiens
ggtgatctagaggatcccggtcgctcgttgccatggctccgtagaaaagagctcctctgggagaataacgttaggagagcaggcagctgccctagcaaaccctcatgaccgtgtggtggctttaaggagagtgactgctgctgctcaggttcttctggccagaaccatggtcatgagagcgctgtctcttctctcagtcagtggttccagttgtagcctggctgctggtcttgagtctctggggctaacagatatccgaacgctagttcgattaatgtgcttggcagcagcagggagagctggcctctccaccagcccttctgccatggctagcacctcagaacgatcacgaggtgggcatagcaaggctaacaagcctatctcttgcctggcctatttgagcacagcagtgggatgtctggcatcaaatgctcctagtgctgccaaactgcttgtacagttgtgtacacagaacttgatttctgctgcaacaggtgtaaatctaaccacagttgatgactcaattcagcgaaagtttctacccagctttctccgaggaattgctgaagagaacaagcttgtgacctccccaaactttgttgtaacacaggcccttgtggcattgctagcagacaaaggggccaaactaagacctaactatgataagtcagaagttgaaaagaaaggccctctggagttggctaatgccctggcagcctgctgcctctcctccaggctgtcctcacagcatcggcaatgggcagctcagcaactcgtgcgcactcttgctgcacacgaccgtgacaaccaaactactctgcagacacttgctgatatgggaggagatcttagaaaatgctcctttatcaaattggaggctcatcagaacagagtaatgacatgtgtttggtgtaataaaaaaggtcttttggctacaagtggcaatgatggcaccatccgcgtatggaatgttaccaagaagcaatattcactgcaacagacctgtgtgttcaacagattggaaggggatgctgaggaaagcctgggatcacccagtgatccaagtttctcaccagtttcctggagtatcagtggcaaatatctagcaggcgctttggaaaagatggtgaatatctggcaagttaatggaggaaaaggattagtagatattcagcctcattgggtatctgccctggcttggccagaagagggtccggctacagcctggtcaggagagtctccagaattgttgttggtgggacggatggatggatctctgggactgattgaagttgttgatgtgtccaccatgcaccgtcgagaattggagcattgctatcgaaaggatgtgtctgttacttgcattgcatggttcagtgaagacagaccatttgcagtgggatattttgatggaaaactgttactgggaacaaaggaaccacttgagaaaggaggcattgttctaattgatgcacataaggatactcttattagcatgaagtgggaccctacaggtcatattcttatgacatgtgccaaagaagacagtgtgaaactctggggctctatttcgggatgctggtgctgtctacattcactctgccatccatctattgtaaatggcattgcttggtgccgccttccagggaaaggatccaagttgcagttactgatggctactggctgtcagagtggcttagtatgtgtttggcgcattcctcaagatactacacagaccaatgtgactagtgcagaaggatggtgggaccaggaatcaaattgccaggatggatataggaaatcatcaggagccaagtgtgtttatcagctgcggggacacatcactcctgttcggactgttgcctttagttctgatgggttggccctggtgtctggtggactaggtgggctcatgaacatttggtctttaagggatggctctgtcttgcaaactgttgtgataggctctggagctattcagaccacagtatggattccagaagttggagtagctgcttgctcaaatagatcaaaggatgttttggtcgtgaattgtacagcagaatgggcagctgccaatcatgttttggcaacctgtaggacagcattgaaacagcagggtgttctgggattgaacatggctccctgcatgagagcatttttggagcggctccccatgatgcttcaggagcagtatgcctatgaaaagcctcatgtggtttgtggtgaccaacttgttcatagcccctatatgcaatgcttggcttcccttgctgtgggacttcatctggatcagctgttgtgtaaccctccagtgccaccacaccaccagaactgtctgcctgaccctgcatcctggaatccaaatgaatgggcctggttagaatgtttctcaaccactataaaagctgccgaagccctgaccaatggagcccagtttccagaatcttttaccgttccagatctagaacctgttccagaggatgaacttgtatttctaatggataacagtaaatggattaacggcatggatgaacaaattatgtcttgggcaacttccagacctgaggactggcacctgggaggtaaatgtgatgtctacttatggggtgctggtaggcatggacagctggcagaagctggaagaaatgtaatggtacctgcagcagctccctcattctcacaggcccaacaggtcatttgtggtcagaattgtacctttgtcatccaggccaatggcacagtgttggcttgtggggaaggaagttatggcagattaggacaaggaaattcagatgaccttcatgtgctgacagttatttcagccttacaaggctttgtggtgacccagctggtgacttcctgtggttctgatgggcactctatggccctaactgaaagtggtgaggtctttagctggggagatggtgactatggtaaacttggccatgggaacagcgacaggcagcggcggcccaggcagatcgaggccttacaaggagaagaagtggtgcagatgtcttgtggcttcaagcactcagcagtggtcacttcagatggcaaactgttcacctttgggaatggtgactatggtcgtctgggtcttggaaatacctctaacaaaaaacttccagagagagtgactgcactggagggatatcagattggacaggtggcctgtggattaaaccacactttggcagtgtcagcagatggttccatggtgtgggcttttggagatggagactatggaaaactaggcttaggaaattccactgcaaaatcttcacctcagaaaattgacgtcctttgtggaattggaataaaaaaggttgcttgtggaactcagttttctgttgctttgaccaaagatggtcatgtgtatacctttggtcaagatcgcctgataggcttgccagaggggcgtgctcgcaatcacaatcgaccgcaacaaatccctgtcctggctggagtaatcattgaagatgtggcagttggagctgaacacacacttgctttggcatcaaatggagatgtgtatgcctgggggagcaattcagaagggcagctcggcttaggccataccaaccatgttcgagaaccaaccctggtaacaggtctgcaagggaaaaatgttcggcagatctcggctggccgctgccacagtgctgcatggacagcaccacctgtcccaccaagagcaccaggtgtgtcagtacctctgcagctgggcctgcctgacacagtgcccccccagtatggggcgctgagagaagtcagcattcacacggtgcgggccaggctccggctgctctaccacttctctgacctcatgtactcatcctggagactgctgaaccttagccccaacaaccagaacagcacatcccattataatgctggaacttggggcattgtacagggacaacttcggcctttgttagccccaagagtctacactctgccaatggtgcgctccataggaaaaaccatggttcaaggcaaaaactatggacctcagataactgtaaagaggatatcaaccagaggacggaagtgtaagcctatttttgtccaaatagcgagacaagtagttaagctgaatgcttcagacctccgcctgccttcccgagcgtggaaggttaagctggttggagaaggggctgatgatgctggaggagtgtttgatgacaccatcacagagatgtgccaggaacttgaaactggtattgttgaccttcttataccctctcccaatgccaccgcagaagtgggttacaatagggacaggttcctttttaacccttctgcctgcctcgatgaacacttaatgcagtttaagtttttaggaattttaatgggggttgccattcgcacaaagaagcctctggacctccacttggcccctctggtgtggaagcagctgtgctgtgtcccactcaccctagaggacctggaggaggtggatctgctctacgtgcagactctcaacagcattcttcacattgaagacagtgggattaccgaggagagtttccatgagatgattcctcttgattcttttgttggccagagtgctgatggcaaaatggttcctataatccctggtggaaatagtatcccactcacattttccaacaggaaggaatatgtggagagggccattgaatatcgacttcatgagatggacagacaggtggctgcagtccgagaagggatgtcctggattgttcctgtgccgctgctgtccctcctcacagcaaaacaactggagcagatggtgtgtgggatgcccgagatctctgtggaagtcttgaagaaagtggtgcggtaccgtgaggtggatgagcagcatcagctggtgcagtggttctggcacacgctggaagagttctccaatgaggagcgggtgcttttcatgaggtttgtgtcaggaagatctcgactaccagccaacactgctgacatttctcagagatttcaaatcatgaaggttgataggccttacgacagtctgcctacctcacagacctgcttcttccagctgaggctgcccccgtactccagccagctggtcatggccgagcgcctgcgctatgccatcaacaactgccgctcaatcgacatggacaactacatgctctcgagaaacgtggacaacgccgagggctccgacactgactactgaccgtgcgggtgctctcaccctcccttctctccctcaataatgctcacttctgatttgatgttgatatacttttatggtaactacatagatgttataagaacataaaccaacattataaacaatggccacatttagttactctaaatgtaacaaagaaattagatgtttttatttttctgtgattgtacaaaaacaacaaaaacgaagtgctctcagtcaggtttttccctccatatttttggtcacttttgataagtttgcatgaaaccattttggtgcatttttagttgggaatggtacatttttgtaaatccacccagtgaacatgaaattgtacattgtgtataattgttcattagaaaggacagttttacatgaatattcatatatttattttgttttaatttgaattgcctgttcagggttccttatgcagagaaataaagcagattcaggaattgg

SEQ ID NO: 60538 - DNA, 4424 bp, Homo sapiens
gcagcaaaaataaaggacgcgaccgaattccgcctctgcggagccgggctcgggtcgccggagccgcgccccaccccgccagctccagagccacgtaaatggggtttcaccgtgttagccaggatggtctcaatctcctgacctcgtgatccgcccacctcggcctcccaaagtactgggattacaggactaatggctgaaggataaatcaacatggcaactatgattccaccagtgaagctgaaatggcttgaacacttgaacagctcctggattacagaggacagtgaatctattgctacaagagagggagttgctgttctgtattctaaactggttagcaataaggaagtagtacctttgccccaacaagttttatgcctcaaaggaccacagttgccagactttgaacgtgagtctctttcaagtgatgagcaggaccactatttggatgcccttcttagcagccagctagcattggcaaagatggtatgttcagattccccatttgccggggcacttagaaaacgactgcttgtactccagcgtgtcttttatgcactttctaataaataccatgacaaaggcaaggtgaagcagcagcagcattctccggagagcagttctggttcagcagatgtccattctgttagtgaacgcccccggtcaagcactgatgcacttatagaaatgggtgttcgaactggtctaagtttattatttgcgcttctaagacaaagttggatgatgcctgtgtcaggacctggtctcagtctttgcaacgatgtcattcatactgcaattgaagttgtgagctctttgccaccattatcattagcaaatgaaagcaagattcctcctatgggcttggactgcttatcgcaagtaacaacatttcttaaaggagtcactattcctaattctggggcagacactttaggtcgtagattagcttctgagttgctgcttggtttggcagctcaacgaggctcattgcgatatcttcttgaatggatagaaatggctttgggggcttcggcagttgtacacaccatggagaaaggcaaactactctcaagccaggaaggaatgatcagctttgactgctttatgaccatattaatgcagatgaggcgttctttgggttcatctgctgatcggagtcagtggagagaaccaaccagaacatcggatggcttgtgctccctttacgaggcagcattatgtctctttgaagaggtttgcagaatggcttctgattattcgagaacatgtgctagcccagatagcattcagactggtgatgctcccattgtctccgaaacctgtgaggtttatgtttgggggagcaatagcagccatcagttggtagaaggtacacaggagaaaatactgcaacccaaactggctcctagtttctctgatgcacagaccattgaagctggacagtactgcacttttgtcatttctacggatggctcagttagagcttgcgggaaaggcagctatgggagactgggccttggagactccaataatcagtcaactttaaaaaagttaacattcgagcctcacagatccattaaaaaggtttcatcttctaaaggatctgatggtcacactttagcctttacgacagaaggagaagtcttcagttggggagatggtgattatgggaaactggggcatggaaatagttcaacacagaaatatcccaagcttattcagggacctctacaaggaaaggtagttgtttgtgtgtcagctggatacagacatagtgctgctgtcacagaggatggggaattatacacatggggtgaaggagactttggaagattaggtcatggtgacagcaatagtcgtaacattccaacattagtaaaagacatcagcaatgtaggagaggtttcttgtggcagttcacatactattgctctgtctaaagatgggagaactgtatggtcttttggaggaggagacaatggtaaacttggtcatggtgataccaacagagtgtataaacctaaagttattgaagctttacaaggaatgttcattcgcaaagtttgtgctgggagccagtcttcacttgctttgacatcaacagggcaggtctatgcttggggctgtggagcttgtctaggttgtggttcttcagaagctactgctttgagacccaagcttattgaagaactggctgccacaagaatagttgatgtttctattggagacagtcattgtttggctctttctcatgataatgaagtttatgcctggggcaataactcaatggggcaatgtggtcagggaaattccacaggtcctattactaaaccaaagaaagtgagtggcttagatggcatagctattcagcagatttcggctggaacatcacatagtctggcatggactgctcttcctagggacagacaagttgttgcatggcaccgaccttattgtgtagatcttgaagagagtaccttctcacacctgcgttcttttcttgagagatactgtgataaaataaacagtgagattcccccactccctttcccttcatcaagagaacaccacagttttctcaagctgtgcctgaagctactttcaaatcaccttgctcttgcacttgcgggaggggtagctaccagcattctcgggaggcaggcaggtccacttcgaaatttgctcttcagactgatggactcaactgtcccagatgaaatccaagaggtggtaattgaaactttatcagtgggagcaaccatgctgttacctccattacgagaacggatggaattacttcattctcttttacctcaaggacctgatagatgggaaagcttatctaaaggacagagaatgcaactggatatcatcctgacaagtttgcaagatcatacccacgtagcctccctacttggctatagttcaccctctgatgctgctgacctatcttctgtgtgtactggctacggaaatctgtcagatcaaccttacggcactcagagctgccatccagatacccacctggctgaaattttgatgaagaccctcttaagaaatttaggattttatacagatcaagcatttggagagctagaaaagaatagtgataaatttctacttggaacatcatcatcagaaaacagtcagcctgctcatcttcatgaactgctatgttcactacagaaacagctgctggcattttgccatatcaataacattagtgagaactcaagcagtgtggcattgcttcataaacatcttcagcttttgttgcctcatgccacagatatttattcacgttctgcaaatttgctcaaagaaagtccttggaatggcagtgttggagaaaaattaagagatgtgatatacgtctcagctgctggcagtatgctctgccagattgttaactccctgctgttactccctgtgtcagtggctcggcctttattgagttacctcctcgacttgttgccacctcttgattgccttaatagactcctgccagctgctgatcttttagaagaccaggagttacagtggcctcttcatggagggccagaactaattgatcctgctggtctgccattacctcagccagctcagtcctgggtatggcttgtggatctagaaagaacaattgctctccttattgggcggtgtcttggtggcatgcttcagggctcccctgtgtctccagaggaacaggacactgcatattggatgaaaacgccactgttcagtgacggtgtagaaatggacactcctcaattggataaatgtatgagttgcctgttagaagtagcactttctggaaatgaagaacagaagccttttgattataaattgcggcctgaaattgctgtctatgtagacttggcattgggttgttctaaagagcctgcccgaagcctttggatcagcatgcaggactatgctgttagtaaagattgggacagtgcaactttaagtaatgagtcactcttggacactgtgtctagatttgttcttgcagctcttctgaaacacacaaatttacttagtcaagcatgtggagaaagccggcaagtaacttaaaactatcctcagacaaatatttgctctcatgatgtcagaaattaggtaacttttctattttggttcttcatttagatatcaacctggtaaacacttatcagaagtgtaccgttgtgtatacaaagttcgaagtcgtttacttgcttgcaagaaccttgaacttattcaaacaaggtcatcatcacgggacagatgggtaaagtttgaaatcaattaatttctatgtttttctgcaagctgtgagagctagctctaaattggtttatgtgagaaaaaaatgtgccttggttattgcatatgttcaatacatgttgagtagttcttttcctagcagaaaaaaa

SEQ ID NO: 60539 - DNA, 2943 bp, Homo sapiens
gcagcaaaaataaaggacgcgaccgaattccgcctctgcggagccgggctcgggtcgccggagccgcgccccaccccgccagctccagagccacgtaaatggggtttcaccgtgttagccaggatggtctcaatctcctgacctcgtgatccgcccacctcggcctcccaaagtactgggattacaggactaatggctgaaggataaatcaacatggcaactatgattccaccagtgaagctgaaatggcttgaacacttgaacagctcctggattacagaggacagtgaatctattgctacaagagagggagttgctgttctgtattctaaactggttagcaataaggaagtagtacctttgccccaacaagttttatgcctcaaaggaccacagttgccagactttgaacgtgagtctctttcaagtgatgagcaggaccactatttggatgcccttcttagcagccagctagcattggcaaagatggtatgttcagattccccatttgccggggcacttagaaaacgactgcttgtactccagcgtgtcttttatgcactttctaataaataccatgacaaaggcaaggtgaagcagcagcagcattctccggagagcagttctggttcagcagatgtccattctgttagtgaacgcccccggtcaagcactgatgcacttatagaaatgggtgttcgaactggtctaagtttattatttgcgcttctaagacaaagttggatgatgcctgtgtcaggacctggtctcagtctttgcaacgatgtcattcatactgcaattgaagttgtgagctctttgccaccattatcattagcaaatgaaagcaagattcctcctatgggcttggactgcttatcgcaagtaacaacatttcttaaaggagtcactattcctaattctggggcagacactttaggtcgtagattagcttctgagttgctgcttggtttggcagctcaacgaggctcattgcgatatcttcttgaatggatagaaatggctttgggggcttcggcagttgtacacaccatggagaaaggcaaactactctcaagccaggaaggaatgatcagctttgactgctttatgaccatattaatgcagatgaggcgttctttgggttcatctgctgatcggagtcagtggagagaaccaaccagaacatcggatggcttgtgctccctttacgaggcagcattatgtctctttgaagaggtttgcagaatggcttctgattattcgagaacatgtgctagcccagatagcattcagactggtgatgctcccattgtctccgaaacctgtgaggtttatgtttgggggagcaatagcagccatcagttggtagaaggtacacaggagaaaatactgcaacccaaactggctcctagtttctctgatgcacagaccattgaagctggacagtactgcacttttgtcatttctacggatggctcagttagagcttgcgggaaaggcagctatgggagactgggccttggagactccaataatcagtcaactttaaaaaagttaacattcgagcctcacagatccattaaaaaggtttcatcttctaaaggatctgatggtcacactttagcctttacgacagaaggagaagtcttcagttggggagatggtgattatgggaaactggggcatggaaatagttcaacacagaaatatcccaagcttattcagggacctctacaaggaaaggtagttgtttgtgtgtcagctggatacagacatagtgctgctgtcacagaggatggggaattatacacatggggtgaaggagactttggaagattaggtcatggtgacagcaatagtcgtaacattccaacattagtaaaagacatcagcaatgtaggagaggtttcttgtggcagttcacatactattgctctgtctaaagatgggagaactgtatggtcttttggaggaggagacaatggtaaacttggtcatggtgataccaacagagtgtataaacctaaagttattgaagctttacaaggaatgttcattcgcaaagtttgtgctgggagccagtcttcacttgctttgacatcaacagggcaggtctatgcttggggctgtggagcttgtctaggttgtggttcttcagaagctactgctttgagacccaagcttattgaagaactggctgccacaagaatagttgatgtttctattggagacagtcattgtttggctctttctcatgataatgaagtttatgcctggggcaataactcaatggggcaatgtggtcagggaaattccacaggtcctattactaaaccaaagaaagtgagtggcttagatggcatagctattcagcagatttcggctggaacatcacatagtctggcatggactgctcttcctagggacagacaagttgttgcatggcaccgaccttattgtgtagatcttgaagagagtaccttctcacacctgcgttcttttcttgagagatactgtgataaaataaacagtgagattcccccactccctttcccttcatcaagagaacaccacagttttctcaagctgtgcctgaagctactttcaaatcaccttgctcttgcacttgcgggaggggtagctaccagcattctcgggaggcaggcaggtccacttcgaaatttgctcttcagactgatggactcaactgtcccagatgaaatccaagaggtggtaattgaaactttatcagtgggagcaaccatgctgttacctccattacgagaacggatggaattacttcattctcttttacctcaaggacctgatagatgggaaagcttatctaaaggacaggtaggcctttgcttgctgtgtaagtaaaccagtagtatcctaaaaatttggactgagaaggaaataaaactaataaattgccat

SEQ ID NO: 60540 - DNA, 3044 bp, Homo sapiens
tccataatgtgtgcccagctctcagcaaacattctggaagaaatgtaatggtacctgcagcagctccctcattctcacaggcccaacaggtcatttgtggtcagaattgtacctttgtcatccaggccaatggcacagtgttggcttgtggggaaggaagttatggcagattaggacaaggaaattcagatgaccttcatgtgctgacagttatttcagccttacaaggctttgtggtgacccagctggtgacttcctgtggttctgatgggcactctatggccctaactgaaagtggtgaggtctttagctggggagatggtgactatggtaaacttggccatgggaacagcgacaggcagcggcggcccaggcagatcgaggccttacaaggagaagaagtggtgcagatgtcttgtggcttcaagcactcagcagtggtcacttcagatggcaaactgttcacctttgggaatggtgactatggtcgtctgggtcttggaaatacctctaacaaaaaacttccagagagagtgactgcactggagggatatcagattggacaggtggcctgtggattaaaccacactttggcagtgtcagcagatggttccatggtgtgggcttttggagatggagactatggaaaactaggcttaggaaattccactgcaaaatcttcacctcagaaaattgacgtcctttgtggaattggaataaaaaaggttgcttgtggaactcagttttctgttgctttgaccaaagatggtcatgtgtatacctttggtcaagatcgcctgataggcttgccagaggggcgtgctcgcaatcacaatcgaccgcaacaaatccctgtcctggctggagtaatcattgaagatgtggcagttggagctgaacacacacttgctttggcatcaaatggagatgtgtatgcctgggggagcaattcagaagggcagctcggcttaggccataccaaccatgttcgagaaccaaccctggtaacaggtctgcaagggaaaaatgttcggcagatctcggctggccgctgccacagtgctgcatggacagcaccacctgtcccaccaagagcaccaggtgtgtcagtacctctgcagctgggcctgcctgacacagtgcccccccagtatggggcgctgagagaagtcagcattcacacggtgcgggccaggctccggctgctctaccacttctctgacctcatgtactcatcctggagactgctgaaccttagccccaacaaccagaacagcacatcccattataatgctggaacttggggcattgtacagggacaacttcggcctttgttagccccaagagtctacactctgccaatggtgcgctccataggaaaaaccatggttcaaggcaaaaactatggacctcagataactgtaaagaggatatcaaccagaggacggaagtgtaagcctatttttgtccaaatagcgagacaagtagttaagctgaatgcttcagacctccgcctgccttcccgagcgtggaaggttaagctggttggagaaggggctgatgatgctggaggagtgtttgatgacaccatcacagagatgtgccaggaacttgaaactggtattgttgaccttcttataccctctcccaatgccaccgcagaagtgggttacaatagggacaggttcctttttaacccttctgcctgcctcgatgaacacttaatgcagtttaagtttttaggaattttaatgggggttgccattcgcacaaagaagcctctggacctccacttggcccctctggtgtggaagcagctgtgctgtgtcccactcaccctagaggacctggaggaggtggatctgctctacgtgcagactctcaacagcattcttcacattgaagacagtgggattaccgaggagagtttccatgagatgattcctcttgattcttttgttggccagagtgctgatggcaaaatggttcctataatccctggtggaaatagtatcccactcacattttccaacaggaaggaatatgtggagagggccattgaatatcgacttcatgagatggacagacaggtggctgcagtccgagaagggatgtcctggattgttcctgtgccgctgctgtccctcctcacagcaaaacaactggagcagatggtgtgtgggatgcccgagatctctgtggaagtcttgaagaaagtggtgcggtaccgtgaggtggatgagcagcatcagctggtgcagtggttctggcacacgctggaagagttctccaatgaggagcgggtgcttttcatgaggtttgtgtcaggaagatctcgactaccagccaacactgctgacatttctcagagatttcaaatcatgaaggttgataggccttacgacagtctgcctacctcacagacctgcttcttccagctgaggctgcccccgtactccagccagctggtcatggccgagcgcctgcgctatgccatcaacaactgccgctcaatcgacatggacaactacatgctctcgagaaacgtggacaacgccgagggctccgacactgactactgaccgtgcgggtgctctcaccctcccttctctccctcaataatgctcacttctgatttgatgttgatatacttttatggtaactacatagatgttataagaacataaaccaacattataaacaatggccacatttagttactctaaatgtaacaaagaaattagatgtttttatttttctgtgattgtacaaaaacaacaaaaacgaagtgctctcagtcaggtttttccctccatatttttggtcacttttgataagtttgcatgaaaccattttggtgcatttttagttgggaatggtacatttttgtaaatccacccagtgaacatgaaattgtacattgtgtataattgttcattagaaaggacagttttacatgaatattcatatatttattttgttttaatttgaattgcctgttcagggttccttatgcagagaaataaagcagattcaggaattgg

SEQ ID NO: 60541 - DNA, 425 bp, Homo sapiens
ctcacctacatgtatggcagttaagaactggcgaaatattcagaattattttatgcatgcaaataaaatgccttttttgttttgttctgagcgggattataccgctctgtgcaggcccacaggaatcaaagtcggagagaaggaatatctttgcagcaagacccaggggcgttgtatgactttaatttagatgaggaattggaaattgatcttgatgatgaggcgatggaagctatgtttggacaagacctgaccagtgacaatgatattctgggaatgtggatcccagaggtactggattggcctacctgggtgtgtgtgactgcagcgggggctgctctgacttattttcctgccctcctgttcatatagcttactaacagcagccttgcctagagttgaaacactctaaaaagtcttttatc

SEQ ID NO: 60542 - DNA, 545 bp, Homo sapiens
aggcaggcaggtccacttcgaaatttgctcttcagactgatggactcaactgtcccagatgaaatccaagaggtaagagaataggacttgtgaatctgtatctcaaaccacgtctttctctgagattttagctatacaatatattcaactgtacattggacaatttcaattggatgttgtttcccttactcctgttttcttggtgagagtatttttggttaactcatccttgagacaaaggtcagatgccatctctgataaactttttattcctgctctcccaccagatttggtttttcttgtatatgttctcattacatcacattgtattctagttgcttatttacaaacatgtcactcttttttcaccagaagatgagttcctgagggcaaggacctagggcatggcttggtcagtagtagtaactgaataagtggactggatcatctactagaactgtaaccagagctaaggagagaaaggtcagcttaaggaggaagaagtggcctagaatagaatactggttataaataaggagagtata

SEQ ID NO: 60543 - DNA, 583 bp, Homo sapiens
aggctgaggtgggaggattgcttgagcccaggagtttggggctgcagtgagctgtgatcacaccactgcactccagcctaggtgacagagcaagacactgtctctttaaaatttaaaaaaaaattaaaaaaaaaaatttttaaaagcattggtctttgaagatccagttttcagtgaagtttatgtaaagtttattgctatattaataccaaaaatggcagatttacttttttcttagtttcccttcttaaaaattttctttctccttggttctgtcttagatgtcttgtggcttcaagcactcagcagtggtcacttcagatggcaaactgttcacctttgggaatggtgactatggtcgtctgggtcttggaaatacctctaacaaaaaacttccagagagagtgactgcactggagggatatcagattggacaggcatggaataaatcaataagatattctagctgatcattgtttctcatttcttctgtgttcgcttagacaccctcaggaagatcaggatcaccagttgtacctaacctcatgtacattttgctatggtctaattgataattttaact

SEQ ID NO: 60544 - DNA, 430 bp, Homo sapiens
tattgtactctaaccttttttattctgatgtgtgcttatagagtttttagaaaatcttcaaaaaaagtaataataataaaataaatgtttatcttagaatagattcatatgaaatgtcagaattttctaagtgttaaaaatactgtttttggcatacagagtttcatcatgtctgagttaagtgaagaactctaaaatatgtttttttcctcaagcttcgtttagaggcacttcatcagatcctcgttctattgtctgggatggaagaaaaaggtagcatctcactggcaggaagcagattgagttcaggcttccagtcctccacactactcacgtctgtgaggctgcagttcctagcagggtgttttggtttaggcactgttggacacacaggagccaagggagagagtggccgattgcatcactatca

SEQ ID NO: 60545 - DNA, 652 bp, Homo sapiens
cttaattgattgcaattcggaaatatttttacttaatgcatattgacatgttttggttttatgtgatcaatttttttaagtggctgtcagagtggcttagtatgtgtttggcgcattcctcaagatactacacagaccaatgtgactagtgcagaaggatggtgggaccaggaatcaaattgccaggtaacattctggtgtttttgaagactgtctgaaactatggaaagtatatgacatcagagtcattctcccttggttactaaaaaagtcattactatatcccaaagggcaagatccattgggaaatataagtaattgtcatcctgaattagcttaattttttataaatcagagataccataattgcttggtaaaatgagatattctatacatattaagtggtgactgttactgtgatagtggatataattgatactacagatagacgagtcataagttgttagtacattaaaatagaaactccatgggagcacatccatccaaagaatctccaactgatgccagaatccttgctatgaagaatgatttatttatattaaacagaagttacaaatgtatatatttatagagagccctctaggcgagtaacataaattcatgaagctagggttagaaggtttggagaggg

SEQ ID NO: 60546 - DNA, 15328 bp, Homo sapiens
gcagcaaaaataaaggacgcgaccgaattccgcctctgcggagccgggctcgggtcgccggagccgcgccccaccccgccagctccagagccacgtaaatggggtttcaccgtgttagccaggatggtctcaatctcctgacctcgtgatccgcccacctcggcctcccaaagtactgggattacaggactaatggctgaaggataaatcaacatggcaactatgattccaccagtgaagctgaaatggcttgaacacttgaacagctcctggattacagaggacagtgaatctattgctacaagagagggagttgctgttctgtattctaaactggttagcaataaggaagtagtacctttgccccaacaagttttatgcctcaaaggaccacagttgccagactttgaacgtgagtctctttcaagtgatgagcaggaccactatttggatgcccttcttagcagccagctagcattggcaaagatggtatgttcagattccccatttgccggggcacttagaaaacgactgcttgtactccagcgtgtcttttatgcactttctaataaataccatgacaaaggcaaggtgaagcagcagcagcattctccggagagcagttctggttcagcagatgtccattctgttagtgaacgcccccggtcaagcactgatgcacttatagaaatgggtgttcgaactggtctaagtttattatttgcgcttctaagacaaagttggatgatgcctgtgtcaggacctggtctcagtctttgcaacgatgtcattcatactgcaattgaagttgtgagctctttgccaccattatcattagcaaatgaaagcaagattcctcctatgggcttggactgcttatcgcaagtaacaacatttcttaaaggagtcactattcctaattctggggcagacactttaggtcgtagattagcttctgagttgctgcttggtttggcagctcaacgaggctcattgcgatatcttcttgaatggatagaaatggctttgggggcttcggcagttgtacacaccatggagaaaggcaaactactctcaagccaggaaggaatgatcagctttgactgctttatgaccatattaatgcagatgaggcgttctttgggttcatctgctgatcggagtcagtggagagaaccaaccagaacatcggatggcttgtgctccctttacgaggcagcattatgtctctttgaagaggtttgcagaatggcttctgattattcgagaacatgtgctagcccagatagcattcagactggtgatgctcccattgtctccgaaacctgtgaggtttatgtttgggggagcaatagcagccatcagttggtagaaggtacacaggagaaaatactgcaacccaaactggctcctagtttctctgatgcacagaccattgaagctggacagtactgcacttttgtcatttctacggatggctcagttagagcttgcgggaaaggcagctatgggagactgggccttggagactccaataatcagtcaactttaaaaaagttaacattcgagcctcacagatccattaaaaaggtttcatcttctaaaggatctgatggtcacactttagcctttacgacagaaggagaagtcttcagttggggagatggtgattatgggaaactggggcatggaaatagttcaacacagaaatatcccaagcttattcagggacctctacaaggaaaggtagttgtttgtgtgtcagctggatacagacatagtgctgctgtcacagaggatggggaattatacacatggggtgaaggagactttggaagattaggtcatggtgacagcaatagtcgtaacattccaacattagtaaaagacatcagcaatgtaggagaggtttcttgtggcagttcacatactattgctctgtctaaagatgggagaactgtatggtcttttggaggaggagacaatggtaaacttggtcatggtgataccaacagagtgtataaacctaaagttattgaagctttacaaggaatgttcattcgcaaagtttgtgctgggagccagtcttcacttgctttgacatcaacagggcaggtctatgcttggggctgtggagcttgtctaggttgtggttcttcagaagctactgctttgagacccaagcttattgaagaactggctgccacaagaatagttgatgtttctattggagacagtcattgtttggctctttctcatgataatgaagtttatgcctggggcaataactcaatggggcaatgtggtcagggaaattccacaggtcctattactaaaccaaagaaagtgagtggcttagatggcatagctattcagcagatttcggctggaacatcacatagtctggcatggactgctcttcctagggacagacaagttgttgcatggcaccgaccttattgtgtagatcttgaagagagtaccttctcacacctgcgttcttttcttgagagatactgtgataaaataaacagtgagattcccccactccctttcccttcatcaagagaacaccacagttttctcaagctgtgcctgaagctactttcaaatcaccttgctcttgcacttgcgggaggggtagctaccagcattctcgggaggcaggcaggtccacttcgaaatttgctcttcagactgatggactcaactgtcccagatgaaatccaagaggtggtaattgaaactttatcagtgggagcaaccatgctgttacctccattacgagaacggatggaattacttcattctcttttacctcaaggacctgatagatgggaaagcttatctaaaggacagagaatgcaactggatatcatcctgacaagtttgcaagatcatacccacgtagcctccctacttggctatagttcaccctctgatgctgctgacctatcttctgtgtgtactggctacggaaatctgtcagatcaaccttacggcactcagagctgccatccagatacccacctggctgaaattttgatgaagaccctcttaagaaatttaggattttatacagatcaagcatttggagagctagaaaagaatagtgataaatttctacttggaacatcatcatcagaaaacagtcagcctgctcatcttcatgaactgctatgttcactacagaaacagctgctggcattttgccatatcaataacattagtgagaactcaagcagtgtggcattgcttcataaacatcttcagcttttgttgcctcatgccacagatatttattcacgttctgcaaatttgctcaaagaaagtccttggaatggcagtgttggagaaaaattaagagatgtgatatacgtctcagctgctggcagtatgctctgccagattgttaactccctgctgttactccctgtgtcagtggctcggcctttattgagttacctcctcgacttgttgccacctcttgattgccttaatagactcctgccagctgctgatcttttagaagaccaggagttacagtggcctcttcatggagggccagaactaattgatcctgctggtctgccattacctcagccagctcagtcctgggtatggcttgtggatctagaaagaacaattgctctccttattgggcggtgtcttggtggcatgcttcagggctcccctgtgtctccagaggaacaggacactgcatattggatgaaaacgccactgttcagtgacggtgtagaaatggacactcctcaattggataaatgtatgagttgcctgttagaagtagcactttctggaaatgaagaacagaagccttttgattataaattgcggcctgaaattgctgtctatgtagacttggcattgggttgttctaaagagcctgcccgaagcctttggatcagcatgcaggactatgctgttagtaaagattgggacagtgcaactttaagtaatgagtcactcttggacactgtgtctagatttgttcttgcagctcttctgaaacacacaaatttacttagtcaagcatgtggagaaagccggcaagtaacttaaaactatcctcagacaaatatttgctctcatgatgtcagaaattaggtaacttttctattttggttcttcatttagatatcaacctggtaaacacttatcagaagtgtaccgttgtgtatacaaagttcgaagtcgtttacttgcttgcaagaaccttgaacttattcaaacaaggtcatcatcacgggacagatggatatcagaaaaccaggactctgcagatgttgatcctcaggagcattcatttactcgaactattgatgaagaagctgaaatggaagaacaggctgagagagaccgggaagaggggcatccggagccagaggatgaagaggaggaacgggaacatgaagtgatgacagctggcaaaatctttcagtgtttcctctcagcccgtgaagtagctcgtagccgagaccgagatagaatgaacagtggggcagggtctggggctcgagctgatgatccacctcctcagtctcagcaagagcgaagggtcagcacagaccttcctgagggtcaggatgtgtacactgctgcatgcaactccgtgatccatcggtgtgccctgttaatattaggagtaagtcctgtgatagatgagcttcagaagcgaagagaagaaggacagttgcagcaaccttcaacaagtgcctctgaagggggtggacttatgaccaggagtgaaagtcttactgcagagagccggctagtccacacaagcccaaattatagactgatcaaatcgaggagtgaatctgatttgtctcagcctgaatcagatgaagagggttacgcactgagtggcagacgaaatgttgatttggatttggcagcatctcacagaaagagaggtcctatgcacagtcaattggaatccctgagtgactcttgggctcgcctgaaacatagcagagactggttatgcaactcctcctattcctttgagtcagattttgatcttaccaagtctttgggagttcacactttgattgaaaatgttgtaagctttgtgagtggagatgtggggaatgccccaggttttaaagagccagaggaaagtatgtctacaagtccccaggcctccatcattgcaatggaacagcagcagttaagggcagaacttcgtttagaggcacttcatcagatcctcgttctattgtctgggatggaagaaaaaggtagcatctcactggcaggaagcagattgagttcaggcttccagtcctccacactactcacgtctgtgaggctgcagttcctagcagggtgttttggtttaggcactgttggacacacaggagccaagggagagagtggccgattgcatcactatcaggatgggatcagagcagctaagagaaatattcagattgaaatccaggtagctgtgcataaaatttatcaacagttgtctgctaccctggaaagagccctgcaagcaaacaagcatcacattgaagcccagcaacgtctgcttctggttacagtttttgccctaagtgttcattatcaaccagtagatgtttctttggcaatttccactggtctgctaaacgtattgtcacagttgtgtggtacagacaccatgctaggacagcccctgcagttgttgccaaagacgggtgtttcccagcttagcacagctttgaaagtggccagtacaaggttgctccagattctagccatcactactgggacctatgctgataaactgagtcccaaagtagttcaatccttgttggatctactctgtagtcagttgaagaatttattgtcccaaactggtgtactacatatggcctctttcggagaaggggagcaagaagacggtgaagaagaagaaaaaaaagttgactccagtggagaaactgagaagaaagatttcagagctgctcttaggaaacaacatgcagccgaactccatctaggggattttttagtttttcttcgcagagttgtatcttcaaaagcaattcaatcaaaaatggcttccccaaagtggaccgaagtgcttctaaatatagcatctcagaaatgttcttcaggtatccctctggttggtaacttaagaacaaggctccttgcacttcatgtccttgaagctgtgctgccagcttgtgaatctggtgtagaagatgatcaaatggcccagattgttgagcgcttattttcccttctctctgattgtatgtgggagacacccattgctcaggccaaacatgctattcagataaaggaaaaagaacaagaaataaaactacagaagcagggcgagttggaagaagaagatgagaatcttcctatccaagaagtatcctttgacccggagaaagctcagtgttgcctagtggagaatggacagattttaactcacggcagtggagggaaaggatatggattggcatctacaggagtaacttctgggtgctatcagtggaagttttatattgtgaaggaaaacagaggtaatgaaggcacgtgtgttggagtttctcgctggccagtacatgactttaatcaccgcactacctcggatatgtggctctatagggcctacagtggtaacctctatcacaatggagaacagactctcacattgtccagctttactcaaggagatttcattacctgtgtgttagacatggaagccaggaccatttcttttgggaaaaatggagaggaacccaaattagcttttgaagatgtggatgcagcagagttgtacccatgtgtgatgttctatagtagcaatccaggggaaaaggtgaaaatttgtgatatgcagatgcgtggcacaccccgagacttacttccaggagaccctatttgtagtccagtagcagcagtgctggctgaggccactattcagctcatccgtatccttcaccgaacagaccgttggacttactgcattaacaaaaaaatgatggaaaggcttcacaaaattaagatatgtattaaagagtcaggtcagaagctaaagaaaagccgctcggttcagagccgagaggaaaatgaaatgagagaggagaaggagagcaaagaggaagagaaaggtaaacatactaggcatggcctcgctgacctctcagagctgcagctgaggactctttgcatagaggtgtggcccgtgctggctgtgataggaggagttgatgctggtcttagagttggaggtcggtgtgttcacaagcaaactgggcgccatgccacgctgctgggagtggtcaaagagggcagcacgtctgccaaggtccaatgggatgaagcagaaattactatcagcttcccaactttttggtcgcctagtgatactccattgtataatctggaaccctgtgaaccattgccgtttgatgtggcgcgattccgaggcctgacggcttctgtgctgctggacctaacatatctcactggcgttcatgaagacatgggcaaacagagcaccaaacgacatgaaaagaaacaccgacatgaatccgaggagaaaggggatgttgagcagaaacctgagagtgaatccgctttagatatgcgaacaggcctaacatctgatgacgtcaaaagtcagagtaccacaagctccaaatcagaaaatgaaatcgcttcattttctttagatccaacactgccaagtgtggaatcccaacatcaaataacagaagggaaaagaaaaaatcatgaacacatgtccaaaaaccatgatgtagcccagtcagaaatcagagcagtccagctgtcctatctttacctcggtgctatgaagtcacttagtgcccttcttggctgtagtaaatatgctgagctgttgctgataccaaaagttctggctgaaaatggccacaactcagactgtgcaagttctccagttgttcatgaagacgtggagatgcgagcagccctgcagttcttgatgcgacacatggtgaagcgagcagtcatgcggtcacccataaagagagcattgggattagctgatctggaacgagcgcaagccatgatctataaattagtggttcatgggcttttggaagaccagtttgggggcaaaattaagcaagagattgatcaacaagctgaagaaagtgaccctgcccagcaggcacagacaccagttactactagcccatcagcctcaagcacgacctcctttatgagcagctctctggaggacaccacaactgccaccactccagtcactgacacagaaacagtgcctgcatccgagtccccgggagtgatgcctcttagtcttctcaggcaaatgttctctagttacccaactaccactgtacttcccacacgtcgggcacagactcctccaatatcttcgttaccaacctctccttctgatgaagtaggaaggaggcaaagtttaacttctcctgattcccagtcagcaaggccagctaaccgcacagccttgtcagacccaagcagtagactttcaacttctcctcctcctccagcaattgcagttcccttgctggaaatggggttctctcttcggcagattgccaaagccatggaagctacaggtgctaggggagaggctgatgcccagaatatcactgtccttgccatgtggatgatagagcaccctgggcatgaggatgaagaggagccccagtcgggcagcacagcagactctaggcctggagcagccgttctaggcagtggcgggaagtcaaatgatccctgttatttgcagtcacctggagacataccatcagctgatgctgctgaaatggaggaaggttttagtgaaagccctgataatttggatcatacagagaatgcagcttctggaagtggaccatcagctagaggtcgctcagcggtaacaagaagacacaagtttgacttagctgctcgcacactgctagcaagagcagcgggattataccgctctgtgcaggcccacaggaatcaaagtcggagagaaggaatatctttgcagcaagacccaggggcgttgtatgactttaatttagatgaggaattggaaattgatcttgatgatgaggcgatggaagctatgtttggacaagacctgaccagtgacaatgatattctgggaatgtggatcccagagcatgtttgtgagtctgaagacagggaagaagtggtggtgtgtgaactgtgtgaatgcagcgtcgtcagcttcaatcagcacatgaagagaaaccatccaggctgtgggcgcagtgcaaaccgccagggctatcgcagcaatggttcctatgtggatggctggtttggcggtgaatgtgggagtggaaatccatactacctgttatgtggcacctgcagggagaagtacttagccatgaagaccaaatctaagtcaacaagttctgaaaggtacaagggacaagctccagatctaattggcaagcaagacagtgtgtatgaagaagactgggacatgttggatgttgatgaagatgaaaagctaactggtgaagaagaatttgaattacttgctggaccgcttggtttaaatgaccggcgcattgtaccagaaccagttcagttccctgacagcgatccactgggagcatcagtagcaatggtcacagccaccaacagtatggaagagactctgatgcaaataggttgccatggctccgtagaaaagagctcctctgggagaataacgttaggagagcaggcagctgccctagcaaaccctcatgaccgtgtggtggctttaaggagagtgactgctgctgctcaggttcttctggccagaaccatggtcatgagagcgctgtctcttctctcagtcagtggttccagttgtagcctggctgctggtcttgagtctctggggctaacagatatccgaacgctagttcgattaatgtgcttggcagcagcagggagagctggcctctccaccagcccttctgccatggctagcacctcagaacgatcacgaggtgggcatagcaaggctaacaagcctatctcttgcctggcctatttgagcacagcagtgggatgtctggcatcaaatgctcctagtgctgccaaactgcttgtacagttgtgtacacagaacttgatttctgctgcaacaggtgtaaatctaaccacagttgatgactcaattcagcgaaagtttctacccagctttctccgaggaattgctgaagagaacaagcttgtgacctccccaaactttgttgtaacacaggcccttgtggcattgctagcagacaaaggggccaaactaagacctaactatgataagtcagaagttgaaaagaaaggccctctggagttggctaatgccctggcagcctgctgcctctcctccaggctgtcctcacagcatcggcaatgggcagctcagcaactcgtgcgcactcttgctgcacacgaccgtgacaaccaaactactctgcagacacttgctgatatgggaggagatcttagaaaatgctcctttatcaaattggaggctcatcagaacagagtaatgacatgtgtttggtgtaataaaaaaggtcttttggctacaagtggcaatgatggcaccatccgcgtatggaatgttaccaagaagcaatattcactgcaacagacctgtgtgttcaacagattggaaggggatgctgaggaaagcctgggatcacccagtgatccaagtttctcaccagtttcctggagtatcagtggcaaatatctagcaggcgctttggaaaagatggtgaatatctggcaagttaatggaggaaaaggattagtagatattcagcctcattgggtatctgccctggcttggccagaagagggtccggctacagcctggtcaggagagtctccagaattgttgttggtgggacggatggatggatctctgggactgattgaagttgttgatgtgtccaccatgcaccgtcgagaattggagcattgctatcgaaaggatgtgtctgttacttgcattgcatggttcagtgaagacagaccatttgcagtgggatattttgatggaaaactgttactgggaacaaaggaaccacttgagaaaggaggcattgttctaattgatgcacataaggatactcttattagcatgaagtgggaccctacaggtcatattcttatgacatgtgccaaagaagacagtgtgaaactctggggctctatttcgggatgctggtgctgtctacattcactctgccatccatctattgtaaatggcattgcttggtgccgccttccagggaaaggatccaagttgcagttactgatggctactggctgtcagagtggcttagtatgtgtttggcgcattcctcaagatactacacagaccaatgtgactagtgcagaaggatggtgggaccaggaatcaaattgccaggatggatataggaaatcatcaggagccaagtgtgtttatcagctgcggggacacatcactcctgttcggactgttgcctttagttctgatgggttggccctggtgtctggtggactaggtgggctcatgaacatttggtctttaagggatggctctgtcttgcaaactgttgtgataggctctggagctattcagaccacagtatggattccagaagttggagtagctgcttgctcaaatagatcaaaggatgttttggtcgtgaattgtacagcagaatgggcagctgccaatcatgttttggcaacctgtaggacagcattgaaacagcagggtgttctgggattgaacatggctccctgcatgagagcatttttggagcggctccccatgatgcttcaggagcagtatgcctatgaaaagcctcatgtggtttgtggtgaccaacttgttcatagcccctatatgcaatgcttggcttcccttgctgtgggacttcatctggatcagctgttgtgtaaccctccagtgccaccacaccaccagaactgtctgcctgaccctgcatcctggaatccaaatgaatgggcctggttagaatgtttctcaaccactataaaagctgccgaagccctgaccaatggagcccagtttccagaatcttttaccgttccagatctagaacctgttccagaggatgaacttgtatttctaatggataacagtaaatggattaacggcatggatgaacaaattatgtcttgggcaacttccagacctgaggactggcacctgggaggtaaatgtgatgtctacttatggggtgctggtaggcatggacagctggcagaagctggaagaaatgtaatggtacctgcagcagctccctcattctcacaggcccaacaggtcatttgtggtcagaattgtacctttgtcatccaggccaatggcacagtgttggcttgtggggaaggaagttatggcagattaggacaaggaaattcagatgaccttcatgtgctgacagttatttcagccttacaaggctttgtggtgacccagctggtgacttcctgtggttctgatgggcactctatggccctaactgaaagtggtgaggtctttagctggggagatggtgactatggtaaacttggccatgggaacagcgacaggcagcggcggcccaggcagatcgaggccttacaaggagaagaagtggtgcagatgtcttgtggcttcaagcactcagcagtggtcacttcagatggcaaactgttcacctttgggaatggtgactatggtcgtctgggtcttggaaatacctctaacaaaaaacttccagagagagtgactgcactggagggatatcagattggacaggtggcctgtggattaaaccacactttggcagtgtcagcagatggttccatggtgtgggcttttggagatggagactatggaaaactaggcttaggaaattccactgcaaaatcttcacctcagaaaattgacgtcctttgtggaattggaataaaaaaggttgcttgtggaactcagttttctgttgctttgaccaaagatggtcatgtgtatacctttggtcaagatcgcctgataggcttgccagaggggcgtgctcgcaatcacaatcgaccgcaacaaatccctgtcctggctggagtaatcattgaagatgtggcagttggagctgaacacacacttgctttggcatcaaatggagatgtgtatgcctgggggagcaattcagaagggcagctcggcttaggccataccaaccatgttcgagaaccaaccctggtaacaggtctgcaagggaaaaatgttcggcagatctcggctggccgctgccacagtgctgcatggacagcaccacctgtcccaccaagagcaccaggtgtgtcagtacctctgcagctgggcctgcctgacacagtgcccccccagtatggggcgctgagagaagtcagcattcacacggtgcgggccaggctccggctgctctaccacttctctgacctcatgtactcatcctggagactgctgaaccttagccccaacaaccagaacagcacatcccattataatgctggaacttggggcattgtacagggacaacttcggcctttgttagccccaagagtctacactctgccaatggtgcgctccataggaaaaaccatggttcaaggcaaaaactatggacctcagataactgtaaagaggatatcaaccagaggacggaagtgtaagcctatttttgtccaaatagcgagacaagtagttaagctgaatgcttcagacctccgcctgccttcccgagcgtggaaggttaagctggttggagaaggggctgatgatgctggaggagtgtttgatgacaccatcacagagatgtgccaggaacttgaaactggtattgttgaccttcttataccctctcccaatgccaccgcagaagtgggttacaatagggacaggttcctttttaacccttctgcctgcctcgatgaacacttaatgcagtttaagtttttaggaattttaatgggggttgccattcgcacaaagaagcctctggacctccacttggcccctctggtgtggaagcagctgtgctgtgtcccactcaccctagaggacctggaggaggtggatctgctctacgtgcagactctcaacagcattcttcacattgaagacagtgggattaccgaggagagtttccatgagatgattcctcttgattcttttgttggccagagtgctgatggcaaaatggttcctataatccctggtggaaatagtatcccactcacattttccaacaggaaggaatatgtggagagggccattgaatatcgacttcatgagatggacagacaggtggctgcagtccgagaagggatgtcctggattgttcctgtgccgctgctgtccctcctcacagcaaaacaactggagcagatggtgtgtgggatgcccgagatctctgtggaagtcttgaagaaagtggtgcggtaccgtgaggtggatgagcagcatcagctggtgcagtggttctggcacacgctggaagagttctccaatgaggagcgggtgcttttcatgaggtttgtgtcaggaagatctcgactaccagccaacactgctgacatttctcagagatttcaaatcatgaaggttgataggccttacgacagtctgcctacctcacagacctgcttcttccagctgaggctgcccccgtactccagccagctggtcatggccgagcgcctgcgctatgccatcaacaactgccgctcaatcgacatggacaactacatgctctcgagaaacgtggacaacgccgagggctccgacactgactactgaccgtgcgggtgctctcaccctcccttctctccctcaataatgctcacttctgatttgatgttgatatacttttatggtaactacatagatgttataagaacataaaccaacattataaacaatggccacatttagttactctaaatgtaacaaagaaattagatgtttttatttttctgtgattgtacaaaaacaacaaaaacgaagtgctctcagtcaggtttttccctccatatttttggtcacttttgataagtttgcatgaaaccattttggtgcatttttagttgggaatggtacatttttgtaaatccacccagtgaacatgaaattgtacattgtgtataattgttcattagaaaggacagttttacatgaatattcatatatttattttgttttaatttgaattgcctgttcagggttccttatgcagagaaataaagcagattcaggaattgg

SEQ ID NO: 60547 - DNA, 15304 bp, Homo sapiens
gcagcaaaaataaaggacgcgaccgaattccgcctctgcggagccgggctcgggtcgccggagccgcgccccaccccgccagctccagagccacgtaaatggggtttcaccgtgttagccaggatggtctcaatctcctgacctcgtgatccgcccacctcggcctcccaaagtactgggattacaggactaatggctgaaggataaatcaacatggcaactatgattccaccagtgaagctgaaatggcttgaacacttgaacagctcctggattacagaggacagtgaatctattgctacaagagagggagttgctgttctgtattctaaactggttagcaataaggaagtagtacctttgccccaacaagttttatgcctcaaaggaccacagttgccagactttgaacgtgagtctctttcaagtgatgagcaggaccactatttggatgcccttcttagcagccagctagcattggcaaagatggtatgttcagattccccatttgccggggcacttagaaaacgactgcttgtactccagcgtgtcttttatgcactttctaataaataccatgacaaaggcaaggtgaagcagcagcagcattctccggagagcagttctggttcagcagatgtccattctgttagtgaacgcccccggtcaagcactgatgcacttatagaaatgggtgttcgaactggtctaagtttattatttgcgcttctaagacaaagttggatgatgcctgtgtcaggacctggtctcagtctttgcaacgatgtcattcatactgcaattgaagttgtgagctctttgccaccattatcattagcaaatgaaagcaagattcctcctatgggcttggactgcttatcgcaagtaacaacatttcttaaaggagtcactattcctaattctggggcagacactttaggtcgtagattagcttctgagttgctgcttggtttggcagctcaacgaggctcattgcgatatcttcttgaatggatagaaatggctttgggggcttcggcagttgtacacaccatggagaaaggcaaactactctcaagccaggaaggaatgatcagctttgactgctttatgaccatattaatgcagatgaggcgttctttgggttcatctgctgatcggagtcagtggagagaaccaaccagaacatcggatggcttgtgctccctttacgaggcagcattatgtctctttgaagaggtttgcagaatggcttctgattattcgagaacatgtgctagcccagatagcattcagactggtgatgctcccattgtctccgaaacctgtgaggtttatgtttgggggagcaatagcagccatcagttggtagaaggtacacaggagaaaatactgcaacccaaactggctcctagtttctctgatgcacagaccattgaagctggacagtactgcacttttgtcatttctacggatggctcagttagagcttgcgggaaaggcagctatgggagactgggccttggagactccaataatcagtcaactttaaaaaagttaacattcgagcctcacagatccattaaaaaggtttcatcttctaaaggatctgatggtcacactttagcctttacgacagaaggagaagtcttcagttggggagatggtgattatgggaaactggggcatggaaatagttcaacacagaaatatcccaagcttattcagggacctctacaaggaaaggtagttgtttgtgtgtcagctggatacagacatagtgctgctgtcacagaggatggggaattatacacatggggtgaaggagactttggaagattaggtcatggtgacagcaatagtcgtaacattccaacattagtaaaagacatcagcaatgtaggagaggtttcttgtggcagttcacatactattgctctgtctaaagatgggagaactgtatggtcttttggaggaggagacaatggtaaacttggtcatggtgataccaacagagtgtataaacctaaagttattgaagctttacaaggaatgttcattcgcaaagtttgtgctgggagccagtcttcacttgctttgacatcaacagggcaggtctatgcttggggctgtggagcttgtctaggttgtggttcttcagaagctactgctttgagacccaagcttattgaagaactggctgccacaagaatagttgatgtttctattggagacagtcattgtttggctctttctcatgataatgaagtttatgcctggggcaataactcaatggggcaatgtggtcagggaaattccacaggtcctattactaaaccaaagaaagtgagtggcttagatggcatagctattcagcagatttcggctggaacatcacatagtctggcatggactgctcttcctagggacagacaagttgttgcatggcaccgaccttattgtgtagatcttgaagagagtaccttctcacacctgcgttcttttcttgagagatactgtgataaaataaacagtgagattcccccactccctttcccttcatcaagagaacaccacagttttctcaagctgtgcctgaagctactttcaaatcaccttgctcttgcacttgcgggaggggtagctaccagcattctcgggaggcaggcaggtccacttcgaaatttgctcttcagactgatggactcaactgtcccagatgaaatccaagaggtggtaattgaaactttatcagtgggagcaaccatgctgttacctccattacgagaacggatggaattacttcattctcttttacctcaaggacctgatagatgggaaagcttatctaaaggacagagaatgcaactggatatcatcctgacaagtttgcaagatcatacccacgtagcctccctacttggctatagttcaccctctgatgctgctgacctatcttctgtgtgtactggctacggaaatctgtcagatcaaccttacggcactcagagctgccatccagatacccacctggctgaaattttgatgaagaccctcttaagaaatttaggattttatacagatcaagcatttggagagctagaaaagaatagtgataaatttctacttggaacatcatcatcagaaaacagtcagcctgctcatcttcatgaactgctatgttcactacagaaacagctgctggcattttgccatatcaataacattagtgagaactcaagcagtgtggcattgcttcataaacatcttcagcttttgttgcctcatgccacagatatttattcacgttctgcaaatttgctcaaagaaagtccttggaatggcagtgttggagaaaaattaagagatgtgatatacgtctcagctgctggcagtatgctctgccagattgttaactccctgctgttactccctgtgtcagtggctcggcctttattgagttacctcctcgacttgttgccacctcttgattgccttaatagactcctgccagctgctgatcttttagaagaccaggagttacagtggcctcttcatggagggccagaactaattgatcctgctggtctgccattacctcagccagctcagtcctgggtatggcttgtggatctagaaagaacaattgctctccttattgggcggtgtcttggtggcatgcttcagggctcccctgtgtctccagaggaacaggacactgcatattggatgaaaacgccactgttcagtgacggtgtagaaatggacactcctcaattggataaatgtatgagttgcctgttagaagtagcactttctggaaatgaagaacagaagccttttgattataaattgcggcctgaaattgctgtctatgtagacttggcattgggttgttctaaagagcctgcccgaagcctttggatcagcatgcaggactatgctgttagtaaagattgggacagtgcaactttaagtaatgagtcactcttggacactgtgtctagatttgttcttgcagctcttctgaaacacacaaatttacttagtcaagcatgtggagaaagccggcaagtaacttaaaactatcctcagacaaatatttgctctcatgatgtcagaaattaggtaacttttctattttggttcttcatttagatatcaacctggtaaacacttatcagaagtgtaccgttgtgtatacaaagttcgaagtcgtttacttgcttgcaagaaccttgaacttattcaaacaaggtcatcatcacgggacagatggatatcagaaaaccaggactctgcagatgttgatcctcaggagcattcatttactcgaactattgatgaagaagctgaaatggaagaacaggctgagagagaccgggaagaggggcatccggagccagaggatgaagaggaggaacgggaacatgaagtgatgacagctggcaaaatctttcagtgtttcctctcagcccgtgaagtagctcgtagccgagaccgagatagaatgaacagtggggcagggtctggggctcgagctgatgatccacctcctcagtctcagcaagagcgaagggtcagcacagaccttcctgagggtcaggatgtgtacactgctgcatgcaactccgtgatccatcggtgtgccctgttaatattaggagtaagtcctgtgatagatgagcttcagaagcgaagagaagaaggacagttgcagcaaccttcaacaagtgcctctgaagggggtggacttatgaccaggagtgaaagtcttactgcagagagccggctagtccacacaagcccaaattatagactgatcaaatcgaggagtgaatctgatttgtctcagcctgaatcagatgaagagggttacgcactgagtggcagacgaaatgttgatttggatttggcagcatctcacagaaagagaggtcctatgcacagtcaattggaatccctgagtgactcttgggctcgcctgaaacatagcagagactggttatgcaactcctcctattcctttgagtcagattttgatcttaccaagtctttgggagttcacactttgattgaaaatgttgtaagctttgtgagtggagatgtggggaatgccccaggttttaaagagccagaggaaagtatgtctacaagtccccaggcctccatcattgcaatggaacagcagcagttaagggcagaacttcgtttagaggcacttcatcagatcctcgttctattgtctgggatggaagaaaaaggtagcatctcactggcaggaagcagattgagttcaggcttccagtcctccacactactcacgtctgtgaggctgcagttcctagcagggtgttttggtttaggcactgttggacacacaggagccaagggagagagtggccgattgcatcactatcaggatgggatcagagcagctaagagaaatattcagattgaaatccaggtagctgtgcataaaatttatcaacagttgtctgctaccctggaaagagccctgcaagcaaacaagcatcacattgaagcccagcaacgtctgcttctggttacagtttttgccctaagtgttcattatcaaccagtagatgtttctttggcaatttccactggtctgctaaacgtattgtcacagttgtgtggtacagacaccatgctaggacagcccctgcagttgttgccaaagacgggtgtttcccagcttagcacagctttgaaagtggccagtacaaggttgctccagattctagccatcactactgggacctatgctgataaactgagtcccaaagtagttcaatccttgttggatctactctgtagtcagttgaagaatttattgtcccaaactggtgtactacatatggcctctttcggagaaggggagcaagaagacggtgaagaagaagaaaaaaaagttgactccagtggagaaactgagaagaaagatttcagagctgctcttaggaaacaacatgcagccgaactccatctaggggattttttagtttttcttcgcagagttgtatcttcaaaagcaattcaatcaaaaatggcttccccaaagtggaccgaagtgcttctaaatatagcatctcagaaatgttcttcaggtatccctctggttggtaacttaagaacaaggctccttgcacttcatgtccttgaagctgtgctgccagcttgtgaatctggtgtagaagatgatcaaatggcccagattgttgagcgcttattttcccttctctctgattgtatgtgggagacacccattgctcaggccaaacatgctattcagataaaggaaaaagaacaagaaataaaactacagaagcagggcgagttggaagaagaagatgagaatcttcctatccaagaagtatcctttgacccggagaaagctcagtgttgcctagtggagaatggacagattttaactcacggcagtggagggaaaggatatggattggcatctacaggagtaacttctgggtgctatcagtggaagttttatattgtgaaggaaaacagaggtaatgaaggcacgtgtgttggagtttctcgctggccagtacatgactttaatcaccgcactacctcggatatgtggctctatagggcctacagtggtaacctctatcacaatggagaacagactctcacattgtccagctttactcaaggagatttcattacctgtgtgttagacatggaagccaggaccatttcttttgggaaaaatggagaggaacccaaattagcttttgaagatgtggatgcagcagagttgtacccatgtgtgatgttctatagtagcaatccaggggaaaaggtgaaaatttgtgatatgcagatgcgtggcacaccccgagacttacttccaggagaccctatttgtagtccagtagcagcagtgctggctgaggccactattcagctcatccgtatccttcaccgaacagaccgttggacttactgcattaacaaaaaaatgatggaaaggcttcacaaaattaagatatgtattaaagagtcaggtcagaagctaaagaaaagccgctcggttcagagccgagaggaaaatgaaatgagagaggagaaggagagcaaagaggaagagaaaggtaaacatactaggcatggcctcgctgacctctcagagctgcagctgaggactctttgcatagaggtgtggcccgtgctggctgtgataggaggagttgatgctggtcttagagttggaggtcggtgtgttcacaagcaaactgggcgccatgccacgctgctgggagtggtcaaagagggcagcacgtctgccaaggtccaatgggatgaagcagaaattactatcagtgatactccattgtataatctggaaccctgtgaaccattgccgtttgatgtggcgcgattccgaggcctgacggcttctgtgctgctggacctaacatatctcactggcgttcatgaagacatgggcaaacagagcaccaaacgacatgaaaagaaacaccgacatgaatccgaggagaaaggggatgttgagcagaaacctgagagtgaatccgctttagatatgcgaacaggcctaacatctgatgacgtcaaaagtcagagtaccacaagctccaaatcagaaaatgaaatcgcttcattttctttagatccaacactgccaagtgtggaatcccaacatcaaataacagaagggaaaagaaaaaatcatgaacacatgtccaaaaaccatgatgtagcccagtcagaaatcagagcagtccagctgtcctatctttacctcggtgctatgaagtcacttagtgcccttcttggctgtagtaaatatgctgagctgttgctgataccaaaagttctggctgaaaatggccacaactcagactgtgcaagttctccagttgttcatgaagacgtggagatgcgagcagccctgcagttcttgatgcgacacatggtgaagcgagcagtcatgcggtcacccataaagagagcattgggattagctgatctggaacgagcgcaagccatgatctataaattagtggttcatgggcttttggaagaccagtttgggggcaaaattaagcaagagattgatcaacaagctgaagaaagtgaccctgcccagcaggcacagacaccagttactactagcccatcagcctcaagcacgacctcctttatgagcagctctctggaggacaccacaactgccaccactccagtcactgacacagaaacagtgcctgcatccgagtccccgggagtgatgcctcttagtcttctcaggcaaatgttctctagttacccaactaccactgtacttcccacacgtcgggcacagactcctccaatatcttcgttaccaacctctccttctgatgaagtaggaaggaggcaaagtttaacttctcctgattcccagtcagcaaggccagctaaccgcacagccttgtcagacccaagcagtagactttcaacttctcctcctcctccagcaattgcagttcccttgctggaaatggggttctctcttcggcagattgccaaagccatggaagctacaggtgctaggggagaggctgatgcccagaatatcactgtccttgccatgtggatgatagagcaccctgggcatgaggatgaagaggagccccagtcgggcagcacagcagactctaggcctggagcagccgttctaggcagtggcgggaagtcaaatgatccctgttatttgcagtcacctggagacataccatcagctgatgctgctgaaatggaggaaggttttagtgaaagccctgataatttggatcatacagagaatgcagcttctggaagtggaccatcagctagaggtcgctcagcggtaacaagaagacacaagtttgacttagctgctcgcacactgctagcaagagcagcgggattataccgctctgtgcaggcccacaggaatcaaagtcggagagaaggaatatctttgcagcaagacccaggggcgttgtatgactttaatttagatgaggaattggaaattgatcttgatgatgaggcgatggaagctatgtttggacaagacctgaccagtgacaatgatattctgggaatgtggatcccagagcatgtttgtgagtctgaagacagggaagaagtggtggtgtgtgaactgtgtgaatgcagcgtcgtcagcttcaatcagcacatgaagagaaaccatccaggctgtgggcgcagtgcaaaccgccagggctatcgcagcaatggttcctatgtggatggctggtttggcggtgaatgtgggagtggaaatccatactacctgttatgtggcacctgcagggagaagtacttagccatgaagaccaaatctaagtcaacaagttctgaaaggtacaagggacaagctccagatctaattggcaagcaagacagtgtgtatgaagaagactgggacatgttggatgttgatgaagatgaaaagctaactggtgaagaagaatttgaattacttgctggaccgcttggtttaaatgaccggcgcattgtaccagaaccagttcagttccctgacagcgatccactgggagcatcagtagcaatggtcacagccaccaacagtatggaagagactctgatgcaaataggttgccatggctccgtagaaaagagctcctctgggagaataacgttaggagagcaggcagctgccctagcaaaccctcatgaccgtgtggtggctttaaggagagtgactgctgctgctcaggttcttctggccagaaccatggtcatgagagcgctgtctcttctctcagtcagtggttccagttgtagcctggctgctggtcttgagtctctggggctaacagatatccgaacgctagttcgattaatgtgcttggcagcagcagggagagctggcctctccaccagcccttctgccatggctagcacctcagaacgatcacgaggtgggcatagcaaggctaacaagcctatctcttgcctggcctatttgagcacagcagtgggatgtctggcatcaaatgctcctagtgctgccaaactgcttgtacagttgtgtacacagaacttgatttctgctgcaacaggtgtaaatctaaccacagttgatgactcaattcagcgaaagtttctacccagctttctccgaggaattgctgaagagaacaagcttgtgacctccccaaactttgttgtaacacaggcccttgtggcattgctagcagacaaaggggccaaactaagacctaactatgataagtcagaagttgaaaagaaaggccctctggagttggctaatgccctggcagcctgctgcctctcctccaggctgtcctcacagcatcggcaatgggcagctcagcaactcgtgcgcactcttgctgcacacgaccgtgacaaccaaactactctgcagacacttgctgatatgggaggagatcttagaaaatgctcctttatcaaattggaggctcatcagaacagagtaatgacatgtgtttggtgtaataaaaaaggtcttttggctacaagtggcaatgatggcaccatccgcgtatggaatgttaccaagaagcaatattcactgcaacagacctgtgtgttcaacagattggaaggggatgctgaggaaagcctgggatcacccagtgatccaagtttctcaccagtttcctggagtatcagtggcaaatatctagcaggcgctttggaaaagatggtgaatatctggcaagttaatggaggaaaaggattagtagatattcagcctcattgggtatctgccctggcttggccagaagagggtccggctacagcctggtcaggagagtctccagaattgttgttggtgggacggatggatggatctctgggactgattgaagttgttgatgtgtccaccatgcaccgtcgagaattggagcattgctatcgaaaggatgtgtctgttacttgcattgcatggttcagtgaagacagaccatttgcagtgggatattttgatggaaaactgttactgggaacaaaggaaccacttgagaaaggaggcattgttctaattgatgcacataaggatactcttattagcatgaagtgggaccctacaggtcatattcttatgacatgtgccaaagaagacagtgtgaaactctggggctctatttcgggatgctggtgctgtctacattcactctgccatccatctattgtaaatggcattgcttggtgccgccttccagggaaaggatccaagttgcagttactgatggctactggctgtcagagtggcttagtatgtgtttggcgcattcctcaagatactacacagaccaatgtgactagtgcagaaggatggtgggaccaggaatcaaattgccaggatggatataggaaatcatcaggagccaagtgtgtttatcagctgcggggacacatcactcctgttcggactgttgcctttagttctgatgggttggccctggtgtctggtggactaggtgggctcatgaacatttggtctttaagggatggctctgtcttgcaaactgttgtgataggctctggagctattcagaccacagtatggattccagaagttggagtagctgcttgctcaaatagatcaaaggatgttttggtcgtgaattgtacagcagaatgggcagctgccaatcatgttttggcaacctgtaggacagcattgaaacagcagggtgttctgggattgaacatggctccctgcatgagagcatttttggagcggctccccatgatgcttcaggagcagtatgcctatgaaaagcctcatgtggtttgtggtgaccaacttgttcatagcccctatatgcaatgcttggcttcccttgctgtgggacttcatctggatcagctgttgtgtaaccctccagtgccaccacaccaccagaactgtctgcctgaccctgcatcctggaatccaaatgaatgggcctggttagaatgtttctcaaccactataaaagctgccgaagccctgaccaatggagcccagtttccagaatcttttaccgttccagatctagaacctgttccagaggatgaacttgtatttctaatggataacagtaaatggattaacggcatggatgaacaaattatgtcttgggcaacttccagacctgaggactggcacctgggaggtaaatgtgatgtctacttatggggtgctggtaggcatggacagctggcagaagctggaagaaatgtaatggtacctgcagcagctccctcattctcacaggcccaacaggtcatttgtggtcagaattgtacctttgtcatccaggccaatggcacagtgttggcttgtggggaaggaagttatggcagattaggacaaggaaattcagatgaccttcatgtgctgacagttatttcagccttacaaggctttgtggtgacccagctggtgacttcctgtggttctgatgggcactctatggccctaactgaaagtggtgaggtctttagctggggagatggtgactatggtaaacttggccatgggaacagcgacaggcagcggcggcccaggcagatcgaggccttacaaggagaagaagtggtgcagatgtcttgtggcttcaagcactcagcagtggtcacttcagatggcaaactgttcacctttgggaatggtgactatggtcgtctgggtcttggaaatacctctaacaaaaaacttccagagagagtgactgcactggagggatatcagattggacaggtggcctgtggattaaaccacactttggcagtgtcagcagatggttccatggtgtgggcttttggagatggagactatggaaaactaggcttaggaaattccactgcaaaatcttcacctcagaaaattgacgtcctttgtggaattggaataaaaaaggttgcttgtggaactcagttttctgttgctttgaccaaagatggtcatgtgtatacctttggtcaagatcgcctgataggcttgccagaggggcgtgctcgcaatcacaatcgaccgcaacaaatccctgtcctggctggagtaatcattgaagatgtggcagttggagctgaacacacacttgctttggcatcaaatggagatgtgtatgcctgggggagcaattcagaagggcagctcggcttaggccataccaaccatgttcgagaaccaaccctggtaacaggtctgcaagggaaaaatgttcggcagatctcggctggccgctgccacagtgctgcatggacagcaccacctgtcccaccaagagcaccaggtgtgtcagtacctctgcagctgggcctgcctgacacagtgcccccccagtatggggcgctgagagaagtcagcattcacacggtgcgggccaggctccggctgctctaccacttctctgacctcatgtactcatcctggagactgctgaaccttagccccaacaaccagaacagcacatcccattataatgctggaacttggggcattgtacagggacaacttcggcctttgttagccccaagagtctacactctgccaatggtgcgctccataggaaaaaccatggttcaaggcaaaaactatggacctcagataactgtaaagaggatatcaaccagaggacggaagtgtaagcctatttttgtccaaatagcgagacaagtagttaagctgaatgcttcagacctccgcctgccttcccgagcgtggaaggttaagctggttggagaaggggctgatgatgctggaggagtgtttgatgacaccatcacagagatgtgccaggaacttgaaactggtattgttgaccttcttataccctctcccaatgccaccgcagaagtgggttacaatagggacaggttcctttttaacccttctgcctgcctcgatgaacacttaatgcagtttaagtttttaggaattttaatgggggttgccattcgcacaaagaagcctctggacctccacttggcccctctggtgtggaagcagctgtgctgtgtcccactcaccctagaggacctggaggaggtggatctgctctacgtgcagactctcaacagcattcttcacattgaagacagtgggattaccgaggagagtttccatgagatgattcctcttgattcttttgttggccagagtgctgatggcaaaatggttcctataatccctggtggaaatagtatcccactcacattttccaacaggaaggaatatgtggagagggccattgaatatcgacttcatgagatggacagacaggtggctgcagtccgagaagggatgtcctggattgttcctgtgccgctgctgtccctcctcacagcaaaacaactggagcagatggtgtgtgggatgcccgagatctctgtggaagtcttgaagaaagtggtgcggtaccgtgaggtggatgagcagcatcagctggtgcagtggttctggcacacgctggaagagttctccaatgaggagcgggtgcttttcatgaggtttgtgtcaggaagatctcgactaccagccaacactgctgacatttctcagagatttcaaatcatgaaggttgataggccttacgacagtctgcctacctcacagacctgcttcttccagctgaggctgcccccgtactccagccagctggtcatggccgagcgcctgcgctatgccatcaacaactgccgctcaatcgacatggacaactacatgctctcgagaaacgtggacaacgccgagggctccgacactgactactgaccgtgcgggtgctctcaccctcccttctctccctcaataatgctcacttctgatttgatgttgatatacttttatggtaactacatagatgttataagaacataaaccaacattataaacaatggccacatttagttactctaaatgtaacaaagaaattagatgtttttatttttctgtgattgtacaaaaacaacaaaaacgaagtgctctcagtcaggtttttccctccatatttttggtcacttttgataagtttgcatgaaaccattttggtgcatttttagttgggaatggtacatttttgtaaatccacccagtgaacatgaaattgtacattgtgtataattgttcattagaaaggacagttttacatgaatattcatatatttattttgttttaatttgaattgcctgttcagggttccttatgcagagaaataaagcagattcaggaattgg

SEQ ID NO: 60548 - DNA, 12208 bp, Homo sapiens
cgcttgcatgattgtaggtggcatcgataaacaccggtgtttatcgatgccacactgctatgttcactacagaaacagctgctggcattttgccatatcaataacattagtgagaactcaagcagtgtggcattgcttcataaacatcttcagcttttgttgcctcatgccacagatatttattcacgttctgcaaatttgctcaaagaaagtccttggaatggcagtgttggagaaaaattaagagatgtgatatacgtctcagctgctggcagtatgctctgccagattgttaactccctgctgttactccctgtgtcagtggctcggcctttattgagttacctcctcgacttgttgccacctcttgattgccttaatagactcctgccagctgctgatcttttagaagaccaggagttacagtggcctcttcatggagggccagaactaattgatcctgctggtctgccattacctcagccagctcagtcctgggtatggcttgtggatctagaaagaacaattgctctccttattgggcggtgtcttggtggcatgcttcagggctcccctgtgtctccagaggaacaggacactgcatattggatgaaaacgccactgttcagtgacggtgtagaaatggacactcctcaattggataaatgtatgagttgcctgttagaagtagcactttctggaaatgaagaacagaagccttttgattataaattgcggcctgaaattgctgtctatgtagacttggcattgggttgttctaaagagcctgcccgaagcctttggatcagcatgcaggactatgctgttagtaaagattgggacagtgcaactttaagtaatgagtcactcttggacactgtgtctagatttgttcttgcagctcttctgaaacacacaaatttacttagtcaagcatgtggagaaagccggcaagtaacttaaaactatcctcagacaaatatttgctctcatgatgtcagaaattaggtaacttttctattttggttcttcatttagatatcaacctggtaaacacttatcagaagtgtaccgttgtgtatacaaagttcgaagtcgtttacttgcttgcaagaaccttgaacttattcaaacaaggtcatcatcacgggacagatggatatcagaaaaccaggactctgcagatgttgatcctcaggagcattcatttactcgaactattgatgaagaagctgaaatggaagaacaggctgagagagaccgggaagaggggcatccggagccagaggatgaagaggaggaacgggaacatgaagtgatgacagctggcaaaatctttcagtgtttcctctcagcccgtgaagtagctcgtagccgagaccgagatagaatgaacagtggggcagggtctggggctcgagctgatgatccacctcctcagtctcagcaagagcgaagggtcagcacagaccttcctgagggtcaggatgtgtacactgctgcatgcaactccgtgatccatcggtgtgccctgttaatattaggagtaagtcctgtgatagatgagcttcagaagcgaagagaagaaggacagttgcagcaaccttcaacaagtgcctctgaagggggtggacttatgaccaggagtgaaagtcttactgcagagagccggctagtccacacaagcccaaattatagactgatcaaatcgaggagtgaatctgatttgtctcagcctgaatcagatgaagagggttacgcactgagtggcagacgaaatgttgatttggatttggcagcatctcacagaaagagaggtcctatgcacagtcaattggaatccctgagtgactcttgggctcgcctgaaacatagcagagactggttatgcaactcctcctattcctttgagtcagattttgatcttaccaagtctttgggagttcacactttgattgaaaatgttgtaagctttgtgagtggagatgtggggaatgccccaggttttaaagagccagaggaaagtatgtctacaagtccccaggcctccatcattgcaatggaacagcagcagttaagggcagaacttcgtttagaggcacttcatcagatcctcgttctattgtctgggatggaagaaaaaggtagcatctcactggcaggaagcagattgagttcaggcttccagtcctccacactactcacgtctgtgaggctgcagttcctagcagggtgttttggtttaggcactgttggacacacaggagccaagggagagagtggccgattgcatcactatcaggatgggatcagagcagctaagagaaatattcagattgaaatccaggtagctgtgcataaaatttatcaacagttgtctgctaccctggaaagagccctgcaagcaaacaagcatcacattgaagcccagcaacgtctgcttctggttacagtttttgccctaagtgttcattatcaaccagtagatgtttctttggcaatttccactggtctgctaaacgtattgtcacagttgtgtggtacagacaccatgctaggacagcccctgcagttgttgccaaagacgggtgtttcccagcttagcacagctttgaaagtggccagtacaaggttgctccagattctagccatcactactgggacctatgctgataaactgagtcccaaagtagttcaatccttgttggatctactctgtagtcagttgaagaatttattgtcccaaactggtgtactacatatggcctctttcggagaaggggagcaagaagacggtgaagaagaagaaaaaaaagttgactccagtggagaaactgagaagaaagatttcagagctgctcttaggaaacaacatgcagccgaactccatctaggggattttttagtttttcttcgcagagttgtatcttcaaaagcaattcaatcaaaaatggcttccccaaagtggaccgaagtgcttctaaatatagcatctcagaaatgttcttcaggtatccctctggttggtaacttaagaacaaggctccttgcacttcatgtccttgaagctgtgctgccagcttgtgaatctggtgtagaagatgatcaaatggcccagattgttgagcgcttattttcccttctctctgattgtatgtgggagacacccattgctcaggccaaacatgctattcagataaaggaaaaagaacaagaaataaaactacagaagcagggcgagttggaagaagaagatgagaatcttcctatccaagaagtatcctttgacccggagaaagctcagtgttgcctagtggagaatggacagattttaactcacggcagtggagggaaaggatatggattggcatctacaggagtaacttctgggtgctatcagtggaagttttatattgtgaaggaaaacagaggtaatgaaggcacgtgtgttggagtttctcgctggccagtacatgactttaatcaccgcactacctcggatatgtggctctatagggcctacagtggtaacctctatcacaatggagaacagactctcacattgtccagctttactcaaggagatttcattacctgtgtgttagacatggaagccaggaccatttcttttgggaaaaatggagaggaacccaaattagcttttgaagatgtggatgcagcagagttgtacccatgtgtgatgttctatagtagcaatccaggggaaaaggtgaaaatttgtgatatgcagatgcgtggcacaccccgagacttacttccaggagaccctatttgtagtccagtagcagcagtgctggctgaggccactattcagctcatccgtatccttcaccgaacagaccgttggacttactgcattaacaaaaaaatgatggaaaggcttcacaaaattaagatatgtattaaagagtcaggtcagaagctaaagaaaagccgctcggttcagagccgagaggaaaatgaaatgagagaggagaaggagagcaaagaggaagagaaaggtaaacatactaggcatggcctcgctgacctctcagagctgcagctgaggactctttgcatagaggtgtggcccgtgctggctgtgataggaggagttgatgctggtcttagagttggaggtcggtgtgttcacaagcaaactgggcgccatgccacgctgctgggagtggtcaaagagggcagcacgtctgccaaggtccaatgggatgaagcagaaattactatcagcttcccaactttttggtcgcctagtgatactccattgtataatctggaaccctgtgaaccattgccgtttgatgtggcgcgattccgaggcctgacggcttctgtgctgctggacctaacatatctcactggcgttcatgaagacatgggcaaacagagcaccaaacgacatgaaaagaaacaccgacatgaatccgaggagaaaggggatgttgagcagaaacctgagagtgaatccgctttagatatgcgaacaggcctaacatctgatgacgtcaaaagtcagagtaccacaagctccaaatcagaaaatgaaatcgcttcattttctttagatccaacactgccaagtgtggaatcccaacatcaaataacagaagggaaaagaaaaaatcatgaacacatgtccaaaaaccatgatgtagcccagtcagaaatcagagcagtccagctgtcctatctttacctcggtgctatgaagtcacttagtgcccttcttggctgtagtaaatatgctgagctgttgctgataccaaaagttctggctgaaaatggccacaactcagactgtgcaagttctccagttgttcatgaagacgtggagatgcgagcagccctgcagttcttgatgcgacacatggtgaagcgagcagtcatgcggtcacccataaagagagcattgggattagctgatctggaacgagcgcaagccatgatctataaattagtggttcatgggcttttggaagaccagtttgggggcaaaattaagcaagagattgatcaacaagctgaagaaagtgaccctgcccagcaggcacagacaccagttactactagcccatcagcctcaagcacgacctcctttatgagcagctctctggaggacaccacaactgccaccactccagtcactgacacagaaacagtgcctgcatccgagtccccgggagtgatgcctcttagtcttctcaggcaaatgttctctagttacccaactaccactgtacttcccacacgtcgggcacagactcctccaatatcttcgttaccaacctctccttctgatgaagtaggaaggaggcaaagtttaacttctcctgattcccagtcagcaaggccagctaaccgcacagccttgtcagacccaagcagtagactttcaacttctcctcctcctccagcaattgcagttcccttgctggaaatggggttctctcttcggcagattgccaaagccatggaagctacaggtgctaggggagaggctgatgcccagaatatcactgtccttgccatgtggatgatagagcaccctgggcatgaggatgaagaggagccccagtcgggcagcacagcagactctaggcctggagcagccgttctaggcagtggcgggaagtcaaatgatccctgttatttgcagtcacctggagacataccatcagctgatgctgctgaaatggaggaaggttttagtgaaagccctgataatttggatcatacagagaatgcagcttctggaagtggaccatcagctagaggtcgctcagcggtaacaagaagacacaagtttgacttagctgctcgcacactgctagcaagagcagcgggattataccgctctgtgcaggcccacaggaatcaaagtcggagagaaggaatatctttgcagcaagacccaggggcgttgtatgactttaatttagatgaggaattggaaattgatcttgatgatgaggcgatggaagctatgtttggacaagacctgaccagtgacaatgatattctgggaatgtggatcccagagcatgtttgtgagtctgaagacagggaagaagtggtggtgtgtgaactgtgtgaatgcagcgtcgtcagcttcaatcagcacatgaagagaaaccatccaggctgtgggcgcagtgcaaaccgccagggctatcgcagcaatggttcctatgtggatggctggtttggcggtgaatgtgggagtggaaatccatactacctgttatgtggcacctgcagggagaagtacttagccatgaagaccaaatctaagtcaacaagttctgaaaggtacaagggacaagctccagatctaattggcaagcaagacagtgtgtatgaagaagactgggacatgttggatgttgatgaagatgaaaagctaactggtgaagaagaatttgaattacttgctggaccgcttggtttaaatgaccggcgcattgtaccagaaccagttcagttccctgacagcgatccactgggagcatcagtagcaatggtcacagccaccaacagtatggaagagactctgatgcaaataggttgccatggctccgtagaaaagagctcctctgggagaataacgttaggagagcaggcagctgccctagcaaaccctcatgaccgtgtggtggctttaaggagagtgactgctgctgctcaggttcttctggccagaaccatggtcatgagagcgctgtctcttctctcagtcagtggttccagttgtagcctggctgctggtcttgagtctctggggctaacagatatccgaacgctagttcgattaatgtgcttggcagcagcagggagagctggcctctccaccagcccttctgccatggctagcacctcagaacgatcacgaggtgggcatagcaaggctaacaagcctatctcttgcctggcctatttgagcacagcagtgggatgtctggcatcaaatgctcctagtgctgccaaactgcttgtacagttgtgtacacagaacttgatttctgctgcaacaggtgtaaatctaaccacagttgatgactcaattcagcgaaagtttctacccagctttctccgaggaattgctgaagagaacaagcttgtgacctccccaaactttgttgtaacacaggcccttgtggcattgctagcagacaaaggggccaaactaagacctaactatgataagtcagaagttgaaaagaaaggccctctggagttggctaatgccctggcagcctgctgcctctcctccaggctgtcctcacagcatcggcaatgggcagctcagcaactcgtgcgcactcttgctgcacacgaccgtgacaaccaaactactctgcagacacttgctgatatgggaggagatcttagaaaatgctcctttatcaaattggaggctcatcagaacagagtaatgacatgtgtttggtgtaataaaaaaggtcttttggctacaagtggcaatgatggcaccatccgcgtatggaatgttaccaagaagcaatattcactgcaacagacctgtgtgttcaacagattggaaggggatgctgaggaaagcctgggatcacccagtgatccaagtttctcaccagtttcctggagtatcagtggcaaatatctagcaggcgctttggaaaagatggtgaatatctggcaagttaatggaggaaaaggattagtagatattcagcctcattgggtatctgccctggcttggccagaagagggtccggctacagcctggtcaggagagtctccagaattgttgttggtgggacggatggatggatctctgggactgattgaagttgttgatgtgtccaccatgcaccgtcgagaattggagcattgctatcgaaaggatgtgtctgttacttgcattgcatggttcagtgaagacagaccatttgcagtgggatattttgatggaaaactgttactgggaacaaaggaaccacttgagaaaggaggcattgttctaattgatgcacataaggatactcttattagcatgaagtgggaccctacaggtcatattcttatgacatgtgccaaagaagacagtgtgaaactctggggctctatttcgggatgctggtgctgtctacattcactctgccatccatctattgtaaatggcattgcttggtgccgccttccagggaaaggatccaagttgcagttactgatggctactggctgtcagagtggcttagtatgtgtttggcgcattcctcaagatactacacagaccaatgtgactagtgcagaaggatggtgggaccaggaatcaaattgccaggatggatataggaaatcatcaggagccaagtgtgtttatcagctgcggggacacatcactcctgttcggactgttgcctttagttctgatgggttggccctggtgtctggtggactaggtgggctcatgaacatttggtctttaagggatggctctgtcttgcaaactgttgtgataggctctggagctattcagaccacagtatggattccagaagttggagtagctgcttgctcaaatagatcaaaggatgttttggtcgtgaattgtacagcagaatgggcagctgccaatcatgttttggcaacctgtaggacagcattgaaacagcagggtgttctgggattgaacatggctccctgcatgagagcatttttggagcggctccccatgatgcttcaggagcagtatgcctatgaaaagcctcatgtggtttgtggtgaccaacttgttcatagcccctatatgcaatgcttggcttcccttgctgtgggacttcatctggatcagctgttgtgtaaccctccagtgccaccacaccaccagaactgtctgcctgaccctgcatcctggaatccaaatgaatgggcctggttagaatgtttctcaaccactataaaagctgccgaagccctgaccaatggagcccagtttccagaatcttttaccgttccagatctagaacctgttccagaggatgaacttgtatttctaatggataacagtaaatggattaacggcatggatgaacaaattatgtcttgggcaacttccagacctgaggactggcacctgggaggtaaatgtgatgtctacttatggggtgctggtaggcatggacagctggcagaagctggaagaaatgtaatggtacctgcagcagctccctcattctcacaggcccaacaggtcatttgtggtcagaattgtacctttgtcatccaggccaatggcacagtgttggcttgtggggaaggaagttatggcagattaggacaaggaaattcagatgaccttcatgtgctgacagttatttcagccttacaaggctttgtggtgacccagctggtgacttcctgtggttctgatgggcactctatggccctaactgaaagtggtgaggtctttagctggggagatggtgactatggtaaacttggccatgggaacagcgacaggcagcggcggcccaggcagatcgaggccttacaaggagaagaagtggtgcagatgtcttgtggcttcaagcactcagcagtggtcacttcagatggcaaactgttcacctttgggaatggtgactatggtcgtctgggtcttggaaatacctctaacaaaaaacttccagagagagtgactgcactggagggatatcagattggacaggtggcctgtggattaaaccacactttggcagtgtcagcagatggttccatggtgtgggcttttggagatggagactatggaaaactaggcttaggaaattccactgcaaaatcttcacctcagaaaattgacgtcctttgtggaattggaataaaaaaggttgcttgtggaactcagttttctgttgctttgaccaaagatggtcatgtgtatacctttggtcaagatcgcctgataggcttgccagaggggcgtgctcgcaatcacaatcgaccgcaacaaatccctgtcctggctggagtaatcattgaagatgtggcagttggagctgaacacacacttgctttggcatcaaatggagatgtgtatgcctgggggagcaattcagaagggcagctcggcttaggccataccaaccatgttcgagaaccaaccctggtaacaggtctgcaagggaaaaatgttcggcagatctcggctggccgctgccacagtgctgcatggacagcaccacctgtcccaccaagagcaccaggtgtgtcagtacctctgcagctgggcctgcctgacacagtgcccccccagtatggggcgctgagagaagtcagcattcacacggtgcgggccaggctccggctgctctaccacttctctgacctcatgtactcatcctggagactgctgaaccttagccccaacaaccagaacagcacatcccattataatgctggaacttggggcattgtacagggacaacttcggcctttgttagccccaagagtctacactctgccaatggtgcgctccataggaaaaaccatggttcaaggcaaaaactatggacctcagataactgtaaagaggatatcaaccagaggacggaagtgtaagcctatttttgtccaaatagcgagacaagtagttaagctgaatgcttcagacctccgcctgccttcccgagcgtggaaggttaagctggttggagaaggggctgatgatgctggaggagtgtttgatgacaccatcacagagatgtgccaggaacttgaaactggtattgttgaccttcttataccctctcccaatgccaccgcagaagtgggttacaatagggacaggttcctttttaacccttctgcctgcctcgatgaacacttaatgcagtttaagtttttaggaattttaatgggggttgccattcgcacaaagaagcctctggacctccacttggcccctctggtgtggaagcagctgtgctgtgtcccactcaccctagaggacctggaggaggtggatctgctctacgtgcagactctcaacagcattcttcacattgaagacagtgggattaccgaggagagtttccatgagatgattcctcttgattcttttgttggccagagtgctgatggcaaaatggttcctataatccctggtggaaatagtatcccactcacattttccaacaggaaggaatatgtggagagggccattgaatatcgacttcatgagatggacagacaggtggctgcagtccgagaagggatgtcctggattgttcctgtgccgctgctgtccctcctcacagcaaaacaactggagcagatggtgtgtgggatgcccgagatctctgtggaagtcttgaagaaagtggtgcggtaccgtgaggtggatgagcagcatcagctggtgcagtggttctggcacacgctggaagagttctccaatgaggagcgggtgcttttcatgaggtttgtgtcaggaagatctcgactaccagccaacactgctgacatttctcagagatttcaaatcatgaaggttgataggccttacgacagtctgcctacctcacagacctgcttcttccagctgaggctgcccccgtactccagccagctggtcatggccgagcgcctgcgctatgccatcaacaactgccgctcaatcgacatggacaactacatgctctcgagaaacgtggacaacgccgagggctccgacactgactactgaccgtgcgggtgctctcaccctcccttctctccctcaataatgctcacttctgatttgatgttgatatacttttatggtaactacatagatgttataagaacataaaccaacattataaacaatggccacatttagttactctaaatgtaacaaagaaattagatgtttttatttttctgtgattgtacaaaaacaacaaaaacgaagtgctctcagtcaggtttttccctccatatttttggtcacttttgataagtttgcatgaaaccattttggtgcatttttagttgggaatggtacatttttgtaaatccacccagtgaacatgaaattgtacattgtgtataattgttcattagaaaggacagttttacatgaatattcatatatttattttgttttaatttgaattgcctgttcagggttccttatgcagagaaataaagcagattcaggaattgg

SEQ ID NO: 60549 - DNA, 9265 bp, Homo sapiens
gcagcaaaaataaaggacgcgaccgaattccgcctctgcggagccgggctcgggtcgccggagccgcgccccaccccgccagctccagagccacgtaaatggggtttcaccgtgttagccaggatggtctcaatctcctgacctcgtgatccgcccacctcggcctcccaaagtactgggattacaggactaatggctgaaggataaatcaacatggcaactatgattccaccagtgaagctgaaatggcttgaacacttgaacagctcctggattacagaggacagtgaatctattgctacaagagagggagttgctgttctgtattctaaactggttagcaataaggaagtagtacctttgccccaacaagttttatgcctcaaaggaccacagttgccagactttgaacgtgagtctctttcaagtgatgagcaggaccactatttggatgcccttcttagcagccagctagcattggcaaagatggtatgttcagattccccatttgccggggcacttagaaaacgactgcttgtactccagcgtgtcttttatgcactttctaataaataccatgacaaaggcaaggtgaagcagcagcagcattctccggagagcagttctggttcagcagatgtccattctgttagtgaacgcccccggtcaagcactgatgcacttatagaaatgggtgttcgaactggtctaagtttattatttgcgcttctaagacaaagttggatgatgcctgtgtcaggacctggtctcagtctttgcaacgatgtcattcatactgcaattgaagttgtgagctctttgccaccattatcattagcaaatgaaagcaagattcctcctatgggcttggactgcttatcgcaagtaacaacatttcttaaaggagtcactattcctaattctggggcagacactttaggtcgtagattagcttctgagttgctgcttggtttggcagctcaacgaggctcattgcgatatcttcttgaatggatagaaatggctttgggggcttcggcagttgtacacaccatggagaaaggcaaactactctcaagccaggaaggaatgatcagctttgactgctttatgaccatattaatgcagatgaggcgttctttgggttcatctgctgatcggagtcagtggagagaaccaaccagaacatcggatggcttgtgctccctttacgaggcagcattatgtctctttgaagaggtttgcagaatggcttctgattattcgagaacatgtgctagcccagatagcattcagactggtgatgctcccattgtctccgaaacctgtgaggtttatgtttgggggagcaatagcagccatcagttggtagaaggtacacaggagaaaatactgcaacccaaactggctcctagtttctctgatgcacagaccattgaagctggacagtactgcacttttgtcatttctacggatggctcagttagagcttgcgggaaaggcagctatgggagactgggccttggagactccaataatcagtcaactttaaaaaagttaacattcgagcctcacagatccattaaaaaggtttcatcttctaaaggatctgatggtcacactttagcctttacgacagaaggagaagtcttcagttggggagatggtgattatgggaaactggggcatggaaatagttcaacacagaaatatcccaagcttattcagggacctctacaaggaaaggtagttgtttgtgtgtcagctggatacagacatagtgctgctgtcacagaggatggggaattatacacatggggtgaaggagactttggaagattaggtcatggtgacagcaatagtcgtaacattccaacattagtaaaagacatcagcaatgtaggagaggtttcttgtggcagttcacatactattgctctgtctaaagatgggagaactgtatggtcttttggaggaggagacaatggtaaacttggtcatggtgataccaacagagtgtataaacctaaagttattgaagctttacaaggaatgttcattcgcaaagtttgtgctgggagccagtcttcacttgctttgacatcaacagggcaggtctatgcttggggctgtggagcttgtctaggttgtggttcttcagaagctactgctttgagacccaagcttattgaagaactggctgccacaagaatagttgatgtttctattggagacagtcattgtttggctctttctcatgataatgaagtttatgcctggggcaataactcaatggggcaatgtggtcagggaaattccacaggtcctattactaaaccaaagaaagtgagtggcttagatggcatagctattcagcagatttcggctggaacatcacatagtctggcatggactgctcttcctagggacagacaagttgttgcatggcaccgaccttattgtgtagatcttgaagagagtaccttctcacacctgcgttcttttcttgagagatactgtgataaaataaacagtgagattcccccactccctttcccttcatcaagagaacaccacagttttctcaagctgtgcctgaagctactttcaaatcaccttgctcttgcacttgcgggaggggtagctaccagcattctcgggaggcaggcaggtccacttcgaaatttgctcttcagactgatggactcaactgtcccagatgaaatccaagaggtggtaattgaaactttatcagtgggagcaaccatgctgttacctccattacgagaacggatggaattacttcattctcttttacctcaaggacctgatagatgggaaagcttatctaaaggacagagaatgcaactggatatcatcctgacaagtttgcaagatcatacccacgtagcctccctacttggctatagttcaccctctgatgctgctgacctatcttctgtgtgtactggctacggaaatctgtcagatcaaccttacggcactcagagctgccatccagatacccacctggctgaaattttgatgaagaccctcttaagaaatttaggattttatacagatcaagcatttggagagctagaaaagaatagtgataaatttctacttggaacatcatcatcagaaaacagtcagcctgctcatcttcatgaactgctatgttcactacagaaacagctgctggcattttgccatatcaataacattagtgagaactcaagcagtgtggcattgcttcataaacatcttcagcttttgttgcctcatgccacagatatttattcacgttctgcaaatttgctcaaagaaagtccttggaatggcagtgttggagaaaaattaagagatgtgatatacgtctcagctgctggcagtatgctctgccagattgttaactccctgctgttactccctgtgtcagtggctcggcctttattgagttacctcctcgacttgttgccacctcttgattgccttaatagactcctgccagctgctgatcttttagaagaccaggagttacagtggcctcttcatggagggccagaactaattgatcctgctggtctgccattacctcagccagctcagtcctgggtatggcttgtggatctagaaagaacaattgctctccttattgggcggtgtcttggtggcatgcttcagggctcccctgtgtctccagaggaacaggacactgcatattggatgaaaacgccactgttcagtgacggtgtagaaatggacactcctcaattggataaatgtatgagttgcctgttagaagtagcactttctggaaatgaagaacagaagccttttgattataaattgcggcctgaaattgctgtctatgtagacttggcattgggttgttctaaagagcctgcccgaagcctttggatcagcatgcaggactatgctgttagtaaagattgggacagtgcaactttaagtaatgagtcactcttggacactgtgtctagatttgttcttgcagctcttctgaaacacacaaatttacttagtcaagcatgtggagaaagccggcaagtaacttaaaactatcctcagacaaatatttgctctcatgatgtcagaaattaggtaacttttctattttggttcttcatttagatatcaacctggtaaacacttatcagaagtgtaccgttgtgtatacaaagttcgaagtcgtttacttgcttgcaagaaccttgaacttattcaaacaaggtcatcatcacgggacagatggatatcagaaaaccaggactctgcagatgttgatcctcaggagcattcatttactcgaactattgatgaagaagctgaaatggaagaacaggctgagagagaccgggaagaggggcatccggagccagaggatgaagaggaggaacgggaacatgaagtgatgacagctggcaaaatctttcagtgtttcctctcagcccgtgaagtagctcgtagccgagaccgagatagaatgaacagtggggcagggtctggggctcgagctgatgatccacctcctcagtctcagcaagagcgaagggtcagcacagaccttcctgagggtcaggatgtgtacactgctgcatgcaactccgtgatccatcggtgtgccctgttaatattaggagtaagtcctgtgatagatgagcttcagaagcgaagagaagaaggacagttgcagcaaccttcaacaagtgcctctgaagggggtggacttatgaccaggagtgaaagtcttactgcagagagccggctagtccacacaagcccaaattatagactgatcaaatcgaggagtgaatctgatttgtctcagcctgaatcagatgaagagggttacgcactgagtggcagacgaaatgttgatttggatttggcagcatctcacagaaagagaggtcctatgcacagtcaattggaatccctgagtgactcttgggctcgcctgaaacatagcagagactggttatgcaactcctcctattcctttgagtcagattttgatcttaccaagtctttgggagttcacactttgattgaaaatgttgtaagctttgtgagtggagatgtggggaattgggaccctacaggtcatattcttatgacatgtgccaaagaagacagtgtgaaactctggggctctatttcgggatgctggtgctgtctacattcactctgccatccatctattgtaaatggcattgcttggtgccgccttccagggaaaggatccaagttgcagttactgatggctactggctgtcagagtggcttagtatgtgtttggcgcattcctcaagatactacacagaccaatgtgactagtgcagaaggatggtgggaccaggaatcaaattgccaggatggatataggaaatcatcaggagccaagtgtgtttatcagctgcggggacacatcactcctgttcggactgttgcctttagttctgatgggttggccctggtgtctggtggactaggtgggctcatgaacatttggtctttaagggatggctctgtcttgcaaactgttgtgataggctctggagctattcagaccacagtatggattccagaagttggagtagctgcttgctcaaatagatcaaaggatgttttggtcgtgaattgtacagcagaatgggcagctgccaatcatgttttggcaacctgtaggacagcattgaaacagcagggtgttctgggattgaacatggctccctgcatgagagcatttttggagcggctccccatgatgcttcaggagcagtatgcctatgaaaagcctcatgtggtttgtggtgaccaacttgttcatagcccctatatgcaatgcttggcttcccttgctgtgggacttcatctggatcagctgttgtgtaaccctccagtgccaccacaccaccagaactgtctgcctgaccctgcatcctggaatccaaatgaatgggcctggttagaatgtttctcaaccactataaaagctgccgaagccctgaccaatggagcccagtttccagaatcttttaccgttccagatctagaacctgttccagaggatgaacttgtatttctaatggataacagtaaatggattaacggcatggatgaacaaattatgtcttgggcaacttccagacctgaggactggcacctgggaggtaaatgtgatgtctacttatggggtgctggtaggcatggacagctggcagaagctggaagaaatgtaatggtacctgcagcagctccctcattctcacaggcccaacaggtcatttgtggtcagaattgtacctttgtcatccaggccaatggcacagtgttggcttgtggggaaggaagttatggcagattaggacaaggaaattcagatgaccttcatgtgctgacagttatttcagccttacaaggctttgtggtgacccagctggtgacttcctgtggttctgatgggcactctatggccctaactgaaagtggtgaggtctttagctggggagatggtgactatggtaaacttggccatgggaacagcgacaggcagcggcggcccaggcagatcgaggccttacaaggagaagaagtggtgcagatgtcttgtggcttcaagcactcagcagtggtcacttcagatggcaaactgttcacctttgggaatggtgactatggtcgtctgggtcttggaaatacctctaacaaaaaacttccagagagagtgactgcactggagggatatcagattggacaggtggcctgtggattaaaccacactttggcagtgtcagcagatggttccatggtgtgggcttttggagatggagactatggaaaactaggcttaggaaattccactgcaaaatcttcacctcagaaaattgacgtcctttgtggaattggaataaaaaaggttgcttgtggaactcagttttctgttgctttgaccaaagatggtcatgtgtatacctttggtcaagatcgcctgataggcttgccagaggggcgtgctcgcaatcacaatcgaccgcaacaaatccctgtcctggctggagtaatcattgaagatgtggcagttggagctgaacacacacttgctttggcatcaaatggagatgtgtatgcctgggggagcaattcagaagggcagctcggcttaggccataccaaccatgttcgagaaccaaccctggtaacaggtctgcaagggaaaaatgttcggcagatctcggctggccgctgccacagtgctgcatggacagcaccacctgtcccaccaagagcaccaggtgtgtcagtacctctgcagctgggcctgcctgacacagtgcccccccagtatggggcgctgagagaagtcagcattcacacggtgcgggccaggctccggctgctctaccacttctctgacctcatgtactcatcctggagactgctgaaccttagccccaacaaccagaacagcacatcccattataatgctggaacttggggcattgtacagggacaacttcggcctttgttagccccaagagtctacactctgccaatggtgcgctccataggaaaaaccatggttcaaggcaaaaactatggacctcagataactgtaaagaggatatcaaccagaggacggaagtgtaagcctatttttgtccaaatagcgagacaagtagttaagctgaatgcttcagacctccgcctgccttcccgagcgtggaaggttaagctggttggagaaggggctgatgatgctggaggagtgtttgatgacaccatcacagagatgtgccaggaacttgaaactggtattgttgaccttcttataccctctcccaatgccaccgcagaagtgggttacaatagggacaggttcctttttaacccttctgcctgcctcgatgaacacttaatgcagtttaagtttttaggaattttaatgggggttgccattcgcacaaagaagcctctggacctccacttggcccctctggtgtggaagcagctgtgctgtgtcccactcaccctagaggacctggaggaggtggatctgctctacgtgcagactctcaacagcattcttcacattgaagacagtgggattaccgaggagagtttccatgagatgattcctcttgattcttttgttggccagagtgctgatggcaaaatggttcctataatccctggtggaaatagtatcccactcacattttccaacaggaaggaatatgtggagagggccattgaatatcgacttcatgagatggacagacaggtggctgcagtccgagaagggatgtcctggattgttcctgtgccgctgctgtccctcctcacagcaaaacaactggagcagatggtgtgtgggatgcccgagatctctgtggaagtcttgaagaaagtggtgcggtaccgtgaggtggatgagcagcatcagctggtgcagtggttctggcacacgctggaagagttctccaatgaggagcgggtgcttttcatgaggtttgtgtcaggaagatctcgactaccagccaacactgctgacatttctcagagatttcaaatcatgaaggttgataggccttacgacagtctgcctacctcacagacctgcttcttccagctgaggctgcccccgtactccagccagctggtcatggccgagcgcctgcgctatgccatcaacaactgccgctcaatcgacatggacaactacatgctctcgagaaacgtggacaacgccgagggctccgacactgactactgaccgtgcgggtgctctcaccctcccttctctccctcaataatgctcacttctgatttgatgttgatatacttttatggtaactacatagatgttataagaacataaaccaacattataaacaatggccacatttagttactctaaatgtaacaaagaaattagatgtttttatttttctgtgattgtacaaaaacaacaaaaacgaagtgctctcagtcaggtttttccctccatatttttggtcacttttgataagtttgcatgaaaccattttggtgcatttttagttgggaatggtacatttttgtaaatccacccagtgaacatgaaattgtacattgtgtataattgttcattagaaaggacagttttacatgaatattcatatatttattttgttttaatttgaattgcctgttcagggttccttatgcagagaaataaagcagattcaggaattgg

SEQ ID NO: 60550 - DNA, 4336 bp, Homo sapiens
gcagcaaaaataaaggacgcgaccgaattccgcctctgcggagccgggctcgggtcgccggagccgcgccccaccccgccagctccagagccacgtaaatggggtttcaccgtgttagccaggatggtctcaatctcctgacctcgtgatccgcccacctcggcctcccaaagtactgggattacaggactaatggctgaaggataaatcaacatggcaactatgattccaccagtgaagctgaaatggcttgaacacttgaacagctcctggattacagaggacagtgaatctattgctacaagagagggagttgctgttctgtattctaaactggttagcaataaggaagtagtacctttgccccaacaagttttatgcctcaaaggaccacagttgccagactttgaacgtgagtctctttcaagtgatgagcaggaccactatttggatgcccttcttagcagccagctagcattggcaaagatggtatgttcagattccccatttgccggggcacttagaaaacgactgcttgtactccagcgtgtcttttatgcactttctaataaataccatgacaaaggcaaggtgaagcagcagcagcattctccggagagcagttctggttcagcagatgtccattctgttagtgaacgcccccggtcaagcactgatgcacttatagaaatgggtgttcgaactggtctaagtttattatttgcgcttctaagacaaagttggatgatgcctgtgtcaggacctggtctcagtctttgcaacgatgtcattcatactgcaattgaagttgtgagctctttgccaccattatcattagcaaatgaaagcaagattcctcctatgggcttggactgcttatcgcaagtaacaacatttcttaaaggagtcactattcctaattctggggcagacactttaggtcgtagattagcttctgagttgctgcttggtttggcagctcaacgaggctcattgcgatatcttcttgaatggatagaaatggctttgggggcttcggcagttgtacacaccatggagaaaggcaaactactctcaagccaggaaggaatgatcagctttgactgctttatgaccatattaatgcagatgaggcgttctttgggttcatctgctgatcggagtcagtggagagaaccaaccagaacatcggatggcttgtgctccctttacgaggcagcattatgtctctttgaagaggtttgcagaatggcttctgattattcgagaacatgtgctagcccagatagcattcagactggtgatgctcccattgtctccgaaacctgtgaggtttatgtttgggggagcaatagcagccatcagttggtagaaggtacacaggagaaaatactgcaacccaaactggctcctagtttctctgatgcacagaccattgaagctggacagtactgcacttttgtcatttctacggatggctcagttagagcttgcgggaaaggcagctatgggagactgggccttggagactccaataatcagtcaactttaaaaaagttaacattcgagcctcacagatccattaaaaaggtttcatcttctaaaggatctgatggtcacactttagcctttacgacagaaggagaagtcttcagttggggagatggtgattatgggaaactggggcatggaaatagttcaacacagaaatatcccaagcttattcagggacctctacaaggaaaggtagttgtttgtgtgtcagctggatacagacatagtgctgctgtcacagaggatggggaattatacacatggggtgaaggagactttggaagattaggtcatggtgacagcaatagtcgtaacattccaacattagtaaaagacatcagcaatgtaggagaggtttcttgtggcagttcacatactattgctctgtctaaagatgggagaactgtatggtcttttggaggaggagacaatggtaaacttggtcatggtgataccaacagagtgtataaacctaaagttattgaagctttacaaggaatgttcattcgcaaagtttgtgctgggagccagtcttcacttgctttgacatcaacagggcaggtctatgcttggggctgtggagcttgtctaggttgtggttcttcagaagctactgctttgagacccaagcttattgaagaactggctgccacaagaatagttgatgtttctattggagacagtcattgtttggctctttctcatgataatgaagtttatgcctggggcaataactcaatggggcaatgtggtcagggaaattccacaggtcctattactaaaccaaagaaagtgagtggcttagatggcatagctattcagcagatttcggctggaacatcacatagtctggcatggactgctcttcctagggacagacaagttgttgcatggcaccgaccttattgtgtagatcttgaagagagtaccttctcacacctgcgttcttttcttgagagatactgtgataaaataaacagtgagattcccccactccctttcccttcatcaagagaacaccacagttttctcaagctgtgcctgaagctactttcaaatcaccttgctcttgcacttgcgggaggggtagctaccagcattctcgggaggcaggcaggtccacttcgaaatttgctcttcagactgatggactcaactgtcccagatgaaatccaagaggtggtaattgaaactttatcagtgggagcaaccatgctgttacctccattacgagaacggatggaattacttcattctcttttacctcaaggacctgatagatgggaaagcttatctaaaggacagagaatgcaactggatatcatcctgacaagtttgcaagatcatacccacgtagcctccctacttggctatagttcaccctctgatgctgctgacctatcttctgtgtgtactggctacggaaatctgtcagatcaaccttacggcactcagagctgccatccagatacccacctggctgaaattttgatgaagaccctcttaagaaatttaggattttatacagatcaagcatttggagagctagaaaagaatagtgataaatttctacttggaacatcatcatcagaaaacagtcagcctgctcatcttcatgaactgctatgttcactacagaaacagctgctggcattttgccatatcaataacattagtgagaactcaagcagtgtggcattgcttcataaacatcttcagcttttgttgcctcatgccacagatatttattcacgttctgcaaatttgctcaaagaaagtccttggaatggcagtgttggagaaaaattaagagatgtgatatacgtctcagctgctggcagtatgctctgccagattgttaactccctgctgttactccctgtgtcagtggctcggcctttattgagttacctcctcgacttgttgccacctcttgattgccttaatagactcctgccagctgctgatcttttagaagaccaggagttacagtggcctcttcatggagggccagaactaattgatcctgctggtctgccattacctcagccagctcagtcctgggtatggcttgtggatctagaaagaacaattgctctccttattgggcggtgtcttggtggcatgcttcagggctcccctgtgtctccagaggaacaggacactgcatattggatgaaaacgccactgttcagtgacggtgtagaaatggacactcctcaattggataaatgtatgagttgcctgttagaagtagcactttctggaaatgaagaacagaagccttttgattataaattgcggcctgaaattgctgtctatgtagacttggcattgggttgttctaaagagcctgcccgaagcctttggatcagcatgcaggactatgctgttagtaaagattgggacagtgcaactttaagtaatgagtcactcttggacactgtgtctagatttgttcttgcagctcttctgaaacacacaaatttacttagtcaagcatgtggagaaagccgatatcaacctggtaaacacttatcagaagtgtaccgttgtgtatacaaagttcgaagtcgtttacttgcttgcaagaaccttgaacttattcaaacaaggtcatcatcacgggacagatgggtaaagtttgaaatcaattaatttctatgtttttctgcaagctgtgagagctagctctaaattggtttatgtgagaaaaaaatgtgccttggttattgcatatgttcaatacatgttgagtagttcttttcctagcagaaaaaaa

SEQ ID NO: 60551 - DNA, 3711 bp, Homo sapiens
gcagcaaaaataaaggacgcgaccgaattccgcctctgcggagccgggctcgggtcgccggagccgcgccccaccccgccagctccagagccacgtaaatggggtttcaccgtgttagccaggatggtctcaatctcctgacctcgtgatccgcccacctcggcctcccaaagtactgggattacaggactaatggctgaaggataaatcaacatggcaactatgattccaccagtgaagctgaaatggcttgaacacttgaacagctcctggattacagaggacagtgaatctattgctacaagagagggagttgctgttctgtattctaaactggttagcaataaggaagtagtacctttgccccaacaagttttatgcctcaaaggaccacagttgccagactttgaacgtgagtctctttcaagtgatgagcaggaccactatttggatgcccttcttagcagccagctagcattggcaaagatggtatgttcagattccccatttgccggggcacttagaaaacgactgcttgtactccagcgtgtcttttatgcactttctaataaataccatgacaaaggcaaggtgaagcagcagcagcattctccggagagcagttctggttcagcagatgtccattctgttagtgaacgcccccggtcaagcactgatgcacttatagaaatgggtgttcgaactggtctaagtttattatttgcgcttctaagacaaagttggatgatgcctgtgtcaggacctggtctcagtctttgcaacgatgtcattcatactgcaattgaagttgtgagctctttgccaccattatcattagcaaatgaaagcaagattcctcctatgggcttggactgcttatcgcaagtaacaacatttcttaaaggagtcactattcctaattctggggcagacactttaggtcgtagattagcttctgagttgctgcttggtttggcagctcaacgaggctcattgcgatatcttcttgaatggatagaaatggctttgggggcttcggcagttgtacacaccatggagaaaggcaaactactctcaagccaggaaggaatgatcagctttgactgctttatgaccatattaatgcagatgaggcgttctttgggttcatctgctgatcggagtcagtggagagaaccaaccagaacatcggatggcttgtgctccctttacgaggcagcattatgtctctttgaagaggtttgcagaatggcttctgattattcgagaacatgtgctagcccagatagcattcagactggtgatgctcccattgtctccgaaacctgtgaggtttatgtttgggggagcaatagcagccatcagttggtagaaggtacacaggagaaaatactgcaacccaaactggctcctagtttctctgatgcacagaccattgaagctggacagtactgcacttttgtcatttctacggatggctcagttagagcttgcgggaaaggcagctatgggagactgggccttggagactccaataatcagtcaactttaaaaaagttaacattcgagcctcacagatccattaaaaaggtttcatcttctaaaggatctgatggtcacactttagcctttacgacagaaggagaagtcttcagttggggagatggtgattatgggaaactggggcatggaaatagttcaacacagaaatatcccaagcttattcagggacctctacaaggaaaggtagttgtttgtgtgtcagctggatacagacatagtgctgctgtcacagaggatggggaattatacacatggggtgaaggagactttggaagattaggtcatggtgacagcaatagtcgtaacattccaacattagtaaaagacatcagcaatgtaggagaggtttcttgtggcagttcacatactattgctctgtctaaagatgggagaactgtatggtcttttggaggaggagacaatggtaaacttggtcatggtgataccaacagagtgtataaacctaaagttattgaagctttacaaggaatgttcattcgcaaagtttgtgctgggagccagtcttcacttgctttgacatcaacagggcaggtctatgcttggggctgtggagcttgtctaggttgtggttcttcagaagctactgctttgagacccaagcttattgaagaactggctgccacaagaatagttgatgtttctattggagacagtcattgtttggctctttctcatgataatgaagtttatgcctggggcaataactcaatggggcaatgtggtcagggaaattccacaggtcctattactaaaccaaagaaagtgagtggcttagatggcatagctattcagcagatttcggctggaacatcacatagtctggcatggactgctcttcctagggacagacaagttgttgcatggcaccgaccttattgtgtagatcttgaagagagtaccttctcacacctgcgttcttttcttgagagatactgtgataaaataaacagtgagattcccccactccctttcccttcatcaagagaacaccacagttttctcaagctgtgcctgaagctactttcaaatcaccttgctcttgcacttgcgggaggggtagctaccagcattctcgggaggcaggcaggtccacttcgaaatttgctcttcagactgatggactcaactgtcccagatgaaatccaagaggtggtaattgaaactttatcagtgggagcaaccatgctgttacctccattacgagaacggatggaattacttcattctcttttacctcaaggacctgatagatgggaaagcttatctaaaggacagagaatgcaactggatatcatcctgacaagtttgcaagatcatacccacgtagcctccctacttggctatagttcaccctctgatgctgctgacctatcttctgtgtgtactggctacggaaatctgtcagatcaaccttacggcactcagagctgccatccagatacccacctggctgaaattttgatgaagaccctcttaagaaatttaggattttatacagatcaagcatttggagagctagaaaagaatagtgataaatttctacttggaacatcatcatcagaaaacagtcagcctgctcatcttcatgaactgctatgttcactacagaaacagctgctggcattttgccatatcaataacattagtgagaactcaagcagtgtggcattgcttcataaacatcttcagcttttgttgcctcatgccacagatatttattcacgttctgcaaatttgctcaaagaaagtccttggaatggcagtgttggagaaaaattaagaggtgagtttggtatttcatttcaaatttaatcagtcattaagaagtaagaacacttggctttccaaagtcttaagagagccagaagcctctggaataggaatggtcttgaatttccttctattgaagattcctttagtcttggtttgggggtagtgttagcagtgattggtcttagaaagagtctacttggcatgacagaggcctaatttaaaggcactggatgatataaactcaaaaatattaattttaaatggcagaaagtgagattttttaatctgctctttttttttttttttaaaacggatttgcactctagcctgggcaacaagagtgaaaatccgtct

SEQ ID NO: 60552 - DNA, 629 bp, Homo sapiens
ggttctgatgggcactctatggccctaactgaaagtggtgaggtctttagctggggagatggtgactatggtaaacttggccatgggaacagcgacaggcagcggcggcccaggcagatcgaggccttacaaggagaagaagtggtgcaggtcaggcaggaaatggataagtttgcctttcattgtaaatatactagttgttgaataggtttcttaaaattaggtaacagaaaatatagtaaaaatatattacacagtaattataagagatccattggttttggatgttcagattcattcttgagcttgtcagaagtttgaataggctttggtgttagtattggtcttgttagtattggttagaatggtctttttcgtgagccagctggttggcccagactagggtgctgcacgcccttggaaggaatattgtgtggtttaacttctgccacacagttcttaatacacagataaaaggaaaactttgcttttaacctatcatttatgttacaaaagctaagttaacatgcattttctggaaaatagtgttctaaaatcatattgtaagattgtatagcaccttatagtttacaaacaatttccccatttattatctcatttagtctagg

SEQ ID NO: 60553 - DNA, 231 bp, Homo sapiens
actacggaaatataccaaatccgtaatccagccagggaataaataccttgacctcatttcttccaaacctctgatcttatgtaggtactgtgcattggcaggacccaagaaggtagagggcaagagagtttactgatgcagttcattcaggctagcactcagggacacagaacatggagaccaatggagagtagttctaacagggcagacagaaaatatgtagcacaaatt

SEQ ID NO: 60554 - DNA, 419 bp, Homo sapiens
cagctccccaccataccatctctcctcttaggccagcttcccaatgggtgtctgcaggcattccactcactcctatatcctctgtttcaaagaccttctcctttcctctcttccaatcttacacatccacaaagccccaacataataaaaatgataggtatctcctgttaaatacttgactggtttcagatctgtctaatgaaacgggttctatcattattctccctttacagatgaggaaactgaggtgcaaagcagttaagcaactggtccaagatctagaccaggtactcaaccaccccactccacatgcaactgtccccaacccatgcgattcatcctttccctgaaggcttgtgtggtgctgccttttaaattcataacataatgacttcattgttatgaaattcttttctgtg

SEQ ID NO: 60555 - DNA, 227 bp, Homo sapiens
ggtaaaaataagtaaatggtggtcttaaactgtatttatggcattatttctcactattcctttacagatcccctatatataggtaaaactcattagtccttattttctatttccttttatcctccctttaaagtcattgtctttacctggaacactaactctccaatctacctatcaaattctactcaaaatcttcaatgtctacatcagatgtcatgtaacctatt

SEQ ID NO: 60556 - DNA, 1023 bp, Homo sapiens
ggccagaatgttccttgctgcagatgcattggccccatctgcaggtcctctttgacacctaccttactctctccctccactcacactctgagaactgtgctcaggggcagcgctacaacttccacattggtctttacagggcttgagtgattatttcaagaacagaacgctgtgtggaaacctttaccatatttcgttgtatctaagacacattttttttttttgaaatttaacatctctaaggttgggttatgtttcttcatcattgtcaggttggagcttaatcagcagcacttttttttaatgtcacacacagtaatggtgatgcatctcacaattgagatcatcttagacatgatggaatatggaatcgtgtgcctgttacaagccaggctcttggtctgggttctagagacggtggaaaccaagacagcaccatcctctagtggtgttcacatcccaccacagtggagtcaggactttgaagtcctccattggatcttctcggaagatgagggaaatgagagagtgtggagagagattttgtaagtccggtctggaagtggtcattgttcagaatccagccacgtgggtacatggaactgtaaggctatttcaacatgggaaactgaaatcgggcatatccctgcggaagaagctgtcccttagcgaagaataaaactgtggactgacccccacccatttgcgaagaaagtactgggtcttcagctttcattgttcagccggtggtctttgtggacaacaccaggggcccctcctgctgaagactgtctggacttcctgattttcactcctgtataaaccccctcccccattactacctttgtctccttggggaaaaaaaatgtttttcacttaagcaaaataataactacccagtatttgtttctggagtgaaattgtaaacttcattgtacattcttcctggctttgatgcttatcgtgaagagttcagtgaaaataaattgtttttatgaaagcaagaaaccatttgataaacac

SEQ ID NO: 60557 - DNA, 442 bp, Homo sapiens
aatcccaggccagagatcttggatgcaggctatttcaacatgggaaactgaaatcgggcatatccctgcggaagaagctgtcccttagcgaagaataaaactgtggactgacccccacccatttgcgaagaaagtactgggtcttcagctttcattgttcagccggtggtctttgtggacaacaccaggggcccctcctgctgaagactgtctggacttcctgattttcactcctgtataaaccccctcccccattactacctttgtctccttggggaaaaaaaatgtttttcacttaagcaaaataataactacccagtatttgtttctggagtgaaattgtaaacttcattgtacattcttcctggctttgatgcttatcgtgaagagttcagtgaaaataaattgtttttatgaaagcaagaaaccatttgataaacac

SEQ ID NO: 60558 - DNA, 481 bp, Homo sapiens
aaccagagttcgtaattctaatgacctctccagatttatggctgcagcattcccaagaaggggtagggaggggcatataatgagctaccctcaggggatcagaaagaaaagggaagctgtcccttagcgaagaataaaactgtggactgacccccacccatttgcgaagaaagtactgggtcttcagctttcattgttcagccggtggtctttgtggacaacaccaggggcccctcctgctgaagactgtctggacttcctgattttcactcctgtataaaccccctcccccattactacctttgtctccttggggaaaaaaaatgtttttcacttaagcaaaataataactacccagtatttgtttctggagtgaaattgtaaacttcattgtacattcttcctggctttgatgcttatcgtgaagagttcagtgaaaataaattgtttttatgaaagcaagaaaccatttgataaacac

SEQ ID NO: 60559 - DNA, 443 bp, Homo sapiens
gatgagcaggtgagaccaggtaattaccgaagaaagagagtgatgtgttcattgaagtctactcatggaggaaagaagctgtcccttagcgaagaataaaactgtggactgacccccacccatttgcgaagaaagtactgggtcttcagctttcattgttcagccggtggtctttgtggacaacaccaggggcccctcctgctgaagactgtctggacttcctgattttcactcctgtataaaccccctcccccattactacctttgtctccttggggaaaaaaaatgtttttcacttaagcaaaataataactacccagtatttgtttctggagtgaaattgtaaacttcattgtacattcttcctggctttgatgcttatcgtgaagagttcagtgaaaataaattgtttttatgaaagcaagaaaccatttgataaacac

SEQ ID NO: 60560 - DNA, 676 bp, Homo sapiens
gacacactctcctgccttatggaagactttgcatcagcatgacgagaagtggtggctgatgactccaaggcaccctaggctgtgatcctggaactgaacatctgatgagtcaatacagggcacggagtaggactttgaagtcctccattggatcttctcggaagatgagggaaatgagagagtgtggagagagattttgtaagtccggtctggaagtggtcattgttcagaatccagccacgtgggtacatggaactgtaaggctatttcaacatgggaaactgaaatcgggcatatccctgcggaagaagctgtcccttagcgaagaataaaactgtggactgacccccacccatttgcgaagaaagtactgggtcttcagctttcattgttcagccggtggtctttgtggacaacaccaggggcccctcctgctgaagactgtctggacttcctgattttcactcctgtataaaccccctcccccattactacctttgtctccttggggaaaaaaaatgtttttcacttaagcaaaataataactacccagtatttgtttctggagtgaaattgtaaacttcattgtacattcttcctggctttgatgcttatcgtgaagagttcagtgaaaataaattgtttttatgaaagcaagaaaccatttgataaacac

SEQ ID NO: 60561 - DNA, 359 bp, Homo sapiens
agaatcaaacattggattccggaaatagcatgactatgaatggtgagaagttctaagttcacctgcctctctattcctcttacccatgaaactgatatgaactgttgataagctcatatcaatttcaagtaataaagctgaatacagcagtgggtcacagacaacatttccttcatctgcttgtgctggagaggctgtgtgtggggcaaaccaacagggagaggccagcctgcaggcatctgaagaagttgaaagtgtccacaagtacaagctcaagtttaacataggaattttttacaaacatacatgtctcctgttaaatgtgtgcaactatctgattaaaaccaaattgagcatta

SEQ ID NO: 60562 - DNA, 636 bp, Homo sapiens
atgacttgagctgagatgtgcagagggggttggagagacgggcgagacgacatcagggaaggccttgtttgtcaggttaaaatgtttcctctttatgtgataacagactccctcttttatctggcagctgctccctcaagaggaatacccattctttcttcctaggtcaagaaagagagtccaaggcatggtcaatcacaacactgtccctctagtcatgggccaagtgctgggcacacgtcaccagccaggctactcttagcctttcccataattttaataacctgagactgggagaaagaagcctcactctctcctggagtgatcaaactgtatgtaagtctagagttctctgtgagtacagtctcctctagcaagaaaggatgagaccaactcataataagaagccaaaatacatgtacatatgagtaagagagagagagagagctgacagcattgtttgggtgtctggatctagccattcctgtggtggctctgtctagtccttacttaaatgagttaatacatccccttttaactgaagctagtttgtgttgggtttctgtcccttaaagtcaagagtcctgagaaatacaatactggtcaaaaaaagtcttcatagaacaggtgaaccag

SEQ ID NO: 60563 - DNA, 354 bp, Homo sapiens
accataatggtacttacctcgttatacggttgttgtattaaatgagttctatgtagaacacagtgccagccccacaggaaatgttcattattctatcacgacaccttctcacctgcagaaacctagagcagggagggaggtaatctttatgtacattttctcttgctagatgcatttccatccagttaccacagcaatgggagagggctgcagtagtttgaaaacacttcgaaattggccgagcgcggtggctcacgcctgtaatcccagcactttgggaggccgaggcgggtggatcacgaggtcaggagagcgagaccatcctggctaacacggtgaaaccccgtctttact

SEQ ID NO: 60564 - DNA, 1607 bp, Homo sapiens
agctcggtacccgagtgttcttagtagagacggggttttccatggttggtcaggctgttcttggactaccgacctcatgtgatcggcccacctcagcctcccgagtatctgggatcaaggtgcatacccaccacacctggctaattttgtttattttttgtagagacagggtctcactatgttgcccaggttgatctcaaactcctgggctcaagcgatcctcccaccttagcctcccaaagtactgggattataggtgtgagccacagtgcctggcctaattattttcttgtgatcaaattcaggtttaatgtttttggttaagaatttcctacgtgaattcgtgtacttattttgtcatttagagttcataaatattagggtttattttctaaatagaatagtttaaactaaatataacttcaaaacgtctagtttgagtagctaccgttgtttggattgaaattttctgatactgaaaagaacaaaaagcctgcctttctgcccagaaccttttgcctcccccagtcagttcttggagcagcactagttaggggcccagagttcggccttctgtgtggtgattttacgctctgcctaaacaaggagcctacatcttttagctcctattccacccttctcacacgtttttgttgttgtttggttgtttttttttgagacagagtctcactctgttgcccaggctggagtgcagtggcacaatctcggctcattgcaacctccgcctcccgcgttcaagtgattctcttgcctcagcctcccaagtaactgatattacaggcgcccagccaccacaccccgctgatttttgtatttttagtagagacggggttttcccacgttggccgggctggtctcaaactcttgacctcaagtgaaccacccgcctgtgcctcccaaagtgctggaattaccagcgtgagccaccatgccgggctcacacgtttgagttgataccattgtgccattcctcttttggcctcttttttgtccatagaggcttcaagatagataggtaagagcccagtagtgttcataagaagccaatagagagcaggagccactttatcaggtggcaggtgtcctgggcctccctgctggctagtcccaagcggtggtgttgccaggatgtcttggaggtgataatgggacacacagaggcactgagtctccataggttaaaatgccaccaaaactggcctttgcctaatatccctcattgactatttagcatttaatttatttattttcctgacatttctgcaagctttgtatttatatttccactttatagatgaggaaatttgaggctcttagaggtaaaatgacttgcccaggtcacacaggaagtggcagagacaagctttttaaataagaaaaaattaataaaatataatatgagagtaacttaaaatattaataaaccacaattttaaattaattaaccgtgataaccaacattaataaaagttaagataccaaaacactggtgtctaattctttcaactaacaacttgaattattttccattttaaattaattaaccgtgataaccaacattaataaaagttaagataccaaaacac

SEQ ID NO: 60565 - DNA, 701 bp, Homo sapiens
aaaatttaaaccaaagttccagcatcattgattaagtaatttatcctttcccacagacctgttgtgctggctaggttcaccttttccccagtgatcttctacttgccctcacacatgttagaattctatactatatcagcctcttggcttccattggctgttcacacccactggtattttattatttatattgctttataataacctttgatatatagtaggacaagcctcaccattttactcttctccttcaaagtgtcttattcttagtctgcactttcacatgttccattcctctctaccctaaatgggattttgaatgaaagggtattgaaattattgattcgtaaatgattggcatctttatgtaactgggacgttctattcattaatacagcatatggatcaatttatttaggtgtttgatatcttccaacacagttttataaagtgctacatttagatgtaacacatctcttatagttccttatttttgttaatacttcaagtggtatctttttattacattttctatcaacagttactggtatataatgatacaattattaaatatatctgtattcattcgtttgctaaagtttctgttataatttgtttttacattattttggaattttccatatagaattgtatattatctttaaaaaataaaatagaattggcaaaactgaaaaaaaact

SEQ ID NO: 60566 - DNA, 685 bp, Homo sapiens
gtagagtattgtattcaaacaacctacataaaataacatttctcatcaccacacatacacacaatggcatcgtgcttctgtgtcctggctacatgtagcactctctgatttttcttaattcagttgagttttttttttttccaagtgttcatcttgatccactaaatttattgcatgacctatgaaatggatcataacccaaattctgaaacaaccatcctgagaaataagtggtggtggtggtaccctgcagccattttccataattggcaaggatgattcctccgatcagctcaaatatctgttgccaaactattgtttatatacatttgaaacatgtacatttagacaaatggcaagactaaggacaacagataggtgttttcacttggtaaatataactcaaattgtcttttcaaataaaaagatatattaaaaatcgttcagcttttaaagtagtaatcatattctttttatgtttatgtggttaaaagtgattccctatcattttgaggtcgaaagggttgcctgatagttggtgcaatgttttaaataaactgcttccatatattatctcatttgatcttcaaaatagtagacaaaagatgcacactcctactggtaacattaaaactcccactttctgacctctattttagtgatccacagtgttccaatgagaagc

SEQ ID NO: 60567 - DNA, 274 bp, Homo sapiens
agaggacaacttttctgatgaatcagaactggaagtgattaagggctcagtgcattaaaacaacgagcactcacgtccatttctccatttcataggaaaatcaaacattgtcttttaagtaagtggaggccgcttaaccaaactctttaagtgagccatagataagtgcattggcatggtttgaggaaatgcatagaggaaattaaaaatatttattttatcgaactaatagctgtccccgctggagattgaagtaattgagcccgtaactaca

SEQ ID NO: 60568 - DNA, 229 bp, Homo sapiens
ctctgggccaagcactaatgtgagtctccatcctcacacagtagccatggggttcttccacagctagtgctctccttgtggtccttctgtggctctctctcacctacaacacaagccagactctacataggctggcccccggccctgcctcatttacctctagtttcacctttgaaagggatgtcctgcctttaccgtgggtacttggagctccctctgcttggaatgc

SEQ ID NO: 60569 - DNA, 348 bp, Homo sapiens
cttacaaacaaggttcaagtcaggagaaaaaaattaattgaaagcaagaagacttttgttcaaaagatatattcaataattgatattgttaatgaagtaagtactttttaaggtatgaaagaactaaaaggtattccagactcagaaccttaaagttctaggcaagaataatttttaaactaaaggtaagtttataaattaacaaagtaaacaaaatttatgattttgttttttgtttgtaatttttgtttaattttaaaggtaagtttataaattaacaaacaaaatttataattttttgtttgtaatttttgtttataaacaaaataaattttttgtaacttgtta

SEQ ID NO: 60570 - DNA, 615 bp, Homo sapiens
ccgatcactcgcctctcgccggacgtgggcaacccgaatgcggtgggactgcatttctcctcatccttccattggctccccacggaccccccagaaactcctgacctctaccgtgcaattcacgggagctgcccgggcacggaaagcaaaatcagcttggagaaacacttctcaagcctgcaagacccggtggcacgttcattcttgcattgattggttcgtaccctgtgtactgagcgcttagccctgtactccggctccttttgaggccctgtacttaagctcaatagtaccaacaacagctgagagtttgcggtctagtggggaaggaaaatgcagaaccaaccaactaggtgtgatactatgtggttaagtgacatgcagaagacgtccccagaacagcataaaaggaacatttggttaggcctggggtcagcttcacagaggtaacaacggacggtgaacagctcaagcaaaggtccaacagcatgatccaagcctttgtcaatgttttgtaatctcgtttacttgcctgtaattcaagagggaaccatgtcttcttaaaccctgaagccacaattggcaggcctcaaggatatttgcagaatgatggtg

SEQ ID NO: 60571 - DNA, 799 bp, Homo sapiens
gcgggagcggagagcggacccagagagccctgagcagccccaccgccgccgccggcctagttaccatcacaccccgggaggagccgcagctgccgcagccggccccagtcaccatcaccgcaaccatgagcagcgaggccgagacccagcagccgcccgcgacccacccgcgccccgccctcagcgccgcacgacaccaagcccggcactacgggcagcggcgcagggagcggtggcccgggcggcctcacatcggcggcgcctgccggcgggcacaaaaaggtcatcgcaacgaaggttttgggaacggtaaaatggttcaatgtaaggaacggatatggtttcatccacaggaacgacaccaaggaagatgtatttgtacaccagggtgcggaggcagcaaatgttacaggtcctggtggtgttccagttcaaggcagtaaatatgcagcagaccgtaaccattatagacgctatccacgtcgtaggggtcctccacgcaattaccagcaaaattaccagaatagtgagagtggggaaaagaacgagggatcggagagtgctcccgaaggccaggcccaacaacgccggccctaccgcaggcgaaggttcccaccttactacatgcggagaccctatgggcgtcgaccacagtattccaaccctcctgtgcagggagaagtgatggagggtgctgacaaccagggtgcaggagatgagacccaaggtcagcagccacctcaacgtcggtaccgccgcaacttcaattaccgacgccgacgcccagaaaaccctaaac

SEQ ID NO: 60572 - DNA, 169 bp, Homo sapiens
gtcgaccacagtattccaaccctcctgtgcagggagaagtgatggagggtgctgacaaccagggtgcaggagaacaaggtagaccagtgaggcagaatatgtatcggggatatagaccacgattccgcagaggccctcctctccaaagacagcctagagaggacggcaa

SEQ ID NO: 60573 - DNA, 326 bp, Homo sapiens
gtttaaaaactgtccaaatgtcattttaatttatgaaggcacccagaataagttctaatctcatactgccccaatatatttactgaagccaattctctcttttattaatttttactgaaaatagcacttttttcctccccctgatagtactgggtaatgttagaatgtcctctaaaattctttggacctcatttacattctcaagagatttttttaaatttaccaataagatgtgctatttgaggaattagactttagttcagttgtacatggattatgtctgctcatatcattcatgtctgagtctttcattttattaatatgtg

SEQ ID NO: 60574 - DNA, 91 bp, Homo sapiens
  misc_feature (21)..(21): n is a, c, g, or t
cattgtccagatatgaaccanggtttggccttttcacccagagaaaaaggacaggctcatgggtacactgtgctgggatgacgggcacaaa

SEQ ID NO: 60575 - DNA, 407 bp, Homo sapiens
cgagcaaaacacagaggactgcacctctagtggctcgtaatgagaaagaagatggtctcaaacctgagaaagataatgtggagtggacctctgttgtctcagtattaacagtcccttctaggaagtaggtagcatttctgaaaatagagtgaagcaattgactgatggatttaatctttaaactgcttaggtaaccatcaatctgtaatgagcttaatactcttaactaggtgctatttttcatgtgtgctactttgccagtgataaaggattacgaaaaattctttaccagaggaaaaaaaaaattgaatgacctttcttggaaggtggtcccttgtttgtgatcaaactttgacaagaactggtaattaattcctctaagaaattaacgttctcatagtgtgttt

SEQ ID NO: 60576 - DNA, 1451 bp, Homo sapiens
gtccggggcgcagcggaaggctgcggcgcgccgctgaattaactgatgagagcgagttcttttcttctccgggaggggtggggagcgagggtcccggcgggcgaggcggaggagcccggggcaggatagcggtcccgggccgccgtggaaatttccaaggacttggtgcggcgcagagagcgcgtctcggggcggggtgggggggggggggttgcctggcggcgcagcagcgcgggaggcggcgaagggcgcaggagcatcgctcggaggggacaaggggacgccacgggccacatgtttaggagggagccgagccttctcccggaccctcgccgagggcgaccgtgatgctgcagaaccggcgggagcgactcgccgccgccgctctctgcgcactcggagaccccagcgcccgccttctgcaggggaagcgaccatggccatagatcgtgacttcacccccagccacttcccctagaaagaaatccttggaaaagttgcatttgaaaaaatccttgcgctgacctttggggccgacggggccgaagaagcgtgcgtgcgtttgcaagtaagagaaccaaaggtgtgtgtgcatggggggctggcggtgggggaccctccgctgccacttcgcctagctttgtgctgaggccccggcccccgcccctgggacgccggggctgcgatgagcccctgcgggcgggcccggcgacaaacgtccagaggggccatggctgtactggcgtggaagttcccgcggacccggctgcccatgggagccagtgccctctgtgtcgtggtcctctgttggctctacatcttccccgtctaccggctgcccaacgagaaagagatcgtgcagggggtgctgcaacagggcacggcgtggaggaggaaccagaccgcggccagagcgttcaggaaacaaatggaagactgctgcgaccctgcccatctctttgctatgactaaaatgaattcccctatggggaagagcatgtggtatgacggggagtttttatactcattcaccattgacaattcaacttactctctcttcccacaggcaaccccattccagctgccattgaagaaatgcgcggtggtgggaaatggtgggattctgaagaagagtggctgtggccgtcaaatagatgaagcaaattttgtcatgcgatgcaatctccctcctttgtcaagtgaatacactaaggatgttggatccaaaagtcagttagtgacagctaatcccagcataattcggcaaaggtaagagtttatgacttctgtttgtgacgaacgaagatgaagtcttctcaagtacttagcatttcaaaggcagtgagcataattcagtttgggaaatcaagaggaaaaccatctggacaggcaggaaggatgaagggaattgtaaataaagaaaacaggattatgggaatccaaacaatatt

SEQ ID NO: 60577 - DNA, 1314 bp, Homo sapiens
cacgtgagaaaggatgtgtttgcttccccttctgccgtgattgtttcctgaggcctcccccgccatgctgaactgcaaccccattccagctgccattgaagaaatgcgcggtggtgggaaatggtgggattctgaagaagagtggctgtggccgtcaaatagatgaagcaaattttgtcatgcgatgcaatctccctcctttgtcaagtgaatacactaaggatgttggatccaaaagtcagttagtgacagctaatcccagcataattcggcaaaggtttcagaaccttctgtggtccagaaagacatttgtggacaacatgaaaatctataaccacagttacatctacatgcctgccttttctatgaagacaggaacagagccatctttgagggtttattatacactgtcagatgttggtgccaatcaaacagtgctgtttgccaaccccaactttctgcgtagcattggaaagttctggaaaagtagaggaatccatgccaagcgcctgtccacaggactttttctggtgagcgcagctctgggtctctgtgaagaggtggccatctatggcttctggcccttctctgtgaatatgcatgagcagcccatcagccaccactactatgacaacgtcttacccttttctggcttccatgccatgcccgaggaatttctccaactctggtatcttcataaaatcggtgcactgagaatgcagctggacccatgtgaagatacctcactccagcccacttcctaggaacaatggaagaagaaaggactgaaccagggtatttttgttaggttttctatgtgactccaagagggaatggtcaagttgtttcatgagtttgcatgggcccttggaaaaacaggaaaggagcaatgaagatccaagcaaaactttactttcagcgttggcttggaggacaaataagaaatgaaacatcctatgaaatactttatagcacatggcagatttgcaactagtaaaatgctggtgaaatgctgttggtaaagcacatggttcaaatctagaagatgcagttcaaaaacaagacagactcgagttgttagggctgaggaaccaatcaaggtagaacaaagaaaatgttggggtaaaagtgttgctgattgtcaacacaaactggcttaataatattaataagaacctgtcttattaagactggctttagaaccgtaggtttttttaaaaaattattatttatttttgccctctttggggaagtgggtgggtagatttaaaaaatcccttcctgagtaataaagatacaaaatgttactgctga

SEQ ID NO: 60578 - DNA, 2155 bp, Homo sapiens
gtccggggcgcagcggaaggctgcggcgcgccgctgaattaactgatgagagcgagttcttttcttctccgggaggggtggggagcgagggtcccggcgggcgaggcggaggagcccggggcaggatagcggtcccgggccgccgtggaaatttccaaggacttggtgcggcgcagagagcgcgtctcggggcggggtgggggggggggggttgcctggcggcgcagcagcgcgggaggcggcgaagggcgcaggagcatcgctcggaggggacaaggggacgccacgggccacatgtttaggagggagccgagccttctcccggaccctcgccgagggcgaccgtgatgctgcagaaccggcgggagcgactcgccgccgccgctctctgcgcactcggagaccccagcgcccgccttctgcaggggaagcgaccatggccatagatcgtgacttcacccccagccacttcccctagaaagaaatccttggaaaagttgcatttgaaaaaatccttgcgctgacctttggggccgacggggccgaagaagcgtgcgtgcgtttgcaagtaagagaaccaaaggtgtgtgtgcatggggggctggcggtgggggaccctccgctgccacttcgcctagctttgtgctgaggccccggcccccgcccctgggacgccggggctgcgatgagcccctgcgggcgggcccggcgacaaacgtccagaggggccatggctgtactggcgtggaagttcccgcggacccggctgcccatgggagccagtgccctctgtgtcgtggtcctctgttggctctacatcttccccgtctaccggctgcccaacgagaaagagatcgtgcagggggtgctgcaacagggcacggcgtggaggaggaaccagaccgcggccagagcgttcaggaaacaaatggaagactgctgcgaccctgcccatctctttgctatgactaaaatgaattcccctatggggaagagcatgtggtatgacggggagtttttatactcattcaccattgacaattcaacttactctctcttcccacaggcaaccccattccagctgccattgaagaaatgcgcggtggtgggaaatggtgggattctgaagaagagtggctgtggccgtcaaatagatgaagcaaattttgtcatgcgatgcaatctccctcctttgtcaagtgaatacactaaggatgttggatccaaaagtcagttagtgacagctaatcccagcataattcggcaaaggagcggtggatgattggataaactacttcagagcagaagagtatttaatgaactattcacagagaagatgaaacacagtgaactgtgcctcttaatccattctgagtgtaataagaaattttacccatcctccttcaaacataaaggtgagacgggaaagtgggctggagttgagcagagttcagagttctcctagctaggggcatactctggagtacgcaaatccaacagtcctgacagaggaaagcagcttcctgtatagttgacctggaaggtcaacttcttgtcagagttttacatgaattatttttatggtggaaatagatgtaaatgttccaccaaaaatgatttttatcaggaactgtcacagccacctcaaccttcagcaaccaccactgttcaaggcaacatccttcagcagcagaaagattgactcgctgtaggctcagacatggggcctcactatgtttcacaggctggtctaaaactcctgagctccagggatctgcctgcctccgcttcccaaagtggtgggattgtaggcatgagccatcatgcctggcctgctgtgagttttaaataaaaatgtaaatgctcttctccattttcttacctctccttttaaagtgtgtgtgtgtgtgtgttttttttaatgtcatataagtaatacgtattcgtggtagaaatatttttttaaaaaatagaagcaaaaaagtcacaatcatcctaattatcactatttgtagataatcactacattttgacacatataattctagagttttacctatataaatgatacacttattactatctgtaggcactatgttaagcattttatattatctttgtttttctttctaatggctttataaaatttggtttg

SEQ ID NO: 60579 - DNA, 1577 bp, Homo sapiens
gtccggggcgcagcggaaggctgcggcgcgccgctgaattaactgatgagagcgagttcttttcttctccgggaggggtggggagcgagggtcccggcgggcgaggcggaggagcccggggcaggatagcggtcccgggccgccgtggaaatttccaaggacttggtgcggcgcagagagcgcgtctcggggcggggtgggggggggggggttgcctggcggcgcagcagcgcgggaggcggcgaagggcgcaggagcatcgctcggaggggacaaggggacgccacgggccacatgtttaggagggagccgagccttctcccggaccctcgccgagggcgaccgtgatgctgcagaaccggcgggagcgactcgccgccgccgctctctgcgcactcggagaccccagcgcccgccttctgcaggggaagcgaccatggccatagatcgtgacttcacccccagccacttcccctagaaagaaatccttggaaaagttgcatttgaaaaaatccttgcgctgacctttggggccgacggggccgaagaagcgtgcgtgcgtttgcaagtaagagaaccaaaggtgtgtgtgcatggggggctggcggtgggggaccctccgctgccacttcgcctagctttgtgctgaggccccggcccccgcccctgggacgccggggctgcgatgagcccctgcgggcgggcccggcgacaaacgtccagaggggccatggctgtactggcgtggaagttcccgcggacccggctgcccatgggagccagtgccctctgtgtcgtggtcctctgttggctctacatcttccccgtctaccggctgcccaacgagaaagagatcgtgcagggggtgctgcaacagggcacggcgtggaggaggaaccagaccgcggccagagcgttcaggaaacaaatggaagactgctgcgaccctgcccatctctttgctatgactaaaatgaattcccctatggggaagagcatgtggtatgacggggagtttttatactcattcaccattgacaattcaacttactctctcttcccacaggcaaccccattccagctgccattgaagaaatgcgcggtggtgggaaatggtgggattctgaagaagagtggctgtggccgtcaaatagatgaagcaaattttgtcatgcgatgcaatctccctcctttgtcaagtgaatacactaaggatgttggatccaaaagtcagttagtgacagctaatcccagcataattcggcaaaggttttggtatcaggatgatgctggcctcataaaatgagcagctggtgaccaggactgagaacttgtcccaggccacgagcctccccattgagaaggcaagcagactcacagttttttggcatctcagggatgctgcagcagtgacctagttctttcaaagggtctgtggattctcttgactttcctgatatgttcctgcagtagttctgggagccaaagttcacaatgtgagtctccacatgctgctctgtctgtctaagtggaagctacaaactagtcttgcttcctatctgccattttcactcaat

SEQ ID NO: 60580 - DNA, 1038 bp, Homo sapiens
tctaaatcaactgagacaagtttctgcctaggatgccttgatgtgttgatactcacaggatgcaatctccctcctttgtcaagtgaatacactaaggatgttggatccaaaagtcagttagtgacagctaatcccagcataattcggcaaaggagcggtggatgattggataaactacttcagagcagaagagtatttaatgaactattcacagagaagatgaaacacagtgaactgtgcctcttaatccattctgagtgtaataagaaattttacccatcctccttcaaacataaaggtgagacgggaaagtgggctggagttgagcagagttcagagttctcctagctaggggcatactctggagtacgcaaatccaacagtcctgacagaggaaagcagcttcctgtatagttgacctggaaggtcaacttcttgtcagagttttacatgaattatttttatggtggaaatagatgtaaatgttccaccaaaaatgatttttatcaggaactgtcacagccacctcaaccttcagcaaccaccactgttcaaggcaacatccttcagcagcagaaagattgactcgctgtaggctcagacatggggcctcactatgtttcacaggctggtctaaaactcctgagctccagggatctgcctgcctccgcttcccaaagtggtgggattgtaggcatgagccatcatgcctggcctgctgtgagttttaaataaaaatgtaaatgctcttctccattttcttacctctccttttaaagtgtgtgtgtgtgtgtgttttttttaatgtcatataagtaatacgtattcgtggtagaaatatttttttaaaaaatagaagcaaaaaagtcacaatcatcctaattatcactatttgtagataatcactacattttgacacatataattctagagttttacctatataaatgatacacttattactatctgtaggcactatgttaagcattttatattatctttgtttttctttctaatggctttataaaatttggtttg

SEQ ID NO: 60581 - DNA, 404 bp, Homo sapiens
ttccctagcaaacaccttctactatgtgcatggccaattggagaggaaaaaaataaatgttgttatatttaaatgcacttcagggaggctttttaaaaattttgctttttaaatttcaaggcaacagactagtttgttccttacaaacttcttggcatctttcttttcacatgctcttttttgctggactcagtcttcagtcaaattcctccaaagggtctgctgtaaacaatgattttgtgagcggttgtgtgttctttgcagtgaaaacccgccttgttttctgttgctagggcaaccccattccagctgccattgaagaaatgcgcggtggtgggaaatggtgggattctgaagaagagtggctgtggccgtcaaatagatgaagcaaattttgtcatgcg

SEQ ID NO: 60582 - DNA, 2306 bp, Homo sapiens
gtccggggcgcagcggaaggctgcggcgcgccgctgaattaactgatgagagcgagttcttttcttctccgggaggggtggggagcgagggtcccggcgggcgaggcggaggagcccggggcaggatagcggtcccgggccgccgtggaaatttccaaggacttggtgcggcgcagagagcgcgtctcggggcggggtgggggggggggggttgcctggcggcgcagcagcgcgggaggcggcgaagggcgcaggagcatcgctcggaggggacaaggggacgccacgggccacatgtttaggagggagccgagccttctcccggaccctcgccgagggcgaccgtgatgctgcagaaccggcgggagcgactcgccgccgccgctctctgcgcactcggagaccccagcgcccgccttctgcaggggaagcgaccatggccatagatcgtgacttcacccccagccacttcccctagaaagaaatccttggaaaagttgcatttgaaaaaatccttgcgctgacctttggggccgacggggccgaagaagcgtgcgtgcgtttgcaagtaagagaaccaaaggtgtgtgtgcatggggggctggcggtgggggaccctccgctgccacttcgcctagctttgtgctgaggccccggcccccgcccctgggacgccggggctgcgatgagcccctgcgggcgggcccggcgacaaacgtccagaggggccatggctgtactggcgtggaagttcccgcggacccggctgcccatgggagccagtgccctctgtgtcgtggtcctctgttggctctacatcttccccgtctaccggctgcccaacgagaaagagatcgtgcagggggtgctgcaacagggcacggcgtggaggaggaaccagaccgcggccagagcgttcaggaaacaaatggaagactgctgcgaccctgcccatctctttgctatgactaaaatgaattcccctatggggaagagcatgtggtatgacggggagtttttatactcattcaccattgacaattcaacttactctctcttcccacaggcaaccccattccagctgccattgaagaaatgcgcggtggtgggaaatggtgggattctgaagaagagtggctgtggccgtcaaatagatgaagcaaattttgtcatgcgatgcaatctccctcctttgtcaagtgaatacactaaggatgttggatccaaaagtcagttagtgacagctaatcccagcataattcggcaaaggtttcagaaccttctgtggtccagaaagacatttgtggacaacatgaaaatctataaccacagttacatctacatgcctgccttttctatgaagacaggaacagagccatctttgagggtttattatacactgtcagatgttggtgccaatcaaacagtgctgtttgccaaccccaactttctgcgtagcattggaaagttctggaaaagtagaggaatccatgccaagcgcctgtccacaggactttttctggtgagcgcagctctgggtctctgtgaagaggtggccatctatggcttctggcccttctctgtgaatatgcatgagcagcccatcagccaccactactatgacaacgtcttacccttttctggcttccatgccatgcccgaggaatttctccaactctggtatcttcataaaatcggtgcactgagaatgcagctggacccatgtgaagatacctcactccagcccacttcctaggaacaatggaagaagaaaggactgaaccagggtatttttgttaggttttctatgtgactccaagagggaatggtcaagttgtttcatgagtttgcatgggcccttggaaaaacaggaaaggagcaatgaagatccaagcaaaactttactttcagcgttggcttggaggacaaataagaaatgaaacatcctatgaaatactttatagcacatggcagatttgcaactagtaaaatgctggtgaaatgctgttggtaaagcacatggttcaaatctagaagatgcagttcaaaaacaagacagactcgagttgttagggctgaggaaccaatcaaggtagaacaaagaaaatgttggggtaaaagtgttgctgattgtcaacacaaactggcttaataatattaataagaacctgtcttattaagactggctttagaaccgtaggtttttttaaaaaattattatttatttttgccctctttggggaagtgggtgggtagatttaaaaaatcccttcctgagtaataaagatacaaaatgttactgctga

SEQ ID NO: 60583 - DNA, 2660 bp, Homo sapiens
  misc_feature (2655)..(2658): n is a, c, g, or t
  misc_feature (2660)..(2660): n is a, c, g, or t
gtccggggcgcagcggaaggctgcggcgcgccgctgaattaactgatgagagcgagttcttttcttctccgggaggggtggggagcgagggtcccggcgggcgaggcggaggagcccggggcaggatagcggtcccgggccgccgtggaaatttccaaggacttggtgcggcgcagagagcgcgtctcggggcggggtgggggggggggggttgcctggcggcgcagcagcgcgggaggcggcgaagggcgcaggagcatcgctcggaggggacaaggggacgccacgggccacatgtttaggagggagccgagccttctcccggaccctcgccgagggcgaccgtgatgctgcagaaccggcgggagcgactcgccgccgccgctctctgcgcactcggagaccccagcgcccgccttctgcaggggaagcgaccatggccatagatcgtgacttcacccccagccacttcccctagaaagaaatccttggaaaagttgcatttgaaaaaatccttgcgctgacctttggggccgacggggccgaagaagcgtgcgtgcgtttgcaagtaagagaaccaaaggtgtgtgtgcatggggggctggcggtgggggaccctccgctgccacttcgcctagctttgtgctgaggccccggcccccgcccctgggacgccggggctgcgatgagcccctgcgggcgggcccggcgacaaacgtccagaggggccatggctgtactggcgtggaagttcccgcggacccggctgcccatgggagccagtgccctctgtgtcgtggtcctctgttggctctacatcttccccgtctaccggctgcccaacgagaaagagatcgtgcagggggtgctgcaacagggcacggcgtggaggaggaaccagaccgcggccagagcgttcaggaaacaaatggaagactgctgcgaccctgcccatctctttgctatgactaaaatgaattcccctatggggaagagcatgtggtatgacggggagtttttatactcattcaccattgacaattcaacttactctctcttcccacaggcaaccccattccagctgccattgaagaaatgcgcggtggtgggaaatggtgggattctgaagaagagtggctgtggccgtcaaatagatgaagcaaattttgtcatgcgatgcaatctccctcctttgtcaagtgaatacactaaggatgttggatccaaaagtcagttagtgacagctaatcccagcataattcggcaaaggtttcagaaccttctgtggtccagaaagacatttgtggacaacatgaaaatctataaccacagttacatctacatgcctgccttttctatgaagacaggaacagagccatctttgagggtttattatacactgtcagatgttggtgccaatcaaacagtgctgtttgccaaccccaactttctgcgtagcattggaaagttctggaaaagtagaggaatccatgccaagcgcctgtccacaggactttttctggtgagcgcagctctgggtctctgtgaagaggtggccatctatggcttctggcccttctctgtgaatatgcatgagcagcccatcagccaccactactatgacaacgtcttacccttttctggcttccatgccatgcccgaggaatttctccaactctggtatcttcataaaatcggtgcactgagaatgcagctggacccatgtgaagatacctcactccagcccacttcctaggaacaatggaagaagaaaggactgaaccagggtatttttgttaggttttctatgtgactccaagagggaatggtcaagttgtttcatgagtttgcatgggcccttggaaaaacaggaaaggagcaatgaagatccaagcaaaactttactttcagcgttggcttggaggacaaataagaaatgaaacatcctatgaaatactttatagcacatggcagatttgcaactagtaaaatgctggtgaaatgctgttggtaaagcacatggttcaaatctagaagatgcagttcaaaaacaagacagactcgagttgttagggctgaggaaccaatcaaggtagaacaaagaaaatgttggggtaaaagtgttgctgattgtcaacacaaactggcttaataatattaataagaacctgtcttattaagactggctttagaaccgtaggtttttttaaaaaattattatttatttttgccctctttggggaagtgggtgggtagatttaaaaaatcccttcctgagtaataaagatacaaaatgttactgctgataattgtgatttgttgagccacgtctatattaactatagctcccctctatttttaaaattttacataaaattgcttcttcctcttttgtcaagtccacagagacaatgtgaagcattattgaatttagactgtgttgcttcatagtctggataacaggagccactttccttcctcagaatttaggacataaacccaattttaggtctgcattatgtaagcctgtttgcattgtcatttttattttagtgcaaaagactaccaatatgagtgaattatttgtttgtaaattggcataattgtcttcataatttaatgttcagaaatgcagtaaagcacgttgatgaaaannnnan

SEQ ID NO: 60584 - DNA, 1294 bp, Homo sapiens
gagagagtaagttgaattgtcaatggtgaatgagtataaaaactccccgtcatagcaaccccattccagctgccattgaagaaatgcgcggtggtgggaaatggtgggattctgaagaagagtggctgtggccgtcaaatagatgaagcaaattttgtcatgcgatgcaatctccctcctttgtcaagtgaatacactaaggatgttggatccaaaagtcagttagtgacagctaatcccagcataattcggcaaaggtttcagaaccttctgtggtccagaaagacatttgtggacaacatgaaaatctataaccacagttacatctacatgcctgccttttctatgaagacaggaacagagccatctttgagggtttattatacactgtcagatgttggtgccaatcaaacagtgctgtttgccaaccccaactttctgcgtagcattggaaagttctggaaaagtagaggaatccatgccaagcgcctgtccacaggactttttctggtgagcgcagctctgggtctctgtgaagaggtggccatctatggcttctggcccttctctgtgaatatgcatgagcagcccatcagccaccactactatgacaacgtcttacccttttctggcttccatgccatgcccgaggaatttctccaactctggtatcttcataaaatcggtgcactgagaatgcagctggacccatgtgaagatacctcactccagcccacttcctaggaacaatggaagaagaaaggactgaaccagggtatttttgttaggttttctatgtgactccaagagggaatggtcaagttgtttcatgagtttgcatgggcccttggaaaaacaggaaaggagcaatgaagatccaagcaaaactttactttcagcgttggcttggaggacaaataagaaatgaaacatcctatgaaatactttatagcacatggcagatttgcaactagtaaaatgctggtgaaatgctgttggtaaagcacatggttcaaatctagaagatgcagttcaaaaacaagacagactcgagttgttagggctgaggaaccaatcaaggtagaacaaagaaaatgttggggtaaaagtgttgctgattgtcaacacaaactggcttaataatattaataagaacctgtcttattaagactggctttagaaccgtaggtttttttaaaaaattattatttatttttgccctctttggggaagtgggtgggtagatttaaaaaatcccttcctgagtaataaagatacaaaatgttactgctga

SEQ ID NO: 60585 - DNA, 1140 bp, Homo sapiens
  misc_feature (1110)..(1110): n is a, c, g, or t
gtccggggcgcagcggaaggctgcggcgcgccgctgaattaactgatgagagcgagttcttttcttctccgggaggggtggggagcgagggtcccggcgggcgaggcggaggagcccggggcaggatagcggtcccgggccgccgtggaaatttccaaggacttggtgcggcgcagagagcgcgtctcggggcggggtgggggggggggggttgcctggcggcgcagcagcgcgggaggcggcgaagggcgcaggagcatcgctcggaggggacaaggggacgccacgggccacatgtttaggagggagccgagccttctcccggaccctcgccgagggcgaccgtgatgctgcagaaccggcgggagcgactcgccgccgccgctctctgcgcactcggagaccccagcgcccgccttctgcaggggaagcgaccatggccatagatcgtgacttcacccccagccacttcccctagaaagaaatccttggaaaagttgcatttgaaaaaatccttgcgctgacctttggggccgacggggccgaagaagcgtgcgtgcgtttgcaagtaagagaaccaaaggtgtgtgtgcatggggggctggcggtgggggaccctccgctgccacttcgcctagctttgtgctgaggccccggcccccgcccctgggacgccggggctgcgatgagcccctgcgggcgggcccggcgacaaacgtccagaggggccatggctgtactggcgtggaagttcccgcggacccggctgcccatgggagccagtgccctctgtgtcgtggtcctctgttggctctacatcttccccgtctaccggctgcccaacgagaaagagatcgtgcagggggtgctgcaacagggcacggcgtggaggaggaaccagaccgcggccagagcgttcaggaaacaaatggaagactgctgcgaccctgcccatctctttgctatgactaaaatgaattcccctatggggaagagcatgtggtatgacggggagtttttatactcattcaccattgacaattcaacttactctctcttcccacagcaaccccattccagctgccattgaagagacacacataaaccaangaatttggaaaggctaaaaataaaggggat

SEQ ID NO: 60586 - DNA, 378 bp, Homo sapiens
gaaggttttttcctatcagggattggattgattcaggcacaaagataatttgggcaccactggagttgggcataggcagttctgtgcaggatgcttcacaatagtatttcaacagatatagtgatctcggcttctgattttgttacataaaaacacattgattcagaaaaggacaaaagcaatgtaggtccacaaagattaaaacatcactaggccgggtgcagtggctcacgcccggtgagcacatcatgcccggtgagcacatcatgcccggtgatgtaatcccagcactttgggaggccaaggcagtcagatcatgaggtcaggagatcgagagcatcctggccaacatggtgaaaccctgtctctaccaaaata

SEQ ID NO: 60587 - DNA, 580 bp, Homo sapiens
gatctttagaaactggcagaaaaaataggggctgcatccaagaccactcacggcacgtccattcttccagcagctcccaactgctattttatgaaaagtccaaatttcccaccccaaggtcctagagtacagccagctccctaccatcaaaaacaatagctaccaaaactcagtaaaattaggcttgttatgaagagaagattgaagaaataaaggtatttatttcatcttggtatttgaatgtggaaactcccagtagcgtaagaaaaaagaattctgccagagaaatgatgaagtgaaacctcaaacaatttgggcttttgagtgcctactgtcatccagccacgaaatgaagcattttacataagtaatttaagcccagtgatgcaggcagtaagtattatctccattttaagatgaggaaattgagacagacgagattacctaactctctcaaggtttcaccacagagctgtggttcaaacccatgtgttctagttttattacagttaagaaactgcaagagtttgccaatttgtcaagtgccagtccaagataaatggacactctgagtatcaaa

SEQ ID NO: 60588 - DNA, 666 bp, Homo sapiens
tagccaggcatggtggcatgcacctatggtcttagcgacttgggaggctgaggtgggaggatcgcttgagcccggaaggcggtaactcaatcccagcagaatcccagggagcgaaggtggctcatcccaaaagaaaaacaagaaggaaattctattaccagaagacaaagggatgaaatgagggatggagaatcaaagactgaagctactagggtttgtttttattaatatttaattttttcagaggcgagggtctcagtatgttgcccaggctggccttgaactcctggcctcaagcaatcctcctgcctgagccttccgagttgttgggattacagtgttgcacacctgtagtcccagttatgcaggaggctgaggtaggagaaccacttgagcccatgagttcgagaccagtctgagtaacatatagagacctcatctcacaaaaacatcactaccacaaaacaaaacaaaacaaattgttaagatgctaaattttaagttatgtgtattttaccacaataaaaaaaaatgaggccgggtgcagtggctcatgcctgtaatcccagcaccttgggaggccgaggcgggtggaccacaaggtcaggagttcgagactggcctggtcaatatggtgaaaccctgtctctactaaaaatacaaaaa

SEQ ID NO: 60589 - DNA, 371 bp, Homo sapiens
taagagtcaccatggaagttgcggggcatccagtggtttttctgaaaatccatgaaggaaaagaataaagcatttttccagcctttcttctacaaactatatttcagggaaaccaaatatttgatgagggaattctttgtttagaaggattttagctaataaatgcagaggaataacaagatttaggagggagaatcacttgaacccaggaggctggggttgcagtgagccgagactgcaccactgcactccagcctggccaatagagggagactccgtctcaaaaaaaaaaaaaataggagtttgaggccatgttcacacatcactgcagtccagtctggtaaacaaagcaaccccctgagtctttaaca

SEQ ID NO: 60590 - DNA, 764 bp, Homo sapiens
ctcaaggtttcaccacagagctgtggttcaaacccatgtgttctagttttattacagttaagaaactgcaagagtttgccaatttgtcaagtgccagtccaagataaatggacactctgagtatcaaaaaaatacataatctgcagatcaaaacacgaagatacaaacatctaagagtcaccatggaagttgcggggcatccagtggtttttctgaaaatccatgaaggaaaagaataaagcatttttccagcctttcttctacaaactatatttcagggaaaccaaatatttgatgagggaattctttgtttagaaggattttagctaataaatgcagaggaataacaagatttaggaggggggagaaatcaccattttgtgacttctaataaaataatgggtctaggcaacagttttcaatggatgctaaaacgattaggtgaaaagttgatggagaattttaattcaggggaattaggctgataccatctgaaaccatttggcatcattaaaaatgtgacaacctggtggctgccagggaggaaggggagagggtgggggaagaacagaagttatagtttatgggcacaaagttttggttttacaagatgaaaatagttacagaaatgaatggtggtgatggttgcagaatattatgactgactatacacttaaaaatgtttaagatagagctgggtgcagtgttgcacacctgtagtcccagttatgcaggaggctgaggtaggagaaccacttgagccc

SEQ ID NO: 60591 - DNA, 467 bp, Homo sapiens
cagcatttaggactgttatgttctcttgaggagctgactgctcataatgaccccattatgaaatgaccctctttattgcaggtaatattttttgctctgaaatctactttatctgataatatctaactatcttttgattagtgttagcatagtaaatctttttccattattttacttttaacttatttctgagtttatatttcaagtatgtttctccaaggtaacatatagttgggtctttctttcttatccaatctgagaatctctgttttttaattgggatatttagattatttacatttaatgtgattattggtgtataagtttaagtctatcatcttgtgacttgctttctattcgtcccatctgttctttatttaccttttctctgtctcttgtattatttttaatgcttcaattttatctcctttgttagcctattaggaataactccttgtagtattttc

SEQ ID NO: 60592 - DNA, 336 bp, Homo sapiens
atagtggttattacattctttagcccagtagccattaaattccttgtgcccttaaaacctaaaagttcacagggagaagacctcttactgacttgtagaatctcaatactacttatcttgaaatttcagtaagtgttaggtaaaagagttcatttgggataatcacactatgatagtctttagcttttgaattggaatccaaattttagtttagaacagcaaagtttgcgcctaaagatttcatgaagtaaaaatactaattgtgattatatatctaaatatttgcacatctaaagttgtcttttacccgtaaccagaataaatgataccttttta

SEQ ID NO: 60593 - DNA, 129 bp, Homo sapiens
gacccagcagatgttagatgctgtcacttctgagcccccaacagcaaagagcgcacctgaagaagtatcaggacaagaacaagaggttttttcaaaatagtaaaattaaaattaatttagttgaagtga

SEQ ID NO: 60594 - DNA, 354 bp, Homo sapiens
tgagagggggtcttgctatattgcccaggctagtctcaaactcctgggctcaagtgatccacccaccatagcctctggagcagttgggactccaggtgtgcagccatgtcctgcccagtcattttctttctgtgagcaatccagggcacttagaggaagatattccaaatcatggtctttgtagaattcattcctgcaaaatgccaatggcagcagccacttgatcctgtggtcattaattactctcaagcacaggtaactagttatgcctaatcaggatgctcctatgggcctgggaggactagctcctcctcccagcagggaggtcagcaccatgcttgggccctagtcaca

SEQ ID NO: 60595 - DNA, 213 bp, Homo sapiens
tcaaaaactcaatataatatgtaaatcaggggtgtccaatcttttggcttccctaggccatactggtgttaggccacattcaaagctatcctaggccacatgtggctggtgggccatgggttggacaagcttgatgtaaataaaaccaccagtggaaagagtttgttgtgagttacattcaaatacaacagttagtaaaacatcagaatagta

SEQ ID NO: 60596 - DNA, 235 bp, Homo sapiens
caagcttacaagaaccagagttgtttttacttttttcttgacttttatctacacaaggtatctgaagactcaaagagtcgcaaagttttggctgtctcacttttggtgtagctttggaggaagagggtcgttcagtaactgctggagtacagaaagtcgtttgtagtcttggcctctctttttgaatagtcatatgttgtaatcgttctagttccagtaaacgagttatcaagtg

SEQ ID NO: 60597 - DNA, 841 bp, Homo sapiens
ttgctgcgtgaacccagatctcagactagtcatccagccccattatgtaggactcagacacccctgtccacatctaacctccagccctaacgccacattagaaatgggggtcttactgctgctgtcactcctagtcaccctgttaaattctataccggtttacccaagtcgcccagagactgggccccacttacataagctgaagagaccagctgctttaatagcctcattacctaggatataggatcactgtccaacctcactccacagtgggcaagtttttacttcagaataacttttgaaataaatttccccggaacagctcgcccctctcaacaggactctgaggctccactacgttgctgttattcctgacagagtgatgaaaggaaatttaaacaagtggcattttgtaaaaccaccccagcctgtgtgactttcaatgcctgtccgatttggctgggaaaatattttagatccccagggctacatactgttttttataccctcctctttgtgtcagtgatggaaaaggtgtcaatctgctctgaatctctctgaacacctcaggaaataggcttttggctcgcagagaggggatgagaaatagttttgaaccaccaagtctcttggagggtgtcagcagccccttgaagtaaaagtgtggctgcaaacccagctctctgcattagccaggtgaacctgagcatgctgcatacaccctcagtcttggtttcttaatatgtaaaatgggaatgaatatgcgcacctcgtggggtggttgtgattaaaggcattcattataaagagcttagtttcatacaaagtgaaaaaaaaaaaa

SEQ ID NO: 60598 - DNA, 727 bp, Homo sapiens
  misc_feature (457)..(457): n is a, c, g, or t
  misc_feature (604)..(604): n is a, c, g, or t
  misc_feature (642)..(642): n is a, c, g, or t
  misc_feature (668)..(669): n is a, c, g, or t
  misc_feature (707)..(707): n is a, c, g, or t
atatgagaagtttatcctcaagaagacagcagtgggtatttgcattaagaagtggcagtttttaggtggcccccgctggctaacttgctgtggagttttcaagggcatagaatcgtcctttacacaattaaaagaagatgctgtttaatctgaggatcctgttaaacaatgcagcttttagaaatggtcacaacttcatggttcgaaattttcggtgtggacaaccactacaaaataaagtgcagctgaagggccgtgaccttctcactctaaaaaactttaccggagaagaaattaaatatatgctatggctatcagcagatctgaaatttaggataaaacagaaaggagagtatttgcctttattgcaagggaagtccttaggcatgatttttgagaaaagaagtactcgaacaagattgtctacagaaacaggctttgcacttctgggaggacnatccttgtttcttaccacacaagatattcatttgggtgtgaatgaaagtctcacggacacggcccgtgtattgtctagcatggcagatgcagtattggctcgagtgtataaacaatcagatttggacaccctggctaaagaagcatncatccccaatatcaatgggctgtcagaattgtaccatnctatccagatcctggctgattacctnnacgctcaggaacactatagctctctgaaaggtcttacnctcagctggatcggggatgg

SEQ ID NO: 60599 - DNA, 673 bp, Homo sapiens
  misc_feature (403)..(403): n is a, c, g, or t
  misc_feature (550)..(550): n is a, c, g, or t
  misc_feature (588)..(588): n is a, c, g, or t
  misc_feature (614)..(615): n is a, c, g, or t
  misc_feature (653)..(653): n is a, c, g, or t
atatgagaagtttatcctcaagaagacagcagtgggtatttgcattaagaagtggcagtttttaggtggcccccgctggctaacttgctgtggagttttcaagggcatagaatcgtcctttacacaattaaaagaagatgctgtttaatctgaggatcctgttaaacaatgcagcttttagaaatggtcacaacttcatggttcgaaattttcggtgtggacaaccactacaaaataaagtgcagctgaagggccgtgaccttctcactctaaaaaactttaccggagaagaaattaaatatatgctatggctatcagcagatctgaaatttaggataaaacagaaaggagagtatttgcctttattgcaagggaagtccttaggcatgatttttgagggacnatccttgtttcttaccacacaagatattcatttgggtgtgaatgaaagtctcacggacacggcccgtgtattgtctagcatggcagatgcagtattggctcgagtgtataaacaatcagatttggacaccctggctaaagaagcatncatccccaatatcaatgggctgtcagaattgtaccatnctatccagatcctggctgattacctnnacgctcaggaacactatagctctctgaaaggtcttacnctcagctggatcggggatgg

SEQ ID NO: 60600 - DNA, 312 bp, Homo sapiens
ttggctagaagggaggctggagcctttcatggtggcttttgaatgccatggtgaatagtttgtgctttatttgttattgaatagcaatttgtacacttctgagctattagagtgaaatgattaagcctgtggtttaggaagaaagagcctattagggagataaatctttccctagttgtaggaagggttggaacagtatgatatggagagggtagtaatgaatgaaggaatggaaaacgagaataatttcaatgatactggaggtgcagtatacaagttggcagtagttttatgtctaggaagataagaagt

SEQ ID NO: 60601 - DNA, 493 bp, Homo sapiens
agttttaaaagctaatactactttaattgtactttttctcactcttctcttcctagcctctagttcctttttttccctgattatttacaacactgacttgctatgtgagctcagcaagtccctccttgcacaggatgaccccttccctaactcacaggggtagagagaggagcaatcgttatatggagctttaactctttggggaataagtgagactgatccagacaccacccctgaaggcctccatcaaacatggtaacagtccccacaggggtgagcatgctgaggccatcatgttaccacggggcagcagcatgtggaagatgtagtaaagacgtctctggagtgtctaccactgctatccgtcgcactcctctcctctgctccacttcgccttctaacactacccacaagctcagcgttccttcctctccctcctcagaataccctgggactgcctctcatttcaaatacaaatgctgcagcatgactc

SEQ ID NO: 60602 - DNA, 349 bp, Homo sapiens
aactatagaatgggtagtggtagaataaaatcatcaccttgaccttgtggccaattatagaaatgagggctatattacagctgcatatttttttatttgcctattatatgtacatattaatttgcatgttataaccattttgttcttcttcctcctacctattatccatttatatgcaagttcttggatgttaactttataatttagtctttaggtaacagaatattcagtggaactgtgactgaatttaaaaaataaataatatagccagcaaggatacaatgactgggactgcatatgtcctcattttggagaaagtgagaactttttcacttattcaaaggttagc

SEQ ID NO: 60603 - DNA, 401 bp, Homo sapiens
gagacggaggctcactctgtcacccaggctggagtgcaatggcatgatcttggctcactgcaaccccgcctcctgagttcaagtgattcttccacctcagcctcctgagtagctgggattacaggtacccgccatcatgcccggctaattttggtatttttgtggaaatggggtttcaccatgttggccaggctggtcttcaagtcctgacctcaggtgatcctcccacctcggcctcccaaagtgctgggattacaggcaggaggcacagtgcccggctggggatcctatttcttagttctcctaattccttaatatcattaaatattgccttgagttaatgtgtctttttttaaaattaaggttgtcaagtctacaatcagccacttaaatctcatttt

SEQ ID NO: 60604 - DNA, 513 bp, Homo sapiens
aatgtgaaaaaaattatattaaacctcaaatttgggggtttgatttggaagacattagcaagtaatttggaataagttcccatccccaactaacttggatcctgtagtccaagtaatagtcatggtctatcattcagttacttgtgctaggcactgtgttagatattaggtataaatattaacagaaggcagggagtgaagcccccaggcatagccagtcatgttgccctggaacacaaagaggtgtccaatctcctgcaggaagaggagctgctgccattctgggaacctcaagcttagttcagaggaaacatctatgaggagaagacccaaccaccttcaacttagaagaagcaaaagagttctgtggacccctctgtagagagggaggggcatgtgattcaagaggccacctggatatttcagttgaagtttatctttaaggctcgctgcttctctgctgtcatttataagttcattcaataaatactgagcactttctatgtatctgcc

SEQ ID NO: 60605 - DNA, 429 bp, Homo sapiens
ttctattttaagttcttgacaaacctccaaatggctttccacagtggctgaactaatttacattcccagcagcaatgtataagcattctcttttctcctcaaccttgtcagcaactattattttttgactttttaataatagccattctatctggtgtgagatggcatctacttgtggtttgaatttgcatttctctaatgagtagtgatgttgagcatttttcatgcgcttgttggctgtgttattatgtctttaaaaaagttcatttttgaaaaagtgaaatcccctctcactgccatcctcctgaagccctgctgccaagcatgatggagaagcagaaatgtttcctggttttcctggcaactttcccctggcaagcacacacacactctgtgaagcatgattctagaggaagataccttcctggt

SEQ ID NO: 60606 - DNA, 213 bp, Homo sapiens
ccaaatatagcatatagcacaaaattaaaaatacaaagaatatgaagcatagaggatagaatgaaaacatcccatgtattttacttgtagttgtagaaggaggagagagaaaattgaagtagagacaacagttgaagggttgatcactggaaaattttcagaacctgttgtaagacatcaaatcagaggttaaagtctaataacttccaaaag

SEQ ID NO: 60607 - DNA, 2487 bp, Homo sapiens
cctgccagcaacaagcaggagctgaaaaccagaagttgaggcgtgagtttggccactccgtagtgtgcacttggtgagggcagcagctcgccacagctgccagccatctgtccattcacccatctgtccatctggcagcccgctgttcagacctgtctgtctgtccgcccatctgtaagcccatctctgtcccattgtctatctgaccatctttctcttactgtcctctttgtctagctatctggcctatctgtcgatccatcttcgtgtctgtcttcagcccccacctgtttgtccatctgtccaattacctgtgactctgtgcatcttcttgtccattcatctgcccacccatccgtccctccgtctgcccaccagccgcccctctcctcctgggctgcagagccatggcccggggctacggggccacggtcagcctagtcctgctgggtctggggctggcgctggctgtcattgtgctggctgtggtcctctctcgacaccaggccccatgtggcccccaggcctttgcccacgctgctgttgccgccgactccaaggtctgctcggatattggacgagccatcctccagcagcagggctcacccgtggatgccaccatcgcggctctggtctgcaccagcgtcgtcaaccctcagagcatgggcctgggcggaggggtcatcttcaccatctacaatgtgacaacagggaaggtggaggtcatcaatgcccgggagacggtgccggccagccacgccccgagcctgctggaccagtgtgcacaggctctgccactgggcacaggggcccagtggatcggggtgcccggggagctccgtggctatgccgaggcccaccgccgccatggccgcctgccctgggcgcagctgttccagcccaccatcgcgctgctccgaggggggcatgtggtggcccctgtcctcagccgtttcctgcacaacagcatcctgcggccttccttgcaggcgtcaaccctgcgccagctcttcttcaacgggacagaacccctgaggcctcaggacccactcccatggcctgcactggccaccaccctggagaccgtggccacagagggcgtggaggtcttctacacggggaggctgggccagatgctggtggaggacattgccaaggaagggagccagctgacgctgcaggacctggccaagttccagcccgaggtggtggatgccctggaggtgcccctgggggactataccctgtactcaccaccgccgcctgcagggggtgccattctcagctttatcctcaacgtgctaagagggttcaacttctcaacagagtctatggccaggcctgaagggagggtgaacgtgtaccaccaccttgtagagacgctcaagtttgccaaggggcagaggtggaggctgggggaccctcgaagccacccgaagctccagaatgcctcccgggacctgctgggggagaccctggcccagctcatccgccaacagatcgatggccggggggaccaccagctcagccactacagcttggccgaggcctggggccacgggacaggcacgtcccatgtgtctgtgctgggggaggatggcagcgccgtggctgccaccagcaccatcaacacaccctttggagcgatggtgtattcaccacggacaggcatcatcctcaacaacgagctcctggacttatgcgagcgatgcccccggggttccggcaccaccccctcacctgtgagtggagacagggtgggtggagctcccggaaggtgctggcccccagttccaggcgagcgttccccatcctccatggtgccctccatcttgatcaacaaagcccaggggtcgaagctagtgattggcggggctggcggggagctcatcatctctgctgtggcccaggccatcatgagcaagctgtggcttggctttgacctgagagcggccattgcagcccccatcctgcatgtcaacagcaagggctgtgtggagtacgagcccaacttcagccaggaggtgcagaggggactccaagaccgtggccagaaccagacccagaggcccttcttcctgaacgtggtccaggctgtgtcccaggagggggcctgtgtgtacgccgtctcggacctgaggaagagtggggaggccgcaggctactaagacactgctctgcccagagctgaagtctggccccaccatgagtcctgtgtccaggccggacatggctgggggaccaactactctggcaggatctggacccctggcaggggagtccagctgagagtggaagaggtggcggggaccagctgggcagatgagaggctgagcctcatccctaaccccctttcccagagcccctggtggtcctgaaccggcccctctatccctccgcaggcctcttgcctggggccactctcccaccctctcgatctgtatatcctccagtccaagattaaagaggcggactgtggcctgattc

SEQ ID NO: 60608 - DNA, 2483 bp, Homo sapiens
cctgccagcaacaagcaggagctgaaaaccagaagttgaggcgtgagtttggccactccgtagtgtgcacttggtgagggcagcagctcgccacagctgccagccatctgtccattcacccatctgtccatctggcagcccgctgttcagacctgtctgtctgtccgcccatctgtaagcccatctctgtcccattgtctatctgaccatctttctcttactgtcctctttgtctagctatctggcctatctgtcgatccatcttcgtgtctgtcttcagcccccacctgtttgtccatctgtccaattacctgtgactctgtgcatcttcttgtccattcatctgcccacccatccgtccctccgtctgcccaccagccgcccctctcctcctgggctgcagagccatggcccggggctacggggccacggtcagcctagtcctgctgggtctggggctggcgctggctgtcattgtgctggctgtggtcctctctcgacaccaggccccatgtggcccccaggcctttgcccacgctgctgttgccgccgactccaaggtctgctcggatattggacgagccatcctccagcagcagggctcacccgtggatgccaccatcgcggctctggtctgcaccagcgtcgtcaaccctcagagcatgggcctgggcggaggggtcatcttcaccatctacaatgtgacaacaggggcccagtggatcggggtgcccggggagctccgtggctatgccgaggcccaccgccgccatggccgcctgccctgggcgcagctgttccagcccaccatcgcgctgctccgaggggggcatgtggtggcccctgtcctcagccgtttcctgcacaacagcatcctgcggccttccttgcaggcgtcaaccctgcgccagctcttcttcaacgggacagaacccctgaggcctcaggacccactcccatggcctgcactggccaccaccctggagaccgtggccacagagggcgtggaggtcttctacacggggaggctgggccagatgctggtggaggacattgccaaggaagggagccagctgacgctgcaggacctggccaagttccagcccgaggtggtggatgccctggaggtgcccctgggggactataccctgtactcaccaccgccgcctgcagggggtgccattctcagctttatcctcaacgtgctaagagggttcaacttctcaacagagtctatggccaggcctgaagggagggtgaacgtgtaccaccaccttgtagagacgctcaagtttgccaaggggcagaggtggaggctgggggaccctcgaagccacccgaagctccagaatgcctcccgggacctgctgggggagaccctggcccagctcatccgccaacagatcgatggccggggggaccaccagctcagccactacagcttggccgaggcctggggccacgggacaggcacgtcccatgtgtctgtgctgggggaggatggcagcgccgtggctgccaccagcaccatcaacacaccctttggagcgatggtgtattcaccacggacaggcatcatcctcaacaacgagctcctggacttatgcgagcgatgcccccggggttccggcaccaccccctcacctgtgagtggagacagggtgggtggagctcccggaaggtgctggcccccagttccaggcgagcgttccccatcctccatggtgccctccatcttgatcaacaaagcccaggggtcgaagctagtgattggcggggctggcggggagctcatcatctctgctgtggcccaggccatcatgagcaagctgtggcttggctttgacctgagagcggccattgcagcccccatcctgcatgtcaacagcaagggctgtgtggagtacgagcccaacttcagccagagacggtgtcttgctttgttgccctggctgttctcaaactcctggcctcaagtgatcctgccaccttggctcccaagtggctaagactgtaggaggtgcagaggggactccaagaccgtggccagaaccagacccagaggcccttcttcctgaacgtggtccaggctgtgtcccaggagggggcctgtgtgtacgccgtctcggacctgaggaagagtggggaggccgcaggctactaagacactgctctgcccagagctgaagtctggccccaccatgagtcctgtgtccaggccggacatggctgggggaccaactactctggcaggatctggacccctggcaggggagtccagctgagagtggaagaggtggcggggaccagctgggcagatgagaggctgagcctcatccctaaccccctttcccagagcccctggtggtcctgaaccggcccctctatccctccgcaggcctcttgcctggggccactctcccaccctctcgatctgtatatcctccagtccaagattaaagaggcggactgtggcctgattc

SEQ ID NO: 60609 - DNA, 2320 bp, Homo sapiens
cctgccagcaacaagcaggagctgaaaaccagaagttgaggcgtgagtttggccactccgtagtgtgcacttggtgagggcagcagctcgccacagctgccagccatctgtccattcacccatctgtccatctggcagcccgctgttcagacctgtctgtctgtccgcccatctgtaagcccatctctgtcccattgtctatctgaccatctttctcttactgtcctctttgtctagctatctggcctatctgtcgatccatcttcgtgtctgtcttcagcccccacctgtttgtccatctgtccaattacctgtgactctgtgcatcttcttgtccattcatctgcccacccatccgtccctccgtctgcccaccagccgcccctctcctcctgggctgcagagccatggcccggggctacggggccacggtcagcctagtcctgctgggtctggggctggcgctggctgtcattgtgctggctgtggtcctctctcgacaccaggccccatgtggcccccaggcctttgcccacgctgctgttgccgccgactccaaggtctgctcggatattggacgagccatcctccagcagcagggctcacccgtggatgccaccatcgcggctctggtctgcaccagcgtcgtcaaccctcagagcatgggcctgggcggaggggtcatcttcaccatctacaatgtgacaacagggaaggtggaggtcatcaatgcccgggagacggtgccggccagccacgccccgagcctgctggaccagtgtgcacaggctctgccactgggcacaggggcccagtggatcggggtgcccggggagctccgtggctatgccgaggcccaccgccgccatggccgcctgccctgggcgcagctgttccagcccaccatcgcgctgctccgaggggggcatgtggtggcccctgtcctcagccgtttcctgcacaacagcatcctgcggccttccttgcaggcgtcaaccctgcgccagctcttcttcaacgggacagaacccctgaggcctcaggacccactcccatggcctgcactggccaccaccctggagaccgtggccacagagggcgtggaggtcttctacacggggaggctgggccagatgctggtggaggacattgccaaggaagggagccagctgacgctgcaggacctggccaagttccagcccgaggtggtggatgccctggaggtgcccctgggggactataccctgtactcaccaccgccgcctgcagggggtgccattctcagctttatcctcaacgtgctaagagggttcaacttctcaacagagtctatggccaggcctgaagggagggtgaacgtgtaccaccaccttgtagagacgctcaagtttgccaaggggcagaggtggaggctgggggaccctcgaagccacccgaagctccagaatgcctcccgggacctgctgggggagaccctggcccagctcatccgccaacagatcgatggccggggggaccaccagctcagccactacagcttggccgaggcctggggccacgggacaggcacgtcccatgtgtctgtgctgggggaggatggcagcgccgtggctgccaccagcaccatcaacacaccctttggagcgatggtgtattcaccacggacaggcatcatcctcaacaacgagctcctggacttatgcgagcgatgcccccggggttccggcaccaccccctcacctggccatcatgagcaagctgtggcttggctttgacctgagagcggccattgcagcccccatcctgcatgtcaacagcaagggctgtgtggagtacgagcccaacttcagccaggaggtgcagaggggactccaagaccgtggccagaaccagacccagaggcccttcttcctgaacgtggtccaggctgtgtcccaggagggggcctgtgtgtacgccgtctcggacctgaggaagagtggggaggccgcaggctactaagacactgctctgcccagagctgaagtctggccccaccatgagtcctgtgtccaggccggacatggctgggggaccaactactctggcaggatctggacccctggcaggggagtccagctgagagtggaagaggtggcggggaccagctgggcagatgagaggctgagcctcatccctaaccccctttcccagagcccctggtggtcctgaaccggcccctctatccctccgcaggcctcttgcctggggccactctcccaccctctcgatctgtatatcctccagtccaagattaaagaggcggactgtggcctgattc

SEQ ID NO: 60610 - DNA, 1313 bp, Homo sapiens
cactccagacactacctacaccattcattagaccctgtactcaacaacgtcagttaacatggtctgtcactgtcacctatgtccatcctggtcctaacaagtgctatgttctctcaccaatacatatagagcgccgggcggaaggcgaggtgtactgtgtaccatccacgcattgtagtatcacgcctgctacattacgcgcaatcctagtcagaagagtgagatccatggcgagactctactatcgacacatttacgacccgctgccagtaatgcctcccgggacctgctgggggagaccctggcccagctcatccgccaacagatcgatggccggggggaccaccagctcagccactacagcttggccgaggcctggggccacgggacaggcacgtcccatgtgtctgtgctgggggaggatggcagcgccgtggctgccaccagcaccatcaacacaccctttggagcgatggtgtattcaccacggacaggcatcatcctcaacaacgagctcctggacttatgcgagcgatgcccccggggttccggcaccaccccctcacctgtgagtggagacagggtgggtggagctcccggaaggtgctggcccccagttccaggcgagcgttccccatcctccatggtgccctccatcttgatcaacaaagcccaggggtcgaagctagtgattggcggggctggcggggagctcatcatctctgctgtggcccaggccatcatgagcaagctgtggcttggctttgacctgagagcggccattgcagcccccatcctgcatgtcaacagcaagggctgtgtggagtacgagcccaacttcagccaggaggtgcagaggggactccaagaccgtggccagaaccagacccagaggcccttcttcctgaacgtggtccaggctgtgtcccaggagggggcctgtgtgtacgccgtctcggacctgaggaagagtggggaggccgcaggctactaagacactgctctgcccagagctgaagtctggccccaccatgagtcctgtgtccaggccggacatggctgggggaccaactactctggcaggatctggacccctggcaggggagtccagctgagagtggaagaggtggcggggaccagctgggcagatgagaggctgagcctcatccctaaccccctttcccagagcccctggtggtcctgaaccggcccctctatccctccgcaggcctcttgcctggggccactctcccaccctctcgatctgtatatcctccagtccaagattaaagaggcggactgtggcctgattc

SEQ ID NO: 60611 - DNA, 839 bp, Homo sapiens
gtgaaccactgtgtctggcctcagtgtctaaatcttgagaagccacatcctccatcgaaggccccctgaactcagatttgcacctcaaggccctggtgtccttggatccagaacagacatgaacttgcatttggaggtcttcgggcctgggtggtgtccttcgtacatagtccctggaggctgagcttgtcctctatgggcctttggatctcttccatgctcccatctggtcctcccctcttcctgtgtcttcaggccctcttcctctccgtcttgccttttgatcatttttctcatttcttgcagaggcctctccctcctggagatgggctgagctgccctcccctgtgaacctgctttctctcctctccaggaggtgcagaggggactccaagaccgtggccagaaccagacccagaggcccttcttcctgaacgtggtccaggctgtgtcccaggagggggcctgtgtgtacgccgtctcggacctgaggaagagtggggaggccgcaggctactaagacactgctctgcccagagctgaagtctggccccaccatgagtcctgtgtccaggccggacatggctgggggaccaactactctggcaggatctggacccctggcaggggagtccagctgagagtggaagaggtggcggggaccagctgggcagatgagaggctgagcctcatccctaaccccctttcccagagcccctggtggtcctgaaccggcccctctatccctccgcaggcctcttgcctggggccactctcccaccctctcgatctgtatatcctccagtccaagattaaagaggcggactgtggcctgattc

SEQ ID NO: 60612 - DNA, 3225 bp, Homo sapiens
ctgaaggacaacaaagagacttaattagacgaattgaatgccttcctacttctggccatcttagttccttggaccaggatctcttaatgctcaaagctacttccatggcaactatgaactgcttaaatgactgctttcatattctccagttacagcatgcatcacatcagaagggctcattgccttcaggaacgacaatcgagtggttagaaccaaagatatctttatcaaaccactataaaaatggagctgaccagccctttgcaactgatcagagtaagccggtggcagtcccagaagagcagcctgttgcagaatctggactattagcgagggagcctgaagaaataaatgcagatgatgagatagaggatacatgtgaccacaaagaggatgacctgggagctgtagaagaacaacgtagtgtcatcctacatctcttgtcacagcttaagctgggcatggatttaacaagagtggtgcttcctacatttatcctagagaagcgttccttgctggaaatgtatgcagactttatgtctcatccagacctatttatagccatcactaatggagccacagctgaggacagaatgattcgctttgttgagtactaccttacctcatttcatgaaggccgtaagggagccattgctaaaaaaccatacaatcctatcattggagaaacatttcactgttcctggaagatgccaaaaagcgaggtagcatccagtgtttttagcagttcttccacccagggagtcacaaatcatgctcctttatcgggggagtctttgacccaggtgggatcagactgttacacagtcagatttgttgctgagcaggtttctcatcatcctccagtctcaggattttatgcagaatgtacagagaggaagatgtgtgtaaatgcgcatgtctggactaagagcaagttcttaggcatgtcaataggcgtgacaatggttggagaaggtatccttagtctgttggagcatggagaagagtacacattttctctaccctgtgcatatgctcggtcaattttgactgttccttgggtagaactgggtggcaaagtcagtgtcaactgtgcaaaaactggatattcagccagcatcacttttcataccaagccattttatggtggcaaactgcatcgggttacagctgaagtaaagcacaacatcaccaacactgtggtatgcagagtgcaaggggaatggaatagtgttcttgagttcacatatagcaatggagagacaaagtatgtggacttgactaaattggcagtgacgaagaaaagagtgagacctctggagaagcaggatccatttgaatccaggcgattgtggaaaaatgtgacagactcgctgagagaatctgaaattgataaggccacagagcataagcataccctggaagaacgtcagaggactgaagaaaggcatcgtactgaaacaggcacaccttggaaaaccaaatattttattaaagagggagatggctgggtttatcataaaccactttggaaaataattccaacaacacaaccagcagagtgacacatactatctaaaactcgaccaaatgaggttcttctctgtttaccctaaatcctcccagaatggagtcattgcactgagtgacctgcttcctgattgcgcagactgaaactagctaaacctgaatgtacctactagggcaccataatactgcagcaagaccaaagtggtaaagaaacacagtggaccttttaccaacctgttcatgtgatgtgagcaataccatcttaaaacttgttacctgaatcagtagatgaatcttttatccagttcttgctcctaaagttaagtttgaatcccctatttttgcacaggggcagcagatacacacaacaatgagaactcagtgactttgatttctttgtagtgaaaagtgaagtctccgtttcagagtttgtgtctttctttctgtccataactgaagtattcactactcttgtaaaccaaccaagaggaggagaaagatgacccagaagtggattcagccattgtgcctgaaatcagtgtttaaaaaaaaaaatcaaccaggttgtggtaacaaggcattctatttcttcaaaaagactgtatgcctgtgtctgaggaacttacctattatccacctctgttggaactctcttttaaaaagtacatttatagattgatcagaattataaccatggagaattttttcttctgagcattttaatatacttgaaaacaacattgacttgaaaaatttcagaacatttttcagtacctagttttattaaatattacacttgagagacactttttaaaaatgtgttaatgtcaatatgatgagattttagcctttctccagaactaaggcattaaagaaaatagcaaatattaaaaaataaaactgttacttttttccttctttcttttcacctttaggttaatatccagtattatgtgttatccctttggataagtatgctttattttacctctgttaaaaattaaaataaatgattctattcatatttgtcagtaattcaaaacttatatgtgtaactgaacgcgcatgtaaggtatggttttatttattttttttttttttgaggaaatttaaatgctaaagaaacaacgaaatgaaaaggtatcaggaaaaaaagatcaggaagttgtattcaggtacaaatctttttttaaataagtattttgttgaggttgaagaattgctggcaattaaaagaatagagctaattatggctttcatcattcattcatgtatttattgagcacctacttattatggtgctcaacacttgttactgcaagctaccttaatttcccaagagtggtgccttactctgttttttctgatatggtcttccaatcagtgtgtgtaacatacctgttgtttatcagccattgtaggtggctgtgtctgttgcatcatcataagaagtttaagctttgtgctctgataaattgtgttctgttaaagaggttagtaggatgaaaacagcaaaacaataattttttcaacaaattgtaaattataagaaaaagagttggtttgtgtacaacaattttaatgattcccttgttcatttttgctgtgaaatgcactgaaaaaaatcctcaaaatgagttatagttcctgtgttgggaaaattgacaaataataaaactagagaacaaacaaaaa

SEQ ID NO: 60613 - DNA, 2392 bp, Homo sapiens
ggaccgggcatggtggtgggcacctgtaatcccagcactttgagaggccaaagcgggtggatcgctcgaggtcaggagcttgagaccagcctggccaacatggtgaaactccatctctactaaaaatacaaaaatgagctgggtatccttagtctgttggagcatggagaagagtacacattttctctaccctgtgcatatgctcggtcaattttgactgttccttgggtagaactgggtggcaaagtcagtgtcaactgtgcaaaaactggatattcagccagcatcacttttcataccaagccattttatggtggcaaactgcatcgggttacagctgaagtaaagcacaacatcaccaacactgtggtatgcagagtgcaaggggaatggaatagtgttcttgagttcacatatagcaatggagagacaaagtatgtggacttgactaaattggcagtgacgaagaaaagagtgagacctctggagaagcaggatccatttgaatccaggcgattgtggaaaaatgtgacagactcgctgagagaatctgaaattgataaggccacagagcataagcataccctggaagaacgtcagaggactgaagaaaggcatcgtactgaaacaggcacaccttggaaaaccaaatattttattaaagagggagatggctgggtttatcataaaccactttggaaaataattccaacaacacaaccagcagagtgacacatactatctaaaactcgaccaaatgaggttcttctctgtttaccctaaatcctcccagaatggagtcattgcactgagtgacctgcttcctgattgcgcagactgaaactagctaaacctgaatgtacctactagggcaccataatactgcagcaagaccaaagtggtaaagaaacacagtggaccttttaccaacctgttcatgtgatgtgagcaataccatcttaaaacttgttacctgaatcagtagatgaatcttttatccagttcttgctcctaaagttaagtttgaatcccctatttttgcacaggggcagcagatacacacaacaatgagaactcagtgactttgatttctttgtagtgaaaagtgaagtctccgtttcagagtttgtgtctttctttctgtccataactgaagtattcactactcttgtaaaccaaccaagaggaggagaaagatgacccagaagtggattcagccattgtgcctgaaatcagtgtttaaaaaaaaaaatcaaccaggttgtggtaacaaggcattctatttcttcaaaaagactgtatgcctgtgtctgaggaacttacctattatccacctctgttggaactctcttttaaaaagtacatttatagattgatcagaattataaccatggagaattttttcttctgagcattttaatatacttgaaaacaacattgacttgaaaaatttcagaacatttttcagtacctagttttattaaatattacacttgagagacactttttaaaaatgtgttaatgtcaatatgatgagattttagcctttctccagaactaaggcattaaagaaaatagcaaatattaaaaaataaaactgttacttttttccttctttcttttcacctttaggttaatatccagtattatgtgttatccctttggataagtatgctttattttacctctgttaaaaattaaaataaatgattctattcatatttgtcagtaattcaaaacttatatgtgtaactgaacgcgcatgtaaggtatggttttatttattttttttttttttgaggaaatttaaatgctaaagaaacaacgaaatgaaaaggtatcaggaaaaaaagatcaggaagttgtattcaggtacaaatctttttttaaataagtattttgttgaggttgaagaattgctggcaattaaaagaatagagctaattatggctttcatcattcattcatgtatttattgagcacctacttattatggtgctcaacacttgttactgcaagctaccttaatttcccaagagtggtgccttactctgttttttctgatatggtcttccaatcagtgtgtgtaacatacctgttgtttatcagccattgtaggtggctgtgtctgttgcatcatcataagaagtttaagctttgtgctctgataaattgtgttctgttaaagaggttagtaggatgaaaacagcaaaacaataattttttcaacaaattgtaaattataagaaaaagagttggtttgtgtacaacaattttaatgattcccttgttcatttttgctgtgaaatgcactgaaaaaaatcctcaaaatgagttatagttcctgtgttgggaaaattgacaaataataaaactagagaacaaacaaaaa

SEQ ID NO: 60614 - DNA, 2023 bp, Homo sapiens
tgcgctcgctccgccgtccccctcttcgggggggcagaagcaggaagcagcaatggagagacaaagtatgtggacttgactaaattggcagtgacgaagaaaagagtgagacctctggagaagcaggatccatttgaatccaggcgattgtggaaaaatgtgacagactcgctgagagaatctgaaattgataaggccacagagcataagcataccctggaagaacgtcagaggactgaagaaaggcatcgtactgaaacaggcacaccttggaaaaccaaatattttattaaagagggagatggctgggtttatcataaaccactttggaaaataattccaacaacacaaccagcagagtgacacatactatctaaaactcgaccaaatgaggttcttctctgtttaccctaaatcctcccagaatggagtcattgcactgagtgacctgcttcctgattgcgcagactgaaactagctaaacctgaatgtacctactagggcaccataatactgcagcaagaccaaagtggtaaagaaacacagtggaccttttaccaacctgttcatgtgatgtgagcaataccatcttaaaacttgttacctgaatcagtagatgaatcttttatccagttcttgctcctaaagttaagtttgaatcccctatttttgcacaggggcagcagatacacacaacaatgagaactcagtgactttgatttctttgtagtgaaaagtgaagtctccgtttcagagtttgtgtctttctttctgtccataactgaagtattcactactcttgtaaaccaaccaagaggaggagaaagatgacccagaagtggattcagccattgtgcctgaaatcagtgtttaaaaaaaaaaatcaaccaggttgtggtaacaaggcattctatttcttcaaaaagactgtatgcctgtgtctgaggaacttacctattatccacctctgttggaactctcttttaaaaagtacatttatagattgatcagaattataaccatggagaattttttcttctgagcattttaatatacttgaaaacaacattgacttgaaaaatttcagaacatttttcagtacctagttttattaaatattacacttgagagacactttttaaaaatgtgttaatgtcaatatgatgagattttagcctttctccagaactaaggcattaaagaaaatagcaaatattaaaaaataaaactgttacttttttccttctttcttttcacctttaggttaatatccagtattatgtgttatccctttggataagtatgctttattttacctctgttaaaaattaaaataaatgattctattcatatttgtcagtaattcaaaacttatatgtgtaactgaacgcgcatgtaaggtatggttttatttattttttttttttttgaggaaatttaaatgctaaagaaacaacgaaatgaaaaggtatcaggaaaaaaagatcaggaagttgtattcaggtacaaatctttttttaaataagtattttgttgaggttgaagaattgctggcaattaaaagaatagagctaattatggctttcatcattcattcatgtatttattgagcacctacttattatggtgctcaacacttgttactgcaagctaccttaatttcccaagagtggtgccttactctgttttttctgatatggtcttccaatcagtgtgtgtaacatacctgttgtttatcagccattgtaggtggctgtgtctgttgcatcatcataagaagtttaagctttgtgctctgataaattgtgttctgttaaagaggttagtaggatgaaaacagcaaaacaataattttttcaacaaattgtaaattataagaaaaagagttggtttgtgtacaacaattttaatgattcccttgttcatttttgctgtgaaatgcactgaaaaaaatcctcaaaatgagttatagttcctgtgttgggaaaattgacaaataataaaactagagaacaaacaaaaa

SEQ ID NO: 60615 - DNA, 1828 bp, Homo sapiens
cgtgactctacaggacttccaaacaccgcatcttagaggactgaagaaaggcatcgtactgaaacaggcacaccttggaaaaccaaatattttattaaagagggagatggctgggtttatcataaaccactttggaaaataattccaacaacacaaccagcagagtgacacatactatctaaaactcgaccaaatgaggttcttctctgtttaccctaaatcctcccagaatggagtcattgcactgagtgacctgcttcctgattgcgcagactgaaactagctaaacctgaatgtacctactagggcaccataatactgcagcaagaccaaagtggtaaagaaacacagtggaccttttaccaacctgttcatgtgatgtgagcaataccatcttaaaacttgttacctgaatcagtagatgaatcttttatccagttcttgctcctaaagttaagtttgaatcccctatttttgcacaggggcagcagatacacacaacaatgagaactcagtgactttgatttctttgtagtgaaaagtgaagtctccgtttcagagtttgtgtctttctttctgtccataactgaagtattcactactcttgtaaaccaaccaagaggaggagaaagatgacccagaagtggattcagccattgtgcctgaaatcagtgtttaaaaaaaaaaatcaaccaggttgtggtaacaaggcattctatttcttcaaaaagactgtatgcctgtgtctgaggaacttacctattatccacctctgttggaactctcttttaaaaagtacatttatagattgatcagaattataaccatggagaattttttcttctgagcattttaatatacttgaaaacaacattgacttgaaaaatttcagaacatttttcagtacctagttttattaaatattacacttgagagacactttttaaaaatgtgttaatgtcaatatgatgagattttagcctttctccagaactaaggcattaaagaaaatagcaaatattaaaaaataaaactgttacttttttccttctttcttttcacctttaggttaatatccagtattatgtgttatccctttggataagtatgctttattttacctctgttaaaaattaaaataaatgattctattcatatttgtcagtaattcaaaacttatatgtgtaactgaacgcgcatgtaaggtatggttttatttattttttttttttttgaggaaatttaaatgctaaagaaacaacgaaatgaaaaggtatcaggaaaaaaagatcaggaagttgtattcaggtacaaatctttttttaaataagtattttgttgaggttgaagaattgctggcaattaaaagaatagagctaattatggctttcatcattcattcatgtatttattgagcacctacttattatggtgctcaacacttgttactgcaagctaccttaatttcccaagagtggtgccttactctgttttttctgatatggtcttccaatcagtgtgtgtaacatacctgttgtttatcagccattgtaggtggctgtgtctgttgcatcatcataagaagtttaagctttgtgctctgataaattgtgttctgttaaagaggttagtaggatgaaaacagcaaaacaataattttttcaacaaattgtaaattataagaaaaagagttggtttgtgtacaacaattttaatgattcccttgttcatttttgctgtgaaatgcactgaaaaaaatcctcaaaatgagttatagttcctgtgttgggaaaattgacaaataataaaactagagaacaaacaaaaa

SEQ ID NO: 60616 - DNA, 1886 bp, Homo sapiens
tttttttgatgtcttaatcacaaagactttattccttcacaaaaacttgtttttgaatgtgaaaatagaattccatttcagtgaaggtgttgcttctagttttggttactgattttgataatattagagggatgattctttatctttttatttgtttcagggagatggctgggtttatcataaaccactttggaaaataattccaacaacacaaccagcagagtgacacatactatctaaaactcgaccaaatgaggttcttctctgtttaccctaaatcctcccagaatggagtcattgcactgagtgacctgcttcctgattgcgcagactgaaactagctaaacctgaatgtacctactagggcaccataatactgcagcaagaccaaagtggtaaagaaacacagtggaccttttaccaacctgttcatgtgatgtgagcaataccatcttaaaacttgttacctgaatcagtagatgaatcttttatccagttcttgctcctaaagttaagtttgaatcccctatttttgcacaggggcagcagatacacacaacaatgagaactcagtgactttgatttctttgtagtgaaaagtgaagtctccgtttcagagtttgtgtctttctttctgtccataactgaagtattcactactcttgtaaaccaaccaagaggaggagaaagatgacccagaagtggattcagccattgtgcctgaaatcagtgtttaaaaaaaaaaatcaaccaggttgtggtaacaaggcattctatttcttcaaaaagactgtatgcctgtgtctgaggaacttacctattatccacctctgttggaactctcttttaaaaagtacatttatagattgatcagaattataaccatggagaattttttcttctgagcattttaatatacttgaaaacaacattgacttgaaaaatttcagaacatttttcagtacctagttttattaaatattacacttgagagacactttttaaaaatgtgttaatgtcaatatgatgagattttagcctttctccagaactaaggcattaaagaaaatagcaaatattaaaaaataaaactgttacttttttccttctttcttttcacctttaggttaatatccagtattatgtgttatccctttggataagtatgctttattttacctctgttaaaaattaaaataaatgattctattcatatttgtcagtaattcaaaacttatatgtgtaactgaacgcgcatgtaaggtatggttttatttattttttttttttttgaggaaatttaaatgctaaagaaacaacgaaatgaaaaggtatcaggaaaaaaagatcaggaagttgtattcaggtacaaatctttttttaaataagtattttgttgaggttgaagaattgctggcaattaaaagaatagagctaattatggctttcatcattcattcatgtatttattgagcacctacttattatggtgctcaacacttgttactgcaagctaccttaatttcccaagagtggtgccttactctgttttttctgatatggtcttccaatcagtgtgtgtaacatacctgttgtttatcagccattgtaggtggctgtgtctgttgcatcatcataagaagtttaagctttgtgctctgataaattgtgttctgttaaagaggttagtaggatgaaaacagcaaaacaataattttttcaacaaattgtaaattataagaaaaagagttggtttgtgtacaacaattttaatgattcccttgttcatttttgctgtgaaatgcactgaaaaaaatcctcaaaatgagttatagttcctgtgttgggaaaattgacaaataataaaactagagaacaaacaaaaa

SEQ ID NO: 60617 - DNA, 2237 bp, Homo sapiens
  misc_feature (2217)..(2218): n is a, c, g, or t
  misc_feature (2225)..(2225): n is a, c, g, or t
ctgaaggacaacaaagagacttaattagacgaattgaatgccttcctacttctggccatcttagttccttggaccaggatctcttaatgctcaaagctacttccatggcaactatgaactgcttaaatgactgctttcatattctccagttacagcatgcatcacatcagaagggctcattgccttcaggaacgacaatcgagtggttagaaccaaagatatctttatcaaaccactataaaaatggagctgaccagccctttgcaactgatcagagtaagccggtggcagtcccagaagagcagcctgttgcagaatctggactattagcgagggagcctgaagaaataaatgcagatgatgagatagaggatacatgtgaccacaaagaggatgacctgggagctgtagaagaacaacgtagtgtcatcctacatctcttgtcacagcttaagctgggcatggatttaacaagagtggtgcttcctacatttatcctagagaagcgttccttgctggaaatgtatgcagactttatgtctcatccagacctatttatagccatcactaatggagccacagctgaggacagaatgattcgctttgttgagtactaccttacctcatttcatgaaggccgtaagggagccattgctaaaaaaccatacaatcctatcattggagaaacatttcactgttcctggaagatgccaaaaagcgaggtagcatccagtgtttttagcagttcttccacccagggagtcacaaatcatgctcctttatcgggggagtctttgacccaggtgggatcagactgttacacagtcagatttgttgctgagcaggtttctcatcatcctccagtctcaggattttatgcagaatgtacagagaggaagatgtgtgtaaatgcgcatgtctggactaagagcaagttcttaggcatgtcaataggcgtgacaatggttggagaaggtatccttagtctgttggagcatggagaagagtacacattttctctaccctgtgcatatgctcggtcaattttgactgttccttgggtagaactgggtggcaaagtcagtgtcaactgtgcaaaaactggatattcagccagcatcacttttcataccaagccattttatggtggcaaactgcatcgggttacagctgaagtaaagcacaacatcaccaacactgtggtatgcagagtgcaaggggaatggaatagtgttcttgagttcacatatagcaatggagagacaaagtatgtggacttgactaaattggcagtgacgaagaaaagagtgagacctctggagaagcaggatccatttgaatccaggcgattgtggaaaaatgtgacagactcgctgagagaatctgaaattgataaggccacagagcataagcataccctggaagaacgtcagaggactgaagaaaggcatcgtactgaaacaggcacaccttggaaaaccaaatattttattaaagagggagatggctgggtttatcataaaccactttggaaaataattccaacaacacaaccagcagagtgacacatactatctaaaactcgaccaaatgaggttcttctctgtttaccctaaatcctcccagaatggagtcattgcactgagtgacctgcttcctgattgcgcagactgaaactagctaaacctgaatgtacctactagggcaccataatactgcagcaagaccaaagtggtaaagaaacacagtggaccttttaccaacctgttcatgtgatgtgagcaataccatcttaaaacttgttacctgaatcagtagatgaatcttttatccagttcttgctcctaaagttaagtttgaatcccctatttttgcacaggggcagcagatacacacaacaatgagaactcagtgactttgatttctttgtagtgaaaagtgaagtctccgtttcagagtttgtgtctttctttctgtccataactgaagtattcactactcttgtaaaccaaccaagaggaggagaaagatgacccagaagtggattcagccattgtgcctgaaatcagtgtttaaaaaaaaaaatcaaccaggttgtggtaacaaggcattctatttcttcaaaaagactgtatgcctgtgtctgaggaacttacctattatccacctctgttggaactctcttttaaaaagtacatttatagattgcgtgtttgnngatcctntagatcaccagc

SEQ ID NO: 60618 - DNA, 1529 bp, Homo sapiens
ctgaaggacaacaaagagacttaattagacgaattgaatgccttcctacttctggccatcttagttccttggaccaggatctcttaatgctcaaagctacttccatggcaactatgaactgcttaaatgactgctttcatattctccagttacagcatgcatcacatcagaagggctcattgccttcaggaacgacaatcgagtggttagaaccaaagatatctttatcaaaccactataaaaatggagctgaccagccctttgcaactgatcagagtaagccggtggcagtcccagaagagcagcctgttgcagaatctggactattagcgagggagcctgaagaaataaatgcagatgatgagatagaggatacatgtgaccacaaagaggatgacctgggagctgtagaagaacaacgtagtgtcatcctacatctcttgtcacagcttaagctgggcatggatttaacaagagtggtgcttcctacatttatcctagagaagcgttccttgctggaaatgtatgcagactttatgtctcatccagacctatttatagccatcactaatggagccacagctgaggacagaatgattcgctttgttgagtactaccttacctcatttcatgaaggccgtaagggagccattgctaaaaaaccatacaatcctatcattggagaaacatttcactgttcctggaagatgccaaaaagcgaggtagcatccagtgtttttagcagttcttccacccagggagtcacaaatcatgctcctttatcgggggagtctttgacccaggtgggatcagactgttacacagtcagatttgttgctgagcaggtttctcatcatcctccagtctcaggattttatgcagaatgtacagagaggaagatgtgtgtaaatgcgcatgtctggactaagagcaagttcttaggcatgtcaataggcgtgacaatggttggagaaggtatccttagtctgttggagcatggagaagagtacacattttctctaccctgtgcatatgctcggtcaattttgactgttccttgggtagaactgggtggcaaagtcagtgtcaactgtgcaaaaactggatattcagccagcatcacttttcataccaagccattttatggtggcaaactgcatcgggccatctcatctccataagcctgagttgtggagagaggcaaagtttttatcaaggagaaaattctgatctgctcaaatcctaggccgggctcggtggctcatgcctgtaatcccagtactttgcgaggccgaggcaggcggatcacctgaggtcaggagttcgagaccagcctgaccaacatggagaaacccagtctctactaaaaatacaacattagccaggtgtggtggtacatgcctgtaatcccagctactcgggaggctgagacaggagaattgcttgaacccaggaggcggaggttgcagtgagccaagattgcgccattgcactccagcctgggcaacaagagtgaaactctgtctcca

SEQ ID NO: 60619 - DNA, 369 bp, Homo sapiens
cggttccactatgttgcctcagctggtttcgaactcctgtgctgaaacaatcctcccaacttggcctcccaaagtgctgtgattataggcatgagccactgcgcctggccaagaatgcttattttttaatgtgactgaatactttttctttgtgactttgtttttaatacccatctagaatgaaatgttttcagagagagaatagttgtctacagatatgctacacatggattaaatttcccctctttcattgattgttgttttaggtggtgcttcctacatttatcctagagaagcgttccttgctggaaatgtatgcagactttatgtctcatccagacctatttatagccatcactaatggagcca

SEQ ID NO: 60620 - DNA, 253 bp, Homo sapiens
caaagtgctgggattacaggcatgagccaccgcgcctggcccacttggtgtattttaaaatgtgtttatgctttcttttttggtagccatgacatctccctggcaactgtacaacctgtctaatctataaattatagtgaagagtagaaaacagcttagggctgggcacagtggctcacacctgtaagcccagcactttgtgaggccaagacaggcagattgcttgagcttaggagttcaagaccagcctggg

SEQ ID NO: 60621 - DNA, 227 bp, Homo sapiens
atctccatcatgtaattagcttcaccttcagtactgctcagagagacagagtctttatcacatctaggcatttcctcatcttgcagagggaaaaaattcctaccattgcaatatttttaaattattcatatctttaatctttctatcttgcatttgtttatggaaaatttttaaaaagttgattcagtttggggttaaaagtaaggttatttcaagtacatataaga

SEQ ID NO: 60622 - DNA, 384 bp, Homo sapiens
ctgagagccaggagctcttgcggagaagccactgtctgcacgccacctgcttcgatgaccctgctctgccatccctgtgctccaagggccgggccctgccgttgcctgtgccagacgggtctcagggagatgccggccagcaggtatgcatggcgaggcctgggcatcaaggcccggattctatggctgccagtttcattctctcgttgtttgtccccctagcaagacttatgaggttccttgaggacaagactccctcctgccacctggtctgtttcctgaacattcactgcactagcacggccccgggacgcagcccttgggaatcaggccgtcggccatggtagagcggctggcactgctcggcaccgtgacggacgttgg

SEQ ID NO: 60623 - DNA, 775 bp, Homo sapiens
ggactcaaagacattgaacaacggacccaaggtcatgcagaaaagtcagtactgagcctggaggatccttgagctcttcatcttaaccttctccttgaagtgccaaaattgctggccagcccctcagagcaggagcagccatccttgtcctgacagtccacccagggcagcagtgagcctccctgtgtgggatgggaccaaggcttctgtctgattcccaaccctatccagccccctctctccagcccttcccacctgtttgcctctacccgcgtcagagttctgacagtctaactctctcccacactactgctctggaccttgacgcagcaaagcagtcacagtcgtcaacccactggaggacacatagcctggagcccaggtgaggcttgcagactcagtagcttggagctatcagatggccatcctgcattactgcaagccctgcccagaggctgagtgaaggccatcaggctgaccgagccacagctctgaaagaatgccgcagctcagtggctcccagctttgccgcacctcacaatcacctggggagctttgaaaattcccactgcctgggctgcacaccctaccagtgaaatcagaatatctcagggtgggagtcaggcagcagtcgttttggttttgttttttcttttaaagaacccaggtgatgtaatcccagcactttgggaggctgaggcaggcggatcacaaggtcagcagttcgagaccagcctggccaatatggcgaaaccccgtctctactaaaaaataa

SEQ ID NO: 60624 - DNA, 284 bp, Homo sapiens
cttttagagacaccttacttataatgaagtacttgggaaagcggttttcaagagtataaatatcctgtattctaatgatcatcctctaaacattttatcatttattaatcctccctgcctgtgtctattattatatacatatctctacgctgcaaattttgggtctcaatttttactgtgcctttgtttttactagtgtctgctgttgcaaaaagaagaaaacattctctgcctgagttttaatttttgtccaaagttaattttaatctatacaattaaaacct

SEQ ID NO: 60625 - DNA, 98 bp, Homo sapiens
tctcttcttgccaccatgtagtatcatctcattctatagaacaaagaaagcagcaaccccaaatagtgtgatatatgctaactcttccctctttcaaa

SEQ ID NO: 60626 - DNA, 4239 bp, Homo sapiens
cccgcctaatcttcacccgctgctaggctcgtttaatgagtcttctgagagctaaggagtcctcggattcattcaaagcattctacaatgaacgctaggggggaaaaagaacaaacaaaatacatttcaaatataggattcaattacttttcactactcaatgatgtgtcaaaggcacgctgtgttttgttttgagggcggggagatgacaggagggaatcctgggcccccattggctcgccgctcgccgctgcagttgagctccagccgctccgagagcattattgatctgaagggtaaatgtggagggagccacagagaggggtccaggcttttctgagaagagaggcagcctcttccaggaagaaagtggtgtctactggctgcccggcctggagaaccttctttgaatgaaaacggacaaaatgcaaagcagtgcgttggcacagtgatttggaaaggggaaacagaagagaagggtctcaccttccgcgcaaggctgagctgttggcaccctgctgcggccgtcggtgctgctgctcctgcagctgccttttctgccatcagctttgttacctaacagcttggctcttttgggaatatagacaagctggaacccaggagcagttgggagttttaaagaatgccagcctttttaaagctttgatgtccagtgctatagaatcaagttactgtggaggtcaaaacaatttgagatacataagctggccttagaaaataaattgcctctaacttacagtgaggagctcaacataacagggaaaaggagcacaggatgcagctacttggagggtgttgattgaaaacttcgatctccccaccccattcacggttgatttgacggatttctcaccttgttcacagagaaaatttcaattaaggcccctttagatggaatataatacagcagaagccttttcatcaaaaggattaatgcctgcatcatcatttctgcaataaaacaagaagctaagcggtggaggccacagacacctcaaacctggattccacaattctacgttaagtgttggagtttttattactctgctgtaggaaagcctttgccaatgcttacaaggaactgtttatccctgcttctctgggttctgtttgatggaggtctcctaacaccactacaaccacagccacagcagactttagccacagagccaagagaaaatgttatccatctgccaggacaacggtcacatttccaacgtgttaaacgtggctgggtatggaatcaattttttgtgctggaagaatacgtgggctccgagcctcagtatgtgggaaagctccattccgacttagacaagggagagggcactgtgaaatacaccctctcaggagatggcgctggcaccgtttttaccattgatgaaaccacaggggacattcatgcaataaggagcctagatagagaagagaaacctttctacactcttcgtgctcaggctgtggacatagaaaccagaaagcccctggagcctgaatcagaattcatcatcaaagtgcaggatattaatgataatgagccaaagtttttggatggaccttatgttgctactgttccagaaatgtctcctgtgggtgcatatgtactccaggtcaaggccacagatgcagatgacccgacctatggaaacagtgccagagtcgtttacagcattcttcagggacaaccttatttctctattgatcccaagacaggtgttattagaacagctttgccaaacatggacagagaagtcaaagaacaatatcaagtactcatccaagccaaggatatgggaggacagcttggaggattagccggaacaacaatagtcaacatcactctcaccgatgtcaatgacaatccacctcgattccccaaaagcatcttccacttgaaagttcctgagtcttcccctattggttcagctattggaagaataagagctgtggatcctgattttggacaaaatgcagaaattgaatacaatattgttccaggagatgggggaaatttgtttgacatcgtcacagatgaggatacacaagagggagtcatcaaattgaaaaagcctttagattttgaaacaaagaaggcatacactttcaaagttgaggcttccaaccttcaccttgaccaccggtttcactcggcgggccctttcaaagacacagctacggtgaagatcagcgtgctggacgtagatgagccaccggttttcagcaagccgctctacaccatggaggtttatgaagacactccggtagggaccatcattggcgctgtcactgctcaagacctggatgtaggcagcagtgctgttaggtacttcatagattggaagagtgatggggacagctactttacaatagatggaaatgaaggaaccatcgccactaatgaattactagacagagaaagcactgcgcagtataatttctccataattgcgagtaaagttagtaaccctttattgaccagcaaagtcaatatactgattaatgtcttagatgtaaatgaatttcctccagaaatatctgtgccatatgagacagccgtgtgtgaaaatgccaagccaggacagataattcagatagtcagtgctgcagaccgagatctttcacctgctgggcaacaattctcctttagattatcacctgaggctgctatcaaaccaaattttacagttcgtgacttcagaaacaacacagcggggattgaaacccgaagaaatggatacagccgcaggcagcaagagttgtatttcctccctgttgtaatagaagacagcagctaccctgtccagagcagcacaaacacaatgactattcgagtctgtagatgtgactctgatggcaccatcctgtcttgtaatgtggaagcaatttttctacctgtaggacttagcactggggcgttgattgcaattctactatgcattgttatactcttagccatagttgtactgtatgtagcactgcgaaggcagaagaaaaagacaccctgatgacctctaaagaagacatcagagacaacgtcatccattacgatgatgaaggaggtggggaggaagatacccaggctttcgacatcggggctctgagaaacccaaaagtgattgaggagaacaaaattcgcagggatataaaaccagactctctctgtttacctcgtcagagaccacccatggaagataacacagacataagggatttcattcatcaaaggctacaggaaaatgatgtggatccaactgccccaccatacgattcactggccacatatgcctacgaagggagtgggtccgtggcagagtccctcagctctatagactctctcaccacagaagccgaccaggactatgactatctgacagactggggaccccgctttaaagtcttggcagacatgtttggcgaagaagagagttataaccctgataaagtcacttaagggagtcgtggaggctaaaatacaaccgagaggggagatttttaaaaaagaaaaagaaacacaaatattaatagaaatctctctcacacacacacacacacacaaacacacacacacacacacactctttctgggacaagattcctttgattacctggtttctagtaagttactaaattaatcatattgtcagttttggtttattctgccaacaagagatacatcctataatgtgtacttgctttgttttgttgttttgttttttcacaatcacactgagacaagctcaggcctattcaatacaatttactgacatgacaacctagaacgaagatagctatgtggcatcacggtggaagagtgttagatttttcttaattccactaaagtgcctattgaaactcttatcatttaaagtggtgtacagtacactctgctgtgatggtattgcgggattcagagataaagacataaaacagacaccgtctttatgtcaagaagcaatagcgacactctgactctcctcattccttttgagaacaaaagaagaacactttctgatctccaccttcttctaattcaaaaggttttctttttcttttttaaactgtatgctaaaacgtatttgtttatcctatcctttcagaaaattgaaataaatatgaaaatatcaagttcaatatgtaagtcccaaattctagaaacaatgtttgatcttaacattagttcacattaaagctgttcattaaaatgttactttcttttcc

SEQ ID NO: 60627 - DNA, 923 bp, Homo sapiens
  misc_feature (923)..(923): n is a, c, g, or t
cccccactcgccacccaccccaccccaccatgcaagccggtttcggccgtcagcccaaccgcccttgtctggataagacttggagcgacgaatcctaaattctttcggccatgggacaccccgtggaatcaagcatttggccaagggcctccccgccgtttaagtgcacctacgttctccccttaaccagcccatttaatgtcaccgcttcagcaagagtccgggggcgaacaacccaggctccagtaatccatcctaatggggccagataattcagatagtcagtgctgcagaccgagatctttcacctgctgggcaacaattctcctttagattatcacctgaggctgctatcaaaccaaattttacagttcgtgacttcagaaacaacacagcggggattgaaacccgaagaaatggatacagccgcaggcagcaagagttgtatttcctccctgttgtaatagaagacagcagctaccctgtccagagcagcacaaacacaatgactattcgagtctgtagatgtgactctgatggcaccatcctgtcttgtaatgtggaagcaatttttctacctgtaggacttagcactggggcgttgattgcaattctactatgcattgttatactcttaggttggtttcaatattaatcattgttaattttttctcgctctctcttcctttttttcccctctctctcctccatctctctcctcaatttatcatgtaaacaagtttttattcattgacatgtcatacctagctagaagataatctatgtgtattgaattaaattgttattaatgctatttttctatttcatacttcttggatatatattattggggataaataaataacatcataaaataaacacctggcctcgttggcctcagcggtggagctctgccgccggan

SEQ ID NO: 60628 - DNA, 2153 bp, Homo sapiens
cccgcctaatcttcacccgctgctaggctcgtttaatgagtcttctgagagctaaggagtcctcggattcattcaaagcattctacaatgaacgctaggggggaaaaagaacaaacaaaatacatttcaaatataggattcaattacttttcactactcaatgatgtgtcaaaggcacgctgtgttttgttttgagggcggggagatgacaggagggaatcctgggcccccattggctcgccgctcgccgctgcagttgagctccagccgctccgagagcattattgatctgaagggtaaatgtggagggagccacagagaggggtccaggcttttctgagaagagaggcagcctcttccaggaagaaagtggtgtctactggctgcccggcctggagaaccttctttgaatgaaaacggacaaaatgcaaagcagtgcgttggcacagtgatttggaaaggggaaacagaagagaagggtctcaccttccgcgcaaggctgagctgttggcaccctgctgcggccgtcggtgctgctgctcctgcagctgccttttctgccatcagctttgttacctaacagcttggctcttttgggaatatagacaagctggaacccaggagcagttgggagttttaaagaatgccagcctttttaaagctttgatgtccagtgctatagaatcaagttactgtggaggtcaaaacaatttgagatacataagctggccttagaaaataaattgcctctaacttacagtgaggagctcaacataacagggaaaaggagcacaggatgcagctacttggagggtgttgattgaaaacttcgatctccccaccccattcacggttgatttgacggatttctcaccttgttcacagagaaaatttcaattaaggcccctttagatggaatataatacagcagaagccttttcatcaaaaggattaatgcctgcatcatcatttctgcaataaaacaagaagctaagcggtggaggccacagacacctcaaacctggattccacaattctacgttaagtgttggagtttttattactctgctgtaggaaagcctttgccaatgcttacaaggaactgtttatccctgcttctctgggttctgtttgatggaggtctcctaacaccactacaaccacagccacagcagactttagccacagagccaagagaaaatgttatccatctgccaggacaacggtcacatttccaacgtgttaaacgtggctgggtatggaatcaattttttgtgctggaagaatacgtgggctccgagcctcagtatgtgggaaagctccattccgacttagacaagggagagggcactgtgaaatacaccctctcaggagatggcgctggcaccgtttttaccattgatgaaaccacaggggacattcatgcaataaggagcctagatagagaagagaaacctttctacactcttcgtgctcaggctgtggacatagaaaccagaaagcccctggagcctgaatcagaattcatcatcaaagtgcaggatattaatgataatgagccaaagtttttggatggaccttatgttgctactgttccagaaatgtctcctgtgggtgcatatgtactccaggtcaaggccacagatgcagatgacccgacctatggaaacagtgccagagtcgtttacagcattcttcagggacaaccttatttctctattgatcccaagacaggtgttattagaacagctttgccaaacatggacagagaagtcaaagaacaatatcaagtactcatccaagccaaggatatgggaggacagcttggaggattagccggaacaacaatagtcaacatcactctcaccgatgtcaatgacaatccacctcgattccccaaaagcatcttccacttgaaagttcctgagtcttcccctattggttcagctattggaagaataagagctgtggatcctgattttggacaaaatgcagaaattgaatacaatattgttccaggagatgggggaaatttgtttgacatcgtcacagatgaggatacacaagagggagtcatcaaattgaaaaaggtatatagacaaatgttgggacagttgactactaaataataattaaagaagataaaaaataaa

SEQ ID NO: 60629 - DNA, 4181 bp, Homo sapiens
cccgcctaatcttcacccgctgctaggctcgtttaatgagtcttctgagagctaaggagtcctcggattcattcaaagcattctacaatgaacgctaggggggaaaaagaacaaacaaaatacatttcaaatataggattcaattacttttcactactcaatgatgtgtcaaaggcacgctgtgttttgttttgagggcggggagatgacaggagggaatcctgggcccccattggctcgccgctcgccgctgcagttgagctccagccgctccgagagcattattgatctgaagggtaaatgtggagggagccacagagaggggtccaggcttttctgagaagagaggcagcctcttccaggaagaaagtggtgtctactggctgcccggcctggagaaccttctttgaatgaaaacggacaaaatgcaaagcagtgcgttggcacagtgatttggaaaggggaaacagaagagaagggtctcaccttccgcgcaaggctgagctgttggcaccctgctgcggccgtcggtgctgctgctcctgcagctgccttttctgccatcagctttgttacctaacagcttggctcttttgggaatatagacaagctggaacccaggagcagttgggagttttaaagaatgccagcctttttaaagctttgatgtccagtgctatagaatcaagttactgtggaggtcaaaacaatttgagatacataagctggccttagaaaataaattgcctctaacttacagtgaggagctcaacataacagggaaaaggagcacaggatgcagctacttggagggtgttgattgaaaacttcgatctccccaccccattcacggttgatttgacggatttctcaccttgttcacagagaaaatttcaattaaggcccctttagatggaatataatacagcagaagccttttcatcaaaaggattaatgcctgcatcatcatttctgcaataaaacaagaagctaagcggtggaggccacagacacctcaaacctggattccacaattctacgttaagtgttggagtttttattactctgctgtaggaaagcctttgccaatgcttacaaggaactgtttatccctgcttctctgggttctgtttgatggaggtctcctaacaccactacaaccacagccacagcagactttagccacagagccaagagaaaatgttatccatctgccaggacaacggtcacatttccaacgtgttaaacgtggctgggtatggaatcaattttttgtgctggaagaatacgtgggctccgagcctcagtatgtgggaaagctccattccgacttagacaagggagagggcactgtgaaatacaccctctcaggagatggcgctggcaccgtttttaccattgatgaaaccacaggggacattcatgcaataaggagcctagatagagaagagaaacctttctacactcttcgtgctcaggctgtggacatagaaaccagaaagcccctggagcctgaatcagaattcatcatcaaagtgcaggatattaatgataatgagccaaagtttttggatggaccttatgttgctactgttccagaaatgtctcctgtgggtgcatatgtactccaggtcaaggccacagatgcagatgacccgacctatggaaacagtgccagagtcgtttacagcattcttcagggacaaccttatttctctattgatcccaagacaggtgttattagaacagctttgccaaacatggacagagaagtcaaagaacaatatcaagtactcatccaagccaaggatatgggaggacagcttggaggattagccggaacaacaatagtcaacatcactctcaccgatgtcaatgacaatccacctcgattccccaaaagcatcttccacttgaaagttcctgagtcttcccctattggttcagctattggaagaataagagctgtggatcctgattttggacaaaatgcagaaattgaatacaatattgttccaggagatgggggaaatttgtttgacatcgtcacagatgaggatacacaagagggagtcatcaaattgaaaaagcctttagattttgaaacaaagaaggcatacactttcaaagttgaggcttccaaccttcaccttgaccaccggtttcactcggcgggccctttcaaagacacagctacggtgaagatcagcgtgctggacgtagatgagccaccggttttcagcaagccgctctacaccatggaggtttatgaagacactccggtagggaccatcattggcgctgtcactgctcaagacctggatgtaggcagcagtgctgttaggtacttcatagattggaagagtgatggggacagctactttacaatagatggaaatgaaggaaccatcgccactaatgaattactagacagagaaagcactgcgcagtataatttctccataattgcgagtaaagttagtaaccctttattgaccagcaaagtcaatatactgattaatgtcttagatgtaaatgaatttcctccagaaatatctgtgccatatgagacagccgtgtgtgaaaatgccaagccaggacagataattcagatagtcagtgctgcagaccgagatctttcacctgctgggcaacaattctcctttagattatcacctgaggctgctatcaaaccaaattttacagttcgtgacttcagaaacaacacagcggggattgaaacccgaagaaatggatacagccgcaggcagcaagagttgtatttcctccctgttgtaatagaagacagcagctaccctgtccagagcagcacaaacacaatgactattcgagtctgtagatgtgactctgatggcaccatcctgtcttgtaatgtggaagcaatttttctacctgtaggacttagcactggggcgttgattgcaattctactatgcattgttatactcttagccatagttgtactgtatgtagcactgcgaaggcagaagaaaaagacaccctgatgacctctaaagaagacatcagagacaacgtcatccattacgatgatgaaggaggtggggaggaagatacccaggctttcgacatcggggctctgagaaacccaaaagtgattgaggagaacaaaattcgcagggatataaaaccagactctctctgtttacctcgtcagagaccacccatggaagataacacagacataagggatttcattcatcaaaggctacaggaaaatgatgtggatccaactgccccaccatacgattcactggccacatatgcctacgaagggagtgggtccgtggcagagtccctcagctctatagactctctcaccacagaagccgaccaggactatgactatctgacagactggggaccccgctttaaagtcttggcagacatgtttggcgaagaagagagttataaccctgataaagtcacttaagggagtcgtggaggctaaaatacaaccgagaggggagatttttaaaaaagaacacacacacacacactctttctgggacaagattcctttgattacctggtttctagtaagttactaaattaatcatattgtcagttttggtttattctgccaacaagagatacatcctataatgtgtacttgctttgttttgttgttttgttttttcacaatcacactgagacaagctcaggcctattcaatacaatttactgacatgacaacctagaacgaagatagctatgtggcatcacggtggaagagtgttagatttttcttaattccactaaagtgcctattgaaactcttatcatttaaagtggtgtacagtacactctgctgtgatggtattgcgggattcagagataaagacataaaacagacaccgtctttatgtcaagaagcaatagcgacactctgactctcctcattccttttgagaacaaaagaagaacactttctgatctccaccttcttctaattcaaaaggttttctttttcttttttaaactgtatgctaaaacgtatttgtttatcctatcctttcagaaaattgaaataaatatgaaaatatcaagttcaatatgtaagtcccaaattctagaaacaatgtttgatcttaacattagttcacattaaagctgttcattaaaatgttactttcttttcc

SEQ ID NO: 60630 - DNA, 3398 bp, Homo sapiens
cccgcctaatcttcacccgctgctaggctcgtttaatgagtcttctgagagctaaggagtcctcggattcattcaaagcattctacaatgaacgctaggggggaaaaagaacaaacaaaatacatttcaaatataggattcaattacttttcactactcaatgatgtgtcaaaggcacgctgtgttttgttttgagggcggggagatgacaggagggaatcctgggcccccattggctcgccgctcgccgctgcagttgagctccagccgctccgagagcattattgatctgaagggtaaatgtggagggagccacagagaggggtccaggcttttctgagaagagaggcagcctcttccaggaagaaagtggtgtctactggctgcccggcctggagaaccttctttgaatgaaaacggacaaaatgcaaagcagtgcgttggcacagtgatttggaaaggggaaacagaagagaagggtctcaccttccgcgcaaggctgagctgttggcaccctgctgcggccgtcggtgctgctgctcctgcagctgccttttctgccatcagctttgttacctaacagcttggctcttttgggaatatagacaagctggaacccaggagcagttgggagttttaaagaatgccagcctttttaaagctttgatgtccagtgctatagaatcaagttactgtggaggtcaaaacaatttgagatacataagctggccttagaaaataaattgcctctaacttacagtgaggagctcaacataacagggaaaaggagcacaggatgcagctacttggagggtgttgattgaaaacttcgatctccccaccccattcacggttgatttgacggatttctcaccttgttcacagagaaaatttcaattaaggcccctttagatggaatataatacagcagaagccttttcatcaaaaggattaatgcctgcatcatcatttctgcaataaaacaagaagctaagcggtggaggccacagacacctcaaacctggattccacaattctacgttaagtgttggagtttttattactctgctgtaggaaagcctttgccaatgcttacaaggaactgtttatccctgcttctctgggttctgtttgatggaggtctcctaacaccactacaaccacagccacagcagactttagccacagagccaagagaaaatgttatccatctgccaggacaacggtcacatttccaacgtgttaaacgtggctgggtatggaatcaattttttgtgctggaagaatacgtgggctccgagcctcagtatgtgggaaagctccattccgacttagacaagggagagggcactgtgaaatacaccctctcaggagatggcgctggcaccgtttttaccattgatgaaaccacaggggacattcatgcaataaggagcctagatagagaagagaaacctttctacactcttcgtgctcaggctgtggacatagaaaccagaaagcccctggagcctgaatcagaattcatcatcaaagtgcaggatattaatgataatgagccaaagtttttggatggaccttatgttgctactgttccagaaatgtctcctgtgggtgcatatgtactccaggtcaaggccacagatgcagatgacccgacctatggaaacagtgccagagtcgtttacagcattcttcagggacaaccttatttctctattgatcccaagacaggtgttattagaacagctttgccaaacatggacagagaagtcaaagaacaatatcaagtactcatccaagccaaggatatgggaggacagcttggaggattagccggaacaacaatagtcaacatcactctcaccgatgtcaatgacaatccacctcgattccccaaaagcatcttccacttgaaagttcctgagtcttcccctattggttcagctattggaagaataagagctgtggatcctgattttggacaaaatgcagaaattgaatacaatattgttccaggagatgggggaaatttgtttgacatcgtcacagatgaggatacacaagagggagtcatcaaattgaaaaagcctttagattttgaaacaaagaaggcatacactttcaaagttgaggcttccaaccttcaccttgaccaccggtttcactcggcgggccctttcaaagacacagctacggtgaagatcagcgtgctggacgtagatgagccaccggttttcagcaagccgctctacaccatggaggtttatgaagacactccggtagggaccatcattggcgctgtcactgctcaagacctggatgtaggcagcagtgctgttaggtacttcatagattggaagagtgatggggacagctactttacaatagatggaaatgaaggaaccatcgccactaatgaattactagacagagaaagcactgcgcagtataatttctccataattgcgagtaaagttagtaaccctttattgaccagcaaagtcaatatactgattaatgtcttagatgtaaatgaatttcctccagaaatatctgtgccatatgagacagccgtgtgtgaaaatgccaagccaggacagataattcagatagtcagtgctgcagaccgagatctttcacctgctgggcaacaattctcctttagattatcacctgaggctgctatcaaaccaaattttacagttcgtgacttcagaaacaacacagcggggattgaaacccgaagaaatggatacagccgcaggcagcaagagttgtatttcctccctgttgtaatagaagacagcagctaccctgtccagagcagcacaaacacaatgactattcgagtctgtagatgtgactctgatggcaccatcctgtcttgtaatgtggaagcaatttttctacctgtaggacttagcactggggcgttgattgcaattctactatgcattgttatactcttagctgagtcctggagtattcctatattttgaaagttgtaagagtcaaaatggagtcactaatgtcaagaaaaccctgacaaatagagctagggaagaccatggagagagggttttcacccttatatgcctgtaatgaaaaagactgtaaaaatcacaaccccgcacaaaggccatcacaaccttatacaaaatcatttctgccggaacatctgcccagcaactgcctgtccaatgttggactggcatcacccttgttattaatctttgtagtcaaggataattatttaaaacaattatgtatcctcctcgtttttttctttgaaaacctttgtcttcctttatctcttgaacacacacatagtttactatggcactcacattcccattgctatactctatttccaaataaatatattttatttcaga

SEQ ID NO: 60631 - DNA, 1613 bp, Homo sapiens
tgttattcataacgcacaaaaaaagaacctcgaggataattcagatagtcagtgctgcagaccgagatctttcacctgctgggcaacaattctcctttagattatcacctgaggctgctatcaaaccaaattttacagttcgtgacttcagaaacaacacagcggggattgaaacccgaagaaatggatacagccgcaggcagcaagagttgtatttcctccctgttgtaatagaagacagcagctaccctgtccagagcagcacaaacacaatgactattcgagtctgtagatgtgactctgatggcaccatcctgtcttgtaatgtggaagcaatttttctacctgtaggacttagcactggggcgttgattgcaattctactatgcattgttatactcttagccatagttgtactgtatgtagcactgcgaaggcagaagaaaaagacaccctgatgacctctaaagaagacatcagagacaacgtcatccattacgatgatgaaggaggtggggaggaagatacccaggctttcgacatcggggctctgagaaacccaaaagtgattgaggagaacaaaattcgcagggatataaaaccagactctctctgtttacctcgtcagagaccacccatggaagataacacagacataagggatttcattcatcaaaggctacaggaaaatgatgtggatccaactgccccaccatacgattcactggccacatatgcctacgaagggagtgggtccgtggcagagtccctcagctctatagactctctcaccacagaagccgaccaggactatgactatctgacagactggggaccccgctttaaagtcttggcagacatgtttggcgaagaagagagttataaccctgataaagtcacttaagggagtcgtggaggctaaaatacaaccgagaggggagatttttaaaaaagaacacacacacacacactctttctgggacaagattcctttgattacctggtttctagtaagttactaaattaatcatattgtcagttttggtttattctgccaacaagagatacatcctataatgtgtacttgctttgttttgttgttttgttttttcacaatcacactgagacaagctcaggcctattcaatacaatttactgacatgacaacctagaacgaagatagctatgtggcatcacggtggaagagtgttagatttttcttaattccactaaagtgcctattgaaactcttatcatttaaagtggtgtacagtacactctgctgtgatggtattgcgggattcagagataaagacataaaacagacaccgtctttatgtcaagaagcaatagcgacactctgactctcctcattccttttgagaacaaaagaagaacactttctgatctccaccttcttctaattcaaaaggttttctttttcttttttaaactgtatgctaaaacgtatttgtttatcctatcctttcagaaaattgaaataaatatgaaaatatcaagttcaatatgtaagtcccaaattctagaaacaatgtttgatcttaacattagttcacattaaagctgttcattaaaatgttactttcttttcc

SEQ ID NO: 60632 - DNA, 542 bp, Homo sapiens
ctgaaacatatattctcacgttgggtacctgctgtttttaatgactaattttttccccctgatacagccatcatttagcaaataccagggctagttattaatttaaaaacaccttcagcctgtgcttacagaaactgccatttcccccctcgggaatgagtttttcgttatgtttttaaaattagctggcgcttgaatttcattttccatccaagcttccctgttatctgtaaggtcacagaaacacataggccgcggacagtccaatcccagatattaggctcccggaattaaaagctgaaataagtaaataaagagagaacgcccagggattttttcagagcagaaagccggtccccagcgtgacgcggaagccaggttgcctcctcaagtgactcttcccttacatttggaggtgaaggctgaggaagaagaggtgacagagaaggaaaaaggcctgtgccctatatcgccaagatctgtttcttctccgctcagcaacgtgaaagaatgagaatgcattctggaggaagaagggaaaa

SEQ ID NO: 60633 - DNA, 315 bp, Homo sapiens
ccattcagaattcctggagcacatgaggtagcccccagttagatagaatgtggtattgtttgctgctattttgcctgttttgtgctgtatcacctcatccatctccccagcttaattgcaagctatttgacgggcagaaattgtgtcttatttgtatttgttttccccattgggcccggcacactgattggcatattgcagatgtttagtacttgagagaaacaaaatgtcttctagcatttgtggatgaaagattaaaatgtccaggaaaatttacttagattgatgtggattgaaactatattagattaataa

SEQ ID NO: 60634 - DNA, 211 bp, Homo sapiens
agcttctccagcagaaaactggcacctggacttgccctccaaagagatccaggagaaaagatgctgggtaccaaacatggcaaatttctacttcaaaagtaacacatgagaaactatcaatagcagcaagatttcattttgtgttagagatactctatgcagaagaacctgaaggcttggtctcctcccactgaggctgtgtaggggccag

SEQ ID NO: 60635 - DNA, 343 bp, Homo sapiens
aattgagctcagactaaaggaattcttttttgactaaatagtgattaagttatgatattcctgttggcctaagaacaatgcctatgatttagttgtgttatgtatatttgtacttataaccaaacaatcgattgggtacaagtagccttagggcaatacttccttaaaaacatgtttctgataaactaaagctttagcattaaccagaagtcataatttaatagtattgtaaaaatacctcatttattttaaatcctgtgttgggtagaggattacagttgtcatttcaaatacatgaatctcttgtcaaaagagtactttgacagtttcatggtaagacccc

SEQ ID NO: 60636 - DNA, 401 bp, Homo sapiens
aagaattaatgtatcttccaacaataaaatcacttctgattttaatctaggaaaacctaaattgtggctatggatccaaagctgtttgtttctttgaatatcaatattttcaacaggatcttgtatttaaaattcccacctacattgttaaatatgttattttttcatatctcttttggttttgataatctgaagtgtttttttctccttttggccttccaaactgcatttgtttaggtgaattaagaaaaatattgccatcaagaattacttgtgttttcacagagatagactctttgctttatagaggttgttgggtatttaatatgaatatcccagctttagaaaagagtaaactggatacaaaaagttccattgaggaacagttatttacagtaaaa

SEQ ID NO: 60637 - DNA, 401 bp, Homo sapiens
gagctgctaaaaatgcagacctggagtttgaggaagctgggggataaaagtcctattggagccatctacttagaattgccagttgaaatgacagccagataagtctgtgagcaaagaaagaagagaaaaaagaaatggctgggcatggtggttcacacctgtaatcccaacactttgagaggccaaggagcgataactgcacaagcccaggcatttgagaccagcatgcctatgccacatagggagaccctgtctttacaacaacaacaaattagccaggcatggtgatgcatgcctgtagtcccagcttcttgggaggctgagatgggaggatcacttgagcctggcgtttcaagcccggatagcaccattgctctccagtctgggcgaaggagtgaggc

SEQ ID NO: 60638 - DNA, 627 bp, Homo sapiens
agagtctactgtgatctttgtcagcaaatcgctgtgttatcttagatgttcagtactgaatcagtgatttcaggaatatcacacttctgggtgcctctactggccatctgtaagatggggacacatcctctttctctgggcagttaattcttgggctctttactagaaagtctttcaaaactgtgtttgctgggtgggtgaggtggctcacgcctgtaatcccagcaacttgggaggcccaggtgggaagatcacctgaggccaggacttcacgtccagcctgggcaacagtgagatcctgtctctaccagaaaaataagagataataataactggtgtggtagtgcatgcctgtagtcctggctactcaggaggctgaggcaggaggatggcttgagcctgggagctcacggttacagtaagctataattgtgccactgtactccagtctgggtgacagtgtgaggccctgtcttaaaaaaaaataaataaataaaccccaaaccccaaatggtgtttgctctcaatatggagggtgccctgctgcatggcctccgagctctgggttcttctcaattcctgagtctgtaactctgttgatatgactaggtagctcctgcaatgtgc

SEQ ID NO: 60639 - DNA, 301 bp, Homo sapiens
ctttaaaaggttccccgccccctttggtcctggttggcaatttcaatgggtcctggccccccctcccttcaaattttaaagggggccccaggaccccccctttttttttttttttttttttttctgggtgacagtgtgaggccctgtcttaaaaaaaaataaataaataaaccccaaaccccaaatggtgtttgctctcaatatggagggtgccctgctgcatggcctccgagctctgggttcttctcaattcctgagtctgtaactctgttgatatgactaggtagctcctgcaatgtgc

SEQ ID NO: 60640 - DNA, 826 bp, Homo sapiens
aaactccccaccaaactcctccccacccagagaacccccggtcctccccttcctcctgaaggcctgaggctccctgtgaccctccgccccacctctcgcaggtacgggctgatgcgtgagtgctggcacgcagcgccctcccagaggcctaccttcaagcagctggtggaggcgctggacaaggtcctgctggccgtctctgaggagtacctcgacctccgcctgaccttcggaccctattccccctctggtggggacgccagcagcacctgctcctccagcgattctgtcttcagccacgaccccctgccattgggatccagctccttccccttcgggtctggggtgcagacatgagcaaggctcaaggctgtgcaggcacataggctggtggccttgggccttggggctcagccacagcctgacacagtgctcgaccttgatagcatggggcccctggcccagagttgctgtgccgtgtccaagggccgtgcccttgcccttggagctgccgtgcctgtgtcctgatggcccaaatgtcagggttctgctcggcttcttggaccttggcgcttagtccccatcccgggtttggctgagcctggctggagagctgctatgctaaacctcctgcctcccaataccagcaggaggttctgggcctctgaaccccctttccccacacctccccctgctgctgctgccccagcgtcttgacgggagcattggcccctgagcccagagaagctggaagcctgccgaaaacaggagcaaatggcgttttataaattatttttttgaaataaagctctgtgtgcctgggtct

SEQ ID NO: 60641 - DNA, 3087 bp, Homo sapiens
  misc_feature (4)..(4): n is a, c, g, or t
  misc_feature (6)..(6): n is a, c, g, or t
ggangnggcgctcgcggccacgccgccgtcgcgggtacattcctcgctcccggccgaggagcgctcgggctgtctgcggaccctgccgcgtgcaggggtcgcggccggctggagctgggagtgaggcggcggaggagccaggtgaggaggagccaggaaggcagttggtgggaagtccagcttgggtccctgagagctgtgagaaggagatgcggctgctgctggccctgttgggggtcctgctgagtgtgcctgggcctccagtcttgtccctggaggcctctgaggaagtggagcttgagccctgcctggctcccagcctggagcagcaagagcaggagctgacagtagcccttgggcagcctgtgcggctgtgctgtgggcgggctgagcgtggtggccactggtacaaggagggcagtcgcctggcacctgctggccgtgtacggggctggaggggccgcctagagattgccagcttcctacctgaggatgctggccgctacctctgcctggcacgaggctccatgatcgtcctgcagaatctcaccttgattacaggtgactccttgacctccagcaacgatgatgaggaccccaagtcccatagggacctctcgaataggcacagttacccccagcaagcaccctactggacacacccccagcgcatggagaagaaactgcatgcagtacctgcggggaacaccgtcaagttccgctgtccagctgcaggcaaccccacgcccaccatccgctggcttaaggatggacaggcctttcatggggagaaccgcattggaggcattcggctgcgccatcagcactggagtctcgtgatggagagcgtggtgccctcggaccgcggcacatacacctgcctggtagagaacgctgtgggcagcatccgttataactacctgctagatgtgctggagcggtccccgcaccggcccatcctgcaggccgggctcccggccaacaccacagccgtggtgggcagcgacgtggagctgctgtgcaaggtgtacagcgatgcccagccccacatccagtggctgaagcacatcgtcatcaacggcagcagcttcggagccgacggtttcccctatgtgcaagtcctaaagactgcagacatcaatagctcagaggtggaggtcctgtacctgcggaacgtgtcagccgaggacgcaggcgagtacacctgcctcgcaggcaattccatcggcctctcctaccagtctgcctggctcacggtgctgccagaggaggaccccacatggaccgcagcagcgcccgaggccaggtatacggacatcatcctgtacgcgtcgggctccctggccttggctgtgctcctgctgctggccgggctgtatcgagggcaggcgctccacggccggcacccccgcccgcccgccactgtgcagaagctctcccgcttccctctggcccgacagttctccctggagtcaggctcttccggcaagtcaagctcatccctggtacgaggcgtgcgtctctcctccagcggccccgccttgctcgccggcctcgtgagtctagatctacctctcgacccactatgggagttcccccgggacaggctggtgcttgggaagcccctaggcgagggctgctttggccaggtagtacgtgcagaggcctttggcatggaccctgcccggcctgaccaagccagcactgtggccgtcaagatgctcaaagacaacgcctctgacaaggacctggccgacctggtctcggagatggaggtgatgaagctgatcggccgacacaagaacatcatcaacctgcttggtgtctgcacccaggaagggcccctgtacgtgatcgtggagtgcgccgccaagggaaacctgcgggagttcctgcgggcccggcgccccccaggccccgacctcagccccgacggtcctcggagcagtgaggggccgctctccttcccagtcctggtctcctgcgcctaccaggtggcccgaggcatgcagtatctggagtcccggaagtgtatccaccgggacctggctgcccgcaatgtgctggtgactgaggacaatgtgatgaagattgctgactttgggctggcccgcggcgtccaccacattgactactataagaaaaccagcaacggccgcctgcctgtgaagtggatggcgcccgaggccttgtttgaccgggtgtacacacaccagagtgacgtgtggtcttttgggatcctgctatgggagatcttcaccctcgggggctccccgtatcctggcatcccggtggaggagctgttctcgctgctgcgggagggacatcggatggaccgacccccacactgccccccagagctgtacgggctgatgcgtgagtgctggcacgcagcgccctcccagaggcctaccttcaagcagctggtggaggcgctggacaaggtcctgctggccgtctctgaggagtacctcgacctccgcctgaccttcggaccctattccccctctggtggggacgccagcagcacctgctcctccagcgattctgtcttcagccacgaccccctgccattgggatccagctccttccccttcgggtctggggtgcagacatgagcaaggctcaaggctgtgcaggcacataggctggtggccttgggccttggggctcagccacagcctgacacagtgctcgaccttgatagcatggggcccctggcccagagttgctgtgccgtgtccaagggccgtgcccttgcccttggagctgccgtgcctgtgtcctgatggcccaaatgtcagggttctgctcggcttcttggaccttggcgcttagtccccatcccgggtttggctgagcctggctggagagctgctatgctaaacctcctgcctcccaataccagcaggaggttctgggcctctgaaccccctttccccacacctccccctgctgctgctgccccagcgtcttgacgggagcattggcccctgagcccagagaagctggaagcctgccgaaaacaggagcaaatggcgttttataaattatttttttgaaataaagctctgtgtgcctgggtct

SEQ ID NO: 60642 - DNA, 3134 bp, Homo sapiens
  misc_feature (4)..(4): n is a, c, g, or t
  misc_feature (6)..(6): n is a, c, g, or t
ggangnggcgctcgcggccacgccgccgtcgcgggtacattcctcgctcccggccgaggagcgctcgggctgtctgcggaccctgccgcgtgcaggggtcgcggccggctggagctgggagtgaggcggcggaggagccaggtgaggaggagccagcaggtgagcaggaccctgtgctgggcgcggagtcacgcaggctcgaggaaggcagttggtgggaagtccagcttgggtccctgagagctgtgagaaggagatgcggctgctgctggccctgttgggggtcctgctgagtgtgcctgggcctccagtcttgtccctggaggcctctgaggaagtggagcttgagccctgcctggctcccagcctggagcagcaagagcaggagctgacagtagcccttgggcagcctgtgcggctgtgctgtgggcgggctgagcgtggtggccactggtacaaggagggcagtcgcctggcacctgctggccgtgtacggggctggaggggccgcctagagattgccagcttcctacctgaggatgctggccgctacctctgcctggcacgaggctccatgatcgtcctgcagaatctcaccttgattacaggtgactccttgacctccagcaacgatgatgaggaccccaagtcccatagggacctctcgaataggcacagttacccccagcaagcaccctactggacacacccccagcgcatggagaagaaactgcatgcagtacctgcggggaacaccgtcaagttccgctgtccagctgcaggcaaccccacgcccaccatccgctggcttaaggatggacaggcctttcatggggagaaccgcattggaggcattcggctgcgccatcagcactggagtctcgtgatggagagcgtggtgccctcggaccgcggcacatacacctgcctggtagagaacgctgtgggcagcatccgttataactacctgctagatgtgctggagcggtccccgcaccggcccatcctgcaggccgggctcccggccaacaccacagccgtggtgggcagcgacgtggagctgctgtgcaaggtgtacagcgatgcccagccccacatccagtggctgaagcacatcgtcatcaacggcagcagcttcggagccgacggtttcccctatgtgcaagtcctaaagactgcagacatcaatagctcagaggtggaggtcctgtacctgcggaacgtgtcagccgaggacgcaggcgagtacacctgcctcgcaggcaattccatcggcctctcctaccagtctgcctggctcacggtgctgccagaggaggaccccacatggaccgcagcagcgcccgaggccaggtatacggacatcatcctgtacgcgtcgggctccctggccttggctgtgctcctgctgctggccgggctgtatcgagggcaggcgctccacggccggcacccccgcccgcccgccactgtgcagaagctctcccgcttccctctggcccgacagttctccctggagtcaggctcttccggcaagtcaagctcatccctggtacgaggcgtgcgtctctcctccagcggccccgccttgctcgccggcctcgtgagtctagatctacctctcgacccactatgggagttcccccgggacaggctggtgcttgggaagcccctaggcgagggctgctttggccaggtagtacgtgcagaggcctttggcatggaccctgcccggcctgaccaagccagcactgtggccgtcaagatgctcaaagacaacgcctctgacaaggacctggccgacctggtctcggagatggaggtgatgaagctgatcggccgacacaagaacatcatcaacctgcttggtgtctgcacccaggaagggcccctgtacgtgatcgtggagtgcgccgccaagggaaacctgcgggagttcctgcgggcccggcgccccccaggccccgacctcagccccgacggtcctcggagcagtgaggggccgctctccttcccagtcctggtctcctgcgcctaccaggtggcccgaggcatgcagtatctggagtcccggaagtgtatccaccgggacctggctgcccgcaatgtgctggtgactgaggacaatgtgatgaagattgctgactttgggctggcccgcggcgtccaccacattgactactataagaaaaccagcaacggccgcctgcctgtgaagtggatggcgcccgaggccttgtttgaccgggtgtacacacaccagagtgacgtgtggtcttttgggatcctgctatgggagatcttcaccctcgggggctccccgtatcctggcatcccggtggaggagctgttctcgctgctgcgggagggacatcggatggaccgacccccacactgccccccagagctgtacgggctgatgcgtgagtgctggcacgcagcgccctcccagaggcctaccttcaagcagctggtggaggcgctggacaaggtcctgctggccgtctctgaggagtacctcgacctccgcctgaccttcggaccctattccccctctggtggggacgccagcagcacctgctcctccagcgattctgtcttcagccacgaccccctgccattgggatccagctccttccccttcgggtctggggtgcagacatgagcaaggctcaaggctgtgcaggcacataggctggtggccttgggccttggggctcagccacagcctgacacagtgctcgaccttgatagcatggggcccctggcccagagttgctgtgccgtgtccaagggccgtgcccttgcccttggagctgccgtgcctgtgtcctgatggcccaaatgtcagggttctgctcggcttcttggaccttggcgcttagtccccatcccgggtttggctgagcctggctggagagctgctatgctaaacctcctgcctcccaataccagcaggaggttctgggcctctgaaccccctttccccacacctccccctgctgctgctgccccagcgtcttgacgggagcattggcccctgagcccagagaagctggaagcctgccgaaaacaggagcaaatggcgttttataaattatttttttgaaataaagctctgtgtgcctgggtct

SEQ ID NO: 60643 - DNA, 2967 bp, Homo sapiens
  misc_feature (4)..(4): n is a, c, g, or t
  misc_feature (6)..(6): n is a, c, g, or t
ggangnggcgctcgcggccacgccgccgtcgcgggtacattcctcgctcccggccgaggagcgctcgggctgtctgcggaccctgccgcgtgcaggggtcgcggccggctggagctgggagtgaggcggcggaggagccaggtgaggaggagccaggaaggcagttggtgggaagtccagcttgggtccctgagagctgtgagaaggagatgcggctgctgctggccctgttgggggtcctgctgagtgtgcctgggcctccagtcttgtccctggaggcctctgaggaagtggagcttgagccctgcctggctcccagcctggagcagcaagagcaggagctgacagtagcccttgggcagcctgtgcggctgtgctgtgggcgggctgagcgtggtggccactggtacaaggagggcagtcgcctggcacctgctggccgtgtacggggctggaggggccgcctagagattgccagcttcctacctgaggatgctggccgctacctctgcctggcacgaggctccatgatcgtcctgcagaatctcaccttgattacaggtgactccttgacctccagcaacgatgatgaggaccccaagtcccatagggacctctcgaataggcacagttacccccagcaagcaccctactggacacacccccagcgcatggagaagaaactgcatgcagtacctgcggggaacaccgtcaagttccgctgtccagctgcaggcaaccccacgcccaccatccgctggcttaaggatggacaggcctttcatggggagaaccgcattggaggcattcggctgcgccatcagcactggagtctcgtgatggagagcgtggtgccctcggaccgcggcacatacacctgcctggtagagaacgctgtgggcagcatccgttataactacctgctagatgtgctggagcggtccccgcaccggcccatcctgcaggccgggctcccggccaacaccacagccgtggtgggcagcgacgtggagctgctgtgcaaggtgtacagcgatgcccagccccacatccagtggctgaagcacatcgtcatcaacggcagcagcttcggagccgacggtttcccctatgtgcaagtcctaaagactgcagacatcaatagctcagaggtggaggtcctgtacctgcggaacgtgtcagccgaggacgcaggcgagtacacctgcctcgcaggcaattccatcggcctctcctaccagtctgcctggctcacggtgctgccaggtactgggcgcatcccccacctcacatgtgacagcctgactccagcaggcagaaccaagtctcccactttgcagttctccctggagtcaggctcttccggcaagtcaagctcatccctggtacgaggcgtgcgtctctcctccagcggccccgccttgctcgccggcctcgtgagtctagatctacctctcgacccactatgggagttcccccgggacaggctggtgcttgggaagcccctaggcgagggctgctttggccaggtagtacgtgcagaggcctttggcatggaccctgcccggcctgaccaagccagcactgtggccgtcaagatgctcaaagacaacgcctctgacaaggacctggccgacctggtctcggagatggaggtgatgaagctgatcggccgacacaagaacatcatcaacctgcttggtgtctgcacccaggaagggcccctgtacgtgatcgtggagtgcgccgccaagggaaacctgcgggagttcctgcgggcccggcgccccccaggccccgacctcagccccgacggtcctcggagcagtgaggggccgctctccttcccagtcctggtctcctgcgcctaccaggtggcccgaggcatgcagtatctggagtcccggaagtgtatccaccgggacctggctgcccgcaatgtgctggtgactgaggacaatgtgatgaagattgctgactttgggctggcccgcggcgtccaccacattgactactataagaaaaccagcaacggccgcctgcctgtgaagtggatggcgcccgaggccttgtttgaccgggtgtacacacaccagagtgacgtgtggtcttttgggatcctgctatgggagatcttcaccctcgggggctccccgtatcctggcatcccggtggaggagctgttctcgctgctgcgggagggacatcggatggaccgacccccacactgccccccagagctgtacgggctgatgcgtgagtgctggcacgcagcgccctcccagaggcctaccttcaagcagctggtggaggcgctggacaaggtcctgctggccgtctctgaggagtacctcgacctccgcctgaccttcggaccctattccccctctggtggggacgccagcagcacctgctcctccagcgattctgtcttcagccacgaccccctgccattgggatccagctccttccccttcgggtctggggtgcagacatgagcaaggctcaaggctgtgcaggcacataggctggtggccttgggccttggggctcagccacagcctgacacagtgctcgaccttgatagcatggggcccctggcccagagttgctgtgccgtgtccaagggccgtgcccttgcccttggagctgccgtgcctgtgtcctgatggcccaaatgtcagggttctgctcggcttcttggaccttggcgcttagtccccatcccgggtttggctgagcctggctggagagctgctatgctaaacctcctgcctcccaataccagcaggaggttctgggcctctgaaccccctttccccacacctccccctgctgctgctgccccagcgtcttgacgggagcattggcccctgagcccagagaagctggaagcctgccgaaaacaggagcaaatggcgttttataaattatttttttgaaataaagctctgtgtgcctgggtct

SEQ ID NO: 60644 - DNA, 799 bp, Homo sapiens
  misc_feature (4)..(4): n is a, c, g, or t
  misc_feature (6)..(6): n is a, c, g, or t
ggangnggcgctcgcggccacgccgccgtcgcgggtacattcctcgctcccggccgaggagcgctcgggctgtctgcggaccctgccgcgtgcaggggtcgcggccggctggagctgggagtgaggcggcggaggagccaggtgaggaggagccaggaaggcagttggtgggaagtccagcttgggtccctgagagctgtgagaaggagatgcggctgctgctggccctgttgggggtcctgctgagtgtgcctgggcctccagtcttgtccctggaggcctctgaggaagtggagcttgactccttgacctccagcaacgatgatgaggaccccaagtcccatagggacctctcgaataggcacagttacccccagcaagcaccctactggacacacccccagcgcatggagaagaaactgcatgcagtacctgcggggaacaccgtcaagttccgctgtccagctgcaggcaaccccacgcccaccatccgctggcttaaggatggacaggcctttcatggggagaaccgcattggaggcattcggctgcgccatcagcactggagtctcgtgatggagagcgtggtgccctcggaccgcggcacatacacctgcctggtagagaacgctgtgggcagcatccgttataactacctgctagatgtgctggagcggtcccgcacggccatcctgaggcggggtccggcacaccacagcgtggtgggcgcgagtgactgtttcatggtccggatccgcccattcgtggtgagcttgctcaggagagtgagcgggccctt

SEQ ID NO: 60645 - DNA, 736 bp, Homo sapiens
  misc_feature (4)..(4): n is a, c, g, or t
  misc_feature (6)..(6): n is a, c, g, or t
  misc_feature (599)..(599): n is a, c, g, or t
  misc_feature (619)..(619): n is a, c, g, or t
  misc_feature (649)..(649): n is a, c, g, or t
ggangnggcgctcgcggccacgccgccgtcgcgggtacattcctcgctcccggccgaggagcgctcgggctgtctgcggaccctgccgcgtgcaggggtcgcggccggctggagctgggagtgaggcggcggaggagccaggtgaggaggagccaggaaggcagttggtgggaagtccagcttgggtccctgagagctgtgagaaggagatgcggctgctgctggccctgttgggggtcctgctgagtgtgcctgggcctccagtcttgtccctggaggcctctgaggaagtggagcttgagccctgcctggctcccagcctggagcagcaagagcaggagctgacagtagcccttgggcagcctgtgcggctgtgctgtgggcgggctgagcgtggtggccactggtacaaggagggcagtcgcctggcacctgctggccgtgtacggggctggaggggccgcctagagattgccagcttcctacctgaggatgctggccgctacctctgcctggcacgaggctccatgatcgtcctgcagaatctcaccttgattacaggtgagcagcattcgggccgagatgtctcgctccgtggncttagctgtgctcgcgctantctctctttctggcctggaggctatccagngtactccaaagattcaggtttactcacgtcatccagcagagaatggaaagtcaatttcctgagcttgctatgtggtctgggtttcaa

SEQ ID NO: 60646 - DNA, 3246 bp, Homo sapiens
  misc_feature (4)..(4): n is a, c, g, or t
  misc_feature (6)..(6): n is a, c, g, or t
ggangnggcgctcgcggccacgccgccgtcgcgggtacattcctcgctcccggccgaggagcgctcgggctgtctgcggaccctgccgcgtgcaggggtcgcggccggctggagctgggagtgaggcggcggaggagccaggtgaggaggagccagcaggtgagcaggaccctgtgctgggcgcggagtcacgcaggctcgaggaaggcagttggtgggaagtccagcttgggtccctgagagctgtgagaaggagatgcggctgctgctggccctgttgggggtcctgctgagtgtgcctgggcctccagtcttgtccctggaggcctctgaggaagtggagcttgagccctgcctggctcccagcctggagcagcaagagcaggagctgacagtagcccttgggcagcctgtgcggctgtgctgtgggcgggctgagcgtggtggccactggtacaaggagggcagtcgcctggcacctgctggccgtgtacggggctggaggggccgcctagagattgccagcttcctacctgaggatgctggccgctacctctgcctggcacgaggctccatgatcgtcctgcagaatctcaccttgattacaggtgactccttgacctccagcaacgatgatgaggaccccaagtcccatagggacctctcgaataggcacagttacccccagcaaggtcagtaggtctccaaggacttgtgtccccgctgctgctcatctgatcactgagaagaggaggcctgtgtgggaacacacggtcattctaggggccttcccctgccctccagcaccctactggacacacccccagcgcatggagaagaaactgcatgcagtacctgcggggaacaccgtcaagttccgctgtccagctgcaggcaaccccacgcccaccatccgctggcttaaggatggacaggcctttcatggggagaaccgcattggaggcattcggctgcgccatcagcactggagtctcgtgatggagagcgtggtgccctcggaccgcggcacatacacctgcctggtagagaacgctgtgggcagcatccgttataactacctgctagatgtgctggagcggtccccgcaccggcccatcctgcaggccgggctcccggccaacaccacagccgtggtgggcagcgacgtggagctgctgtgcaaggtgtacagcgatgcccagccccacatccagtggctgaagcacatcgtcatcaacggcagcagcttcggagccgacggtttcccctatgtgcaagtcctaaagactgcagacatcaatagctcagaggtggaggtcctgtacctgcggaacgtgtcagccgaggacgcaggcgagtacacctgcctcgcaggcaattccatcggcctctcctaccagtctgcctggctcacggtgctgccagaggaggaccccacatggaccgcagcagcgcccgaggccaggtatacggacatcatcctgtacgcgtcgggctccctggccttggctgtgctcctgctgctggccgggctgtatcgagggcaggcgctccacggccggcacccccgcccgcccgccactgtgcagaagctctcccgcttccctctggcccgacagttctccctggagtcaggctcttccggcaagtcaagctcatccctggtacgaggcgtgcgtctctcctccagcggccccgccttgctcgccggcctcgtgagtctagatctacctctcgacccactatgggagttcccccgggacaggctggtgcttgggaagcccctaggcgagggctgctttggccaggtagtacgtgcagaggcctttggcatggaccctgcccggcctgaccaagccagcactgtggccgtcaagatgctcaaagacaacgcctctgacaaggacctggccgacctggtctcggagatggaggtgatgaagctgatcggccgacacaagaacatcatcaacctgcttggtgtctgcacccaggaagggcccctgtacgtgatcgtggagtgcgccgccaagggaaacctgcgggagttcctgcgggcccggcgccccccaggccccgacctcagccccgacggtcctcggagcagtgaggggccgctctccttcccagtcctggtctcctgcgcctaccaggtggcccgaggcatgcagtatctggagtcccggaagtgtatccaccgggacctggctgcccgcaatgtgctggtgactgaggacaatgtgatgaagattgctgactttgggctggcccgcggcgtccaccacattgactactataagaaaaccagcaacggccgcctgcctgtgaagtggatggcgcccgaggccttgtttgaccgggtgtacacacaccagagtgacgtgtggtcttttgggatcctgctatgggagatcttcaccctcgggggctccccgtatcctggcatcccggtggaggagctgttctcgctgctgcgggagggacatcggatggaccgacccccacactgccccccagagctgtacgggctgatgcgtgagtgctggcacgcagcgccctcccagaggcctaccttcaagcagctggtggaggcgctggacaaggtcctgctggccgtctctgaggagtacctcgacctccgcctgaccttcggaccctattccccctctggtggggacgccagcagcacctgctcctccagcgattctgtcttcagccacgaccccctgccattgggatccagctccttccccttcgggtctggggtgcagacatgagcaaggctcaaggctgtgcaggcacataggctggtggccttgggccttggggctcagccacagcctgacacagtgctcgaccttgatagcatggggcccctggcccagagttgctgtgccgtgtccaagggccgtgcccttgcccttggagctgccgtgcctgtgtcctgatggcccaaatgtcagggttctgctcggcttcttggaccttggcgcttagtccccatcccgggtttggctgagcctggctggagagctgctatgctaaacctcctgcctcccaataccagcaggaggttctgggcctctgaaccccctttccccacacctccccctgctgctgctgccccagcgtcttgacgggagcattggcccctgagcccagagaagctggaagcctgccgaaaacaggagcaaatggcgttttataaattatttttttgaaataaagctctgtgtgcctgggtct

SEQ ID NO: 60647 - DNA, 3540 bp, Homo sapiens
  misc_feature (4)..(4): n is a, c, g, or t
  misc_feature (6)..(6): n is a, c, g, or t
ggangnggcgctcgcggccacgccgccgtcgcgggtacattcctcgctcccggccgaggagcgctcgggctgtctgcggaccctgccgcgtgcaggggtcgcggccggctggagctgggagtgaggcggcggaggagccaggtgaggaggagccaggaaggcagttggtgggaagtccagcttgggtccctgagagctgtgagaaggagatgcggctgctgctggccctgttgggggtcctgctgagtgtgcctgggcctccagtcttgtccctggaggcctctgaggaagtggagcttggtatggcttctgaggtgggagagggtggcaggggtgggaagagtgggcaccaggagggggctgctgggctgagcaaagctggaaaggatccttgcccaggccctgagaaggtggcggcagggcagggctcaaccactgagactcagtcagtgcctggcttccagcaagcattcatctatcactgtgtctgcgagagaggactggccttgcagggcgcagggccctaagctgggctgcagagctggtgagccctgcctggctcccagcctggagcagcaagagcaggagctgacagtagcccttgggcagcctgtgcggctgtgctgtgggcgggctgagcgtggtggccactggtacaaggagggcagtcgcctggcacctgctggccgtgtacggggctggaggggccgcctagagattgccagcttcctacctgaggatgctggccgctacctctgcctggcacgaggctccatgatcgtcctgcagaatctcaccttgattacaggtggtggtaagagactctagcagggagtgaagggatgcctggggagacagacctgcccctcttggaccttagatgcttccctctgtccctgatgtagactccttgacctccagcaacgatgatgaggaccccaagtcccatagggacctctcgaataggcacagttacccccagcaaggtcagtaggtctccaaggacttgtgtccccgctgctgctcatctgatcactgagaagaggaggcctgtgtgggaacacacggtcattctaggggccttcccctgccctccagcaccctactggacacacccccagcgcatggagaagaaactgcatgcagtacctgcggggaacaccgtcaagttccgctgtccagctgcaggcaaccccacgcccaccatccgctggcttaaggatggacaggcctttcatggggagaaccgcattggaggcattcggctgcgccatcagcactggagtctcgtgatggagagcgtggtgccctcggaccgcggcacatacacctgcctggtagagaacgctgtgggcagcatccgttataactacctgctagatgtgctggagcggtccccgcaccggcccatcctgcaggccgggctcccggccaacaccacagccgtggtgggcagcgacgtggagctgctgtgcaaggtgtacagcgatgcccagccccacatccagtggctgaagcacatcgtcatcaacggcagcagcttcggagccgacggtttcccctatgtgcaagtcctaaagactgcagacatcaatagctcagaggtggaggtcctgtacctgcggaacgtgtcagccgaggacgcaggcgagtacacctgcctcgcaggcaattccatcggcctctcctaccagtctgcctggctcacggtgctgccagaggaggaccccacatggaccgcagcagcgcccgaggccaggtatacggacatcatcctgtacgcgtcgggctccctggccttggctgtgctcctgctgctggccgggctgtatcgagggcaggcgctccacggccggcacccccgcccgcccgccactgtgcagaagctctcccgcttccctctggcccgacagttctccctggagtcaggctcttccggcaagtcaagctcatccctggtacgaggcgtgcgtctctcctccagcggccccgccttgctcgccggcctcgtgagtctagatctacctctcgacccactatgggagttcccccgggacaggctggtgcttgggaagcccctaggcgagggctgctttggccaggtagtacgtgcagaggcctttggcatggaccctgcccggcctgaccaagccagcactgtggccgtcaagatgctcaaagacaacgcctctgacaaggacctggccgacctggtctcggagatggaggtgatgaagctgatcggccgacacaagaacatcatcaacctgcttggtgtctgcacccaggaagggcccctgtacgtgatcgtggagtgcgccgccaagggaaacctgcgggagttcctgcgggcccggcgccccccaggccccgacctcagccccgacggtcctcggagcagtgaggggccgctctccttcccagtcctggtctcctgcgcctaccaggtggcccgaggcatgcagtatctggagtcccggaagtgtatccaccgggacctggctgcccgcaatgtgctggtgactgaggacaatgtgatgaagattgctgactttgggctggcccgcggcgtccaccacattgactactataagaaaaccagcaacggccgcctgcctgtgaagtggatggcgcccgaggccttgtttgaccgggtgtacacacaccagagtgacgtgtggtcttttgggatcctgctatgggagatcttcaccctcgggggctccccgtatcctggcatcccggtggaggagctgttctcgctgctgcgggagggacatcggatggaccgacccccacactgccccccagagctgtacgggctgatgcgtgagtgctggcacgcagcgccctcccagaggcctaccttcaagcagctggtggaggcgctggacaaggtcctgctggccgtctctgaggagtacctcgacctccgcctgaccttcggaccctattccccctctggtggggacgccagcagcacctgctcctccagcgattctgtcttcagccacgaccccctgccattgggatccagctccttccccttcgggtctggggtgcagacatgagcaaggctcaaggctgtgcaggcacataggctggtggccttgggccttggggctcagccacagcctgacacagtgctcgaccttgatagcatggggcccctggcccagagttgctgtgccgtgtccaagggccgtgcccttgcccttggagctgccgtgcctgtgtcctgatggcccaaatgtcagggttctgctcggcttcttggaccttggcgcttagtccccatcccgggtttggctgagcctggctggagagctgctatgctaaacctcctgcctcccaataccagcaggaggttctgggcctctgaaccccctttccccacacctccccctgctgctgctgccccagcgtcttgacgggagcattggcccctgagcccagagaagctggaagcctgccgaaaacaggagcaaatggcgttttataaattatttttttgaaataaagctctgtgtgcctgggtct

SEQ ID NO: 60648 - DNA, 2964 bp, Homo sapiens
  misc_feature (4)..(4): n is a, c, g, or t
  misc_feature (6)..(6): n is a, c, g, or t
ggangnggcgctcgcggccacgccgccgtcgcgggtacattcctcgctcccggccgaggagcgctcgggctgtctgcggaccctgccgcgtgcaggggtcgcggccggctggagctgggagtgaggcggcggaggagccaggtgaggaggagccagcaggtgagcaggaccctgtgctgggcgcggagtcacgcaggctcgaggaaggcagttggtgggaagtccagcttgggtccctgagagctgtgagaaggagatgcggctgctgctggccctgttgggggtcctgctgagtgtgcctgggcctccagtcttgtccctggaggcctctgaggaagtggagcttggtggtaagagactctagcagggagtgaagggatgcctggggagacagacctgcccctcttggaccttagatgcttccctctgtccctgatgtagactccttgacctccagcaacgatgatgaggaccccaagtcccatagggacctctcgaataggcacagttacccccagcaagcaccctactggacacacccccagcgcatggagaagaaactgcatgcagtacctgcggggaacaccgtcaagttccgctgtccagctgcaggcaaccccacgcccaccatccgctggcttaaggatggacaggcctttcatggggagaaccgcattggaggcattcggctgcgccatcagcactggagtctcgtgatggagagcgtggtgccctcggaccgcggcacatacacctgcctggtagagaacgctgtgggcagcatccgttataactacctgctagatgtgctggagcggtccccgcaccggcccatcctgcaggccgggctcccggccaacaccacagccgtggtgggcagcgacgtggagctgctgtgcaaggtgtacagcgatgcccagccccacatccagtggctgaagcacatcgtcatcaacggcagcagcttcggagccgacggtttcccctatgtgcaagtcctaaagactgcagacatcaatagctcagaggtggaggtcctgtacctgcggaacgtgtcagccgaggacgcaggcgagtacacctgcctcgcaggcaattccatcggcctctcctaccagtctgcctggctcacggtgctgccagaggaggaccccacatggaccgcagcagcgcccgaggccaggtatacggacatcatcctgtacgcgtcgggctccctggccttggctgtgctcctgctgctggccgggctgtatcgagggcaggcgctccacggccggcacccccgcccgcccgccactgtgcagaagctctcccgcttccctctggcccgacagttctccctggagtcaggctcttccggcaagtcaagctcatccctggtacgaggcgtgcgtctctcctccagcggccccgccttgctcgccggcctcgtgagtctagatctacctctcgacccactatgggagttcccccgggacaggctggtgcttgggaagcccctaggcgagggctgctttggccaggtagtacgtgcagaggcctttggcatggaccctgcccggcctgaccaagccagcactgtggccgtcaagatgctcaaagacaacgcctctgacaaggacctggccgacctggtctcggagatggaggtgatgaagctgatcggccgacacaagaacatcatcaacctgcttggtgtctgcacccaggaagggcccctgtacgtgatcgtggagtgcgccgccaagggaaacctgcgggagttcctgcgggcccggcgccccccaggccccgacctcagccccgacggtcctcggagcagtgaggggccgctctccttcccagtcctggtctcctgcgcctaccaggtggcccgaggcatgcagtatctggagtcccggaagtgtatccaccgggacctggctgcccgcaatgtgctggtgactgaggacaatgtgatgaagattgctgactttgggctggcccgcggcgtccaccacattgactactataagaaaaccagcaacggccgcctgcctgtgaagtggatggcgcccgaggccttgtttgaccgggtgtacacacaccagagtgacgtgtggtcttttgggatcctgctatgggagatcttcaccctcgggggctccccgtatcctggcatcccggtggaggagctgttctcgctgctgcgggagggacatcggatggaccgacccccacactgccccccagagctgtacgggctgatgcgtgagtgctggcacgcagcgccctcccagaggcctaccttcaagcagctggtggaggcgctggacaaggtcctgctggccgtctctgaggagtacctcgacctccgcctgaccttcggaccctattccccctctggtggggacgccagcagcacctgctcctccagcgattctgtcttcagccacgaccccctgccattgggatccagctccttccccttcgggtctggggtgcagacatgagcaaggctcaaggctgtgcaggcacataggctggtggccttgggccttggggctcagccacagcctgacacagtgctcgaccttgatagcatggggcccctggcccagagttgctgtgccgtgtccaagggccgtgcccttgcccttggagctgccgtgcctgtgtcctgatggcccaaatgtcagggttctgctcggcttcttggaccttggcgcttagtccccatcccgggtttggctgagcctggctggagagctgctatgctaaacctcctgcctcccaataccagcaggaggttctgggcctctgaaccccctttccccacacctccccctgctgctgctgccccagcgtcttgacgggagcattggcccctgagcccagagaagctggaagcctgccgaaaacaggagcaaatggcgttttataaattatttttttgaaataaagctctgtgtgcctgggtct

SEQ ID NO: 60649 - DNA, 3092 bp, Homo sapiens
  misc_feature (4)..(4): n is a, c, g, or t
  misc_feature (6)..(6): n is a, c, g, or t
ggangnggcgctcgcggccacgccgccgtcgcgggtacattcctcgctcccggccgaggagcgctcgggctgtctgcggaccctgccgcgtgcaggggtcgcggccggctggagctgggagtgaggcggcggaggagccaggtgaggaggagccagcaggtgagcaggaccctgtgctgggcgcggagtcacgcaggctcgaggaaggcagttggtgggaagtccagcttgggtccctgagagctgtgagaaggagatgcggctgctgctggccctgttgggggtcctgctgagtgtgcctgggcctccagtcttgtccctggaggcctctgaggaagtggagcttgagccctgcctggctcccagcctggagcagcaagagcaggagctgacagtagcccttgggcagcctgtgcggctgtgctgtgggcgggctgagcgtggtggccactggtacaaggagggcagtcgcctggcacctgctggccgtgtacggggctggaggggccgcctagagattgccagcttcctacctgaggatgctggccgctacctctgcctggcacgaggctccatgatcgtcctgcagaatctcaccttgattacaggtgactccttgacctccagcaacgatgatgaggaccccaagtcccatagggacctctcgaataggcacagttacccccagcaagcaccctactggacacacccccagcgcatggagaagaaactgcatgcagtacctgcggggaacaccgtcaagttccgctgtccagctgcaggcaaccccacgcccaccatccgctggcttaaggatggacaggcctttcatggggagaaccgcattggaggcattcggctgcgccatcagcactggagtctcgtgatggagagcgtggtgccctcggaccgcggcacatacacctgcctggtagagaacgctgtgggcagcatccgttataactacctgctagatgtgctggagcggtccccgcaccggcccatcctgcaggccgggctcccggccaacaccacagccgtggtgggcagcgacgtggagctgctgtgcaaggtgtacagcgatgcccagccccacatccagtggctgaagcacatcgtcatcaacggcagcagcttcggagccgacggtttcccctatgtgcaagtcctaaagactgcagacatcaatagctcagaggtggaggtcctgtacctgcggaacgtgtcagccgaggacgcaggcgagtacacctgcctcgcaggcaattccatcggcctctcctaccagtctgcctggctcacggtgctgccagaggaggaccccacatggaccgcagcagcgcccgaggccaggtatacggacatcatcctgtacgcgtcgggctccctggccttggctgtgctcctgctgctggccgggctgtatcgagggcaggcgctccacggccggcacccccgcccgcccgccactgtgcagaagctctcccgcttccctctggcccgacagttctccctggagtcaggctcttccggcaagtcaagctcatccctggtacgaggcgtgcgtctctcctccagcggccccgccttgctcgccggcctcgtgagtctagatctacctctcgacccactatgggagttcccccgggacaggctggtgcttgggaagcccctaggcgagggctgctttggccaggtagtacgtgcagaggcctttggcatggaccctgcccggcctgaccaagccagcactgtggccgtcaagatgctcaaagacaacgcctctgacaaggacctggccgacctggtctcggagatggaggtgatgaagctgatcggccgacacaagaacatcatcaacctgcttggtgtctgcacccaggaagggcccctgtacgtgatcgtggagtgcgccgccaagggaaacctgcgggagttcctgcgggcccggcgccccccaggccccgacctcagccccgacggtcctcggagcagtgaggggccgctctccttcccagtcctggtctcctgcgcctaccaggtggcccgaggcatgcagtatctggagtcccggaagtgtatccaccgggacctggctgcccgcaatgtgctggtgactgaggacaatgtgatgaagattgctgactttgggctggcccgcggcgtccaccacattgactactataagaaaaccagcaacgaccgggtgtacacacaccagagtgacgtgtggtcttttgggatcctgctatgggagatcttcaccctcgggggctccccgtatcctggcatcccggtggaggagctgttctcgctgctgcgggagggacatcggatggaccgacccccacactgccccccagagctgtacgggctgatgcgtgagtgctggcacgcagcgccctcccagaggcctaccttcaagcagctggtggaggcgctggacaaggtcctgctggccgtctctgaggagtacctcgacctccgcctgaccttcggaccctattccccctctggtggggacgccagcagcacctgctcctccagcgattctgtcttcagccacgaccccctgccattgggatccagctccttccccttcgggtctggggtgcagacatgagcaaggctcaaggctgtgcaggcacataggctggtggccttgggccttggggctcagccacagcctgacacagtgctcgaccttgatagcatggggcccctggcccagagttgctgtgccgtgtccaagggccgtgcccttgcccttggagctgccgtgcctgtgtcctgatggcccaaatgtcagggttctgctcggcttcttggaccttggcgcttagtccccatcccgggtttggctgagcctggctggagagctgctatgctaaacctcctgcctcccaataccagcaggaggttctgggcctctgaaccccctttccccacacctccccctgctgctgctgccccagcgtcttgacgggagcattggcccctgagcccagagaagctggaagcctgccgaaaacaggagcaaatggcgttttataaattatttttttgaaataaagctctgtgtgcctgggtct

SEQ ID NO: 60650 - DNA, 2922 bp, Homo sapiens
  misc_feature (4)..(4): n is a, c, g, or t
  misc_feature (6)..(6): n is a, c, g, or t
  misc_feature (2832)..(2832): n is a, c, g, or t
  misc_feature (2836)..(2836): n is a, c, g, or t
ggangnggcgctcgcggccacgccgccgtcgcgggtacattcctcgctcccggccgaggagcgctcgggctgtctgcggaccctgccgcgtgcaggggtcgcggccggctggagctgggagtgaggcggcggaggagccaggtgaggaggagccagcaggtgagcaggaccctgtgctgggcgcggagtcacgcaggctcgaggaaggcagttggtgggaagtccagcttgggtccctgagagctgtgagaaggagatgcggctgctgctggccctgttgggggtcctgctgagtgtgcctgggcctccagtcttgtccctggaggcctctgaggaagtggagcttgagccctgcctggctcccagcctggagcagcaagagcaggagctgacagtagcccttgggcagcctgtgcggctgtgctgtgggcgggctgagcgtggtggccactggtacaaggagggcagtcgcctggcacctgctggccgtgtacggggctggaggggccgcctagagattgccagcttcctacctgaggatgctggccgctacctctgcctggcacgaggctccatgatcgtcctgcagaatctcaccttgattacaggtgactccttgacctccagcaacgatgatgaggaccccaagtcccatagggacctctcgaataggcacagttacccccagcaagcaccctactggacacacccccagcgcatggagaagaaactgcatgcagtacctgcggggaacaccgtcaagttccgctgtccagctgcaggcaaccccacgcccaccatccgctggcttaaggatggacaggcctttcatggggagaaccgcattggaggcattcggctgcgccatcagcactggagtctcgtgatggagagcgtggtgccctcggaccgcggcacatacacctgcctggtagagaacgctgtgggcagcatccgttataactacctgctagatgtgctggagcggtccccgcaccggcccatcctgcaggccgggctcccggccaacaccacagccgtggtgggcagcgacgtggagctgctgtgcaaggtgtacagcgatgcccagccccacatccagtggctgaagcacatcgtcatcaacggcagcagcttcggagccgacggtttcccctatgtgcaagtcctaaagactgcagacatcaatagctcagaggtggaggtcctgtacctgcggaacgtgtcagccgaggacgcaggcgagtacacctgcctcgcaggcaattccatcggcctctcctaccagtctgcctggctcacggtgctgccaggtactgggcgcatcccccacctcacatgtgacagcctgactccagcaggcagaaccaagtctcccactttgcagttctccctggagtcaggctcttccggcaagtcaagctcatccctggtacgaggcgtgcgtctctcctccagcggccccgccttgctcgccggcctcgtgagtctagatctacctctcgacccactatgggagttcccccgggacaggctggtgcttgggaagcccctaggcgagggctgctttggccaggtagtacgtgcagaggcctttggcatggaccctgcccggcctgaccaagccagcactgtggccgtcaagatgctcaaagacaacgcctctgacaaggacctggccgacctggtctcggagatggaggtgatgaagctgatcggccgacacaagaacatcatcaacctgcttggtgtctgcacccaggaagggcccctgtacgtgatcgtggagtgcgccgccaagggaaacctgcgggagttcctgcgggcccggcgccccccaggccccgacctcagccccgacggtcctcggagcagtgaggggccgctctccttcccagtcctggtctcctgcgcctaccaggtggcccgaggcatgcagtatctggagtcccggaagtgtatccaccgggacctggctgcccgcaatgtgctggtgactgaggacaatgtgatgaagattgctgactttgggctggcccgcggcgtccaccacattgactactataagaaaaccagcaacggccgcctgcctgtgaagtggatggcgcccgaggccttgtttgaccgggtgtacacacaccagagtgacgtgtggtcttttgggatcctgctatgggagatcttcaccctcgggggctccccgtatcctggcatcccggtggaggagctgttctcgctgctgcgggagggacatcggatggaccgacccccacactgccccccagagctgtacgggctgatgcgtgagtgctggcacgcagcgccctcccagaggcctaccttcaagcagctggtggaggcgctggacaaggtcctgctggccgtctctgaggagtacctcgacctccgcctgaccttcggaccctattccccctctggtggggacgccagcagcacctgctcctccagcgattctgtcttcagccacgaccccctgccattgggatccagctccttccccttcgggtctggggtgcagacatgagcaaggctcaaggctgtgcaggcacataggctggtggccttgggccttggggctcagccacagcctgacacagtgctcgaccttgatagcatggggcccctggcccagagttgctgtgccgtgtccaagggccgtgcccttgcccttggagctgccgtgcctgtgtcctgatggcccaaatgtcagggttctgctcggcttcttggaccttggcgcttagtccccatcccgggtttggctgagcctggctggagagctgctatgctaaacctcctgcctcccatacncggngttggcttaccctttccccccgggttgggccttttggaggggcccccaaagcgaaagaggggtttttgaaaagcgggtcccggggc

SEQ ID NO: 60651 - DNA, 1836 bp, Homo sapiens
taggctaggtacgaggctggtgtgaatcggccgacgcagcagcgcccgaggccaggtatacggacatcatcctgtacgcgtcgggctccctggccttggctgtgctcctgctgctggccgggctgtatcgagggcaggcgctccacggccggcacccccgcccgcccgccactgtgcagaagctctcccgcttccctctggcccgacagttctccctggagtcaggctcttccggcaagtcaagctcatccctggtacgaggcgtgcgtctctcctccagcggccccgccttgctcgccggcctcgtgagtctagatctacctctcgacccactatgggagttcccccgggacaggctggtgcttgggaagcccctaggcgagggctgctttggccaggtagtacgtgcagaggcctttggcatggaccctgcccggcctgaccaagccagcactgtggccgtcaagatgctcaaagacaacgcctctgacaaggacctggccgacctggtctcggagatggaggtgatgaagctgatcggccgacacaagaacatcatcaacctgcttggtgtctgcacccaggaagggcccctgtacgtgatcgtggagtgcgccgccaagggaaacctgcgggagttcctgcgggcccggcgccccccaggccccgacctcagccccgacggtcctcggagcagtgaggggccgctctccttcccagtcctggtctcctgcgcctaccaggtggcccgaggcatgcagtatctggagtcccggaagtgtatccaccgggacctggctgcccgcaatgtgctggtgactgaggacaatgtgatgaagattgctgactttgggctggcccgcggcgtccaccacattgactactataagaaaaccagcaacggccgcctgcctgtgaagtggatggcgcccgaggccttgtttgaccgggtgtacacacaccagagtgacgtgtggtcttttgggatcctgctatgggagatcttcaccctcgggggctccccgtatcctggcatcccggtggaggagctgttctcgctgctgcgggagggacatcggatggaccgacccccacactgccccccagagctgtacgggctgatgcgtgagtgctggcacgcagcgccctcccagaggcctaccttcaagcagctggtggaggcgctggacaaggtcctgctggccgtctctgaggagtacctcgacctccgcctgaccttcggaccctattccccctctggtggggacgccagcagcacctgctcctccagcgattctgtcttcagccacgaccccctgccattgggatccagctccttccccttcgggtctggggtgcagacatgagcaaggctcaaggctgtgcaggcacataggctggtggccttgggccttggggctcagccacagcctgacacagtgctcgaccttgatagcatggggcccctggcccagagttgctgtgccgtgtccaagggccgtgcccttgcccttggagctgccgtgcctgtgtcctgatggcccaaatgtcagggttctgctcggcttcttggaccttggcgcttagtccccatcccgggtttggctgagcctggctggagagctgctatgctaaacctcctgcctcccaataccagcaggaggttctgggcctctgaaccccctttccccacacctccccctgctgctgctgccccagcgtcttgacgggagcattggcccctgagcccagagaagctggaagcctgccgaaaacaggagcaaatggcgttttataaattatttttttgaaataaagctctgtgtgcctgggtct

SEQ ID NO: 60652 - DNA, 1603 bp, Homo sapiens
taggctaggtacgaggctggtgtgaatcggccgagtctctcctccagcggccccgccttgctcgccggcctcgtgagtctagatctacctctcgacccactatgggagttcccccgggacaggctggtgcttgggaagcccctaggcgagggctgctttggccaggtagtacgtgcagaggcctttggcatggaccctgcccggcctgaccaagccagcactgtggccgtcaagatgctcaaagacaacgcctctgacaaggacctggccgacctggtctcggagatggaggtgatgaagctgatcggccgacacaagaacatcatcaacctgcttggtgtctgcacccaggaagggcccctgtacgtgatcgtggagtgcgccgccaagggaaacctgcgggagttcctgcgggcccggcgccccccaggccccgacctcagccccgacggtcctcggagcagtgaggggccgctctccttcccagtcctggtctcctgcgcctaccaggtggcccgaggcatgcagtatctggagtcccggaagtgtatccaccgggacctggctgcccgcaatgtgctggtgactgaggacaatgtgatgaagattgctgactttgggctggcccgcggcgtccaccacattgactactataagaaaaccagcaacggccgcctgcctgtgaagtggatggcgcccgaggccttgtttgaccgggtgtacacacaccagagtgacgtgtggtcttttgggatcctgctatgggagatcttcaccctcgggggctccccgtatcctggcatcccggtggaggagctgttctcgctgctgcgggagggacatcggatggaccgacccccacactgccccccagagctgtacgggctgatgcgtgagtgctggcacgcagcgccctcccagaggcctaccttcaagcagctggtggaggcgctggacaaggtcctgctggccgtctctgaggagtacctcgacctccgcctgaccttcggaccctattccccctctggtggggacgccagcagcacctgctcctccagcgattctgtcttcagccacgaccccctgccattgggatccagctccttccccttcgggtctggggtgcagacatgagcaaggctcaaggctgtgcaggcacataggctggtggccttgggccttggggctcagccacagcctgacacagtgctcgaccttgatagcatggggcccctggcccagagttgctgtgccgtgtccaagggccgtgcccttgcccttggagctgccgtgcctgtgtcctgatggcccaaatgtcagggttctgctcggcttcttggaccttggcgcttagtccccatcccgggtttggctgagcctggctggagagctgctatgctaaacctcctgcctcccaataccagcaggaggttctgggcctctgaaccccctttccccacacctccccctgctgctgctgccccagcgtcttgacgggagcattggcccctgagcccagagaagctggaagcctgccgaaaacaggagcaaatggcgttttataaattatttttttgaaataaagctctgtgtgcctgggtct

SEQ ID NO: 60653 - DNA, 2685 bp, Homo sapiens
  misc_feature (4)..(4): n is a, c, g, or t
  misc_feature (6)..(6): n is a, c, g, or t
ggangnggcgctcgcggccacgccgccgtcgcgggtacattcctcgctcccggccgaggagcgctcgggctgtctgcggaccctgccgcgtgcaggggtcgcggccggctggagctgggagtgaggcggcggaggagccaggtgaggaggagccagcaggtgagcaggaccctgtgctgggcgcggagtcacgcaggctcgaggaaggcagttggtgggaagtccagcttgggtccctgagagctgtgagaaggagatgcggctgctgctggccctgttgggggtcctgctgagtgtgcctgggcctccagtcttgtccctggaggcctctgaggaagtggagcttgagccctgcctggctcccagcctggagcagcaagagcaggagctgacagtagcccttgggcagcctgtgcggctgtgctgtgggcgggctgagcgtggtggccactggtacaaggagggcagtcgcctggcacctgctggccgtgtacggggctggaggggccgcctagagattgccagcttcctacctgaggatgctggccgctacctctgcctggcacgaggctccatgatcgtcctgcagaatctcaccttgattacaggtgactccttgacctccagcaacgatgatgaggaccccaagtcccatagggacctctcgaataggcacagttacccccagcaagcaccctactggacacacccccagcgcatggagaagaaactgcatgcagtacctgcggggaacaccgtcaagttccgctgtccagctgcaggcaaccccacgcccaccatccgctggcttaaggatggacaggcctttcatggggagaaccgcattggaggcattcggctgcgccatcagcactggagtctcgtgatggagagcgtggtgccctcggaccgcggcacatacacctgcctggtagagaacgctgtgggcagcatccgttataactacctgctagatgtgctggagcggtccccgcaccggcccatcctgcaggccgggctcccggccaacaccacagccgtggtgggcagcgacgtggagctgctgtgcaaggtgtacagcgatgcccagccccacatccagtggctgaagcacatcgtcatcaacggcagcagcttcggagccgacggtttcccctatgtgcaagtcctaaagactgcagacatcaatagctcagaggtggaggtcctgtacctgcggaacgtgtcagccgaggacgcaggcgagtacacctgcctcgcaggcaattccatcggcctctcctaccagtctgcctggctcacggtgctgccagaggaggaccccacatggaccgcagcagcgcccgaggccaggtatacggacatcatcctgtacgcgtcgggctccctggccttggctgtgctcctgctgctggccgggctgtatcgagggcaggcgctccacggccggcacccccgcccgcccgccactgtgcagaagctctcccgcttccctctggcccgacagttctccctggagtcaggctcttccggcaagtcaagctcatccctggtacgaggcgtgcgtctctcctccagcggccccgccttgctcgccggcctcgtgagtctagatctacctctcgacccactatgggagttcccccgggacaggctggtgcttgggaagcccctaggcgagggctgctttggccaggtagtacgtgcagaggcctttggcatggaccctgcccggcctgaccaagccagcactgtggccgtcaagatgctcaaagacaacgcctctgacaaggacctggccgacctggtctcggagatggaggtgatgaagctgatcggccgacacaagaacatcatcaacctgcttggtgtctgcacccaggaagggcccctgtacgtgatcgtggagtgcgccgccaagggaaacctgcgggagttcctgcgggcccggcgccccccaggccccgacctcagccccgacggtcctcggagcagtgaggggccgctctccttcccagtcctggtctcctgcgcctaccaggtggcccgaggcatgcagtatctggagtcccggaagtgtatccaccgggacctggctgcccgcaatgtgctggtgactgaggacaatgtgatgaagattgctgactttgggctggcccgcggcgtccaccacattgactactataagaaaaccagcaacggccgcctgcctgtgaagtggatggcgcccgaggccttgtttgaccgggtgtacacacaccagagtgacgtgtggtcttttgggatcctgctatgggagatcttcaccctcgggggctccccgtatcctggcatcccggtggaggagctgttctcgctgctgcgggagggacatcggatggaccgacccccacactgccccccagagctgtacgggctgatgcgtgagtgctggcacgcagcgccctcccagaggcctaccttcaagcagctggtggaggcgctggacaaggtcctgctggccgtctctgaggagtacctcgacctccgcctgaccttcggaccctattccccctctggtggggacgccagcagcacctgctcctccagcgattctgtcttcagccacgaccccctgccgaaaacaggagcaaatggcgttttataaattatttttttgaaataaagctctgtgtgcctgggtct

SEQ ID NO: 60654 - DNA, 2963 bp, Homo sapiens
  misc_feature (4)..(4): n is a, c, g, or t
  misc_feature (6)..(6): n is a, c, g, or t
ggangnggcgctcgcggccacgccgccgtcgcgggtacattcctcgctcccggccgaggagcgctcgggctgtctgcggaccctgccgcgtgcaggggtcgcggccggctggagctgggagtgaggcggcggaggagccaggtgaggaggagccagcaggtgagcaggaccctgtgctgggcgcggagtcacgcaggctcgaggaaggcagttggtgggaagtccagcttgggtccctgagagctgtgagaaggagatgcggctgctgctggccctgttgggggtcctgctgagtgtgcctgggcctccagtcttgtccctggaggcctctgaggaagtggagcttgagccctgcctggctcccagcctggagcagcaagagcaggagctgacagtagcccttgggcagcctgtgcggctgtgctgtgggcgggctgagcgtggtggccactggtacaaggagggcagtcgcctggcacctgctggccgtgtacggggctggaggggccgcctagagattgccagcttcctacctgaggatgctggccgctacctctgcctggcacgaggctccatgatcgtcctgcagaatctcaccttgattacaggtgactccttgacctccagcaacgatgatgaggaccccaagtcccatagggacctctcgaataggcacagttacccccagcaagcaccctactggacacacccccagcgcatggagaagaaactgcatgcagtacctgcggggaacaccgtcaagttccgctgtccagctgcaggcaaccccacgcccaccatccgctggcttaaggatggacaggcctttcatggggagaaccgcattggaggcattcggctgcgccatcagcactggagtctcgtgatggagagcgtggtgccctcggaccgcggcacatacacctgcctggtagagaacgctgtgggcagcatccgttataactacctgctagatgtgctggagcggtccccgcaccggcccatcctgcaggccgggctcccggccaacaccacagccgtggtgggcagcgacgtggagctgctgtgcaaggtgtacagcgatgcccagccccacatccagtggctgaagcacatcgtcatcaacggcagcagcttcggagccgacggtttcccctatgtgcaagtcctaaagactgcagacatcaatagctcagaggtggaggtcctgtacctgcggaacgtgtcagccgaggacgcaggcgagtacacctgcctcgcaggcaattccatcggcctctcctaccagtctgcctggctcacggtgctgccagaggaggaccccacatggaccgcagcagcgcccgaggccaggtatacggacatcatcctgtacgcgtcgggctccctggccttggctgtgctcctgctgctggccgggctgtatcgagggcaggcgctccacggccggcacccccgcccgcccgccactgtgcagaagctctcccgcttccctctggcccgacagttctccctggagtcaggctcttccggcaagtcaagctcatccctggtacgaggcgtgcgtctctcctccagcggccccgccttgctcgccggcctcgtgagtctagatctacctctcgacccactatgggagttcccccgggacaggctggtgcttgggaagcccctaggcgagggctgctttggccaggtagtacgtgcagaggcctttggcatggaccctgcccggcctgaccaagccagcactgtggccgtcaagatgctcaaagacaacgcctctgacaaggacctggccgacctggtctcggagatggaggtgatgaagctgatcggccgacacaagaacatcatcaacctgcttggtgtctgcacccaggaagggcccctgtacgtgatcgtggagtgcgccgccaagggaaacctgcgggagttcctgcgggcccggcgccccccaggccccgacctcagccccgacggtcctcggagcagtgaggggccgctctccttcccagtcctggtctcctgcgcctaccaggtggcccgaggcatgcagtatctggagtcccggaagtgtatccaccgggacctggctgcccgcaatgtgctggtgactgaggacaatgtgatgaagattgctgactttgggctggcccgcggcgtccaccacattgactactataagaaaaccagcaacggccgcctgcctgtgaagtggatggcgcccgaggccttgtttgaccgggtgtacacacaccagagtgacgtgtggtcttttgggatcctgctatgggagatcttcaccctcgggggctccccgtatcctggcatcccggtggaggagctgttctcgctgctgcgggagggacatcggatggaccgacccccacactgccccccagagctgtacgggctgatgcgtgagtgctggcacgcagcgccctcccagaggcctaccttcaagcagctggtggaggcgctggacaaggtcctgctggccgtctctgaggaggcctcaggctgggacaggactgcccaaccaggacagccttcatggaggccatcgggattgcccccgtctgcccccagggagtggtggctgaaaatgcatatgcggtcagaggggtcagacagagggattggaggctggggcctccttggaagactgagcgtcagctcatgattgtttatcctcactctgggctcctcccagctctcagcatagcctctccagctgacggtatcccacacagaactcatcttacccccagaactgtacctcctccagggcaggaaccagggagtcacctgactacttccctcaagaaccctgttccaggccaggtgcggcagctcacccctgtaatcccagcactttgggagaccgaggcgggcggatcacctgaggtcaagaattcaagaccattctggacaacatggcaaaaccctgtctctactaa

SEQ ID NO: 60655 - DNA, 2155 bp, Homo sapiens
  misc_feature (4)..(4): n is a, c, g, or t
  misc_feature (6)..(6): n is a, c, g, or t
  misc_feature (1909)..(1909): n is a, c, g, or t
ggangnggcgctcgcggccacgccgccgtcgcgggtacattcctcgctcccggccgaggagcgctcgggctgtctgcggaccctgccgcgtgcaggggtcgcggccggctggagctgggagtgaggcggcggaggagccaggtgaggaggagccagcaggtgagcaggaccctgtgctgggcgcggagtcacgcaggctcgaggaaggcagttggtgggaagtccagcttgggtccctgagagctgtgagaaggagatgcggctgctgctggccctgttgggggtcctgctgagtgtgcctgggcctccagtcttgtccctggaggcctctgaggaagtggagcttgagccctgcctggctcccagcctggagcagcaagagcaggagctgacagtagcccttgggcagcctgtgcggctgtgctgtgggcgggctgagcgtggtggccactggtacaaggagggcagtcgcctggcacctgctggccgtgtacggggctggaggggccgcctagagattgccagcttcctacctgaggatgctggccgctacctctgcctggcacgaggctccatgatcgtcctgcagaatctcaccttgattacaggtgactccttgacctccagcaacgatgatgaggaccccaagtcccatagggacctctcgaataggcacagttacccccagcaagcaccctactggacacacccccagcgcatggagaagaaactgcatgcagtacctgcggggaacaccgtcaagttccgctgtccagctgcaggcaaccccacgcccaccatccgctggcttaaggatggacaggcctttcatggggagaaccgcattggaggcattcggctgcgccatcagcactggagtctcgtgatggagagcgtggtgccctcggaccgcggcacatacacctgcctggtagagaacgctgtgggcagcatccgttataactacctgctagatgtgctggagcggtccccgcaccggcccatcctgcaggccgggctcccggccaacaccacagccgtggtgggcagcgacgtggagctgctgtgcaaggtgtacagcgatgcccagccccacatccagtggctgaagcacatcgtcatcaacggcagcagcttcggagccgacggtttcccctatgtgcaagtcctaaagactgcagacatcaatagctcagaggtggaggtcctgtacctgcggaacgtgtcagccgaggacgcaggcgagtacacctgcctcgcaggcaattccatcggcctctcctaccagtctgcctggctcacggtgctgccagaggaggaccccacatggaccgcagcagcgcccgaggccaggtatacggacatcatcctgtacgcgtcgggctccctggccttggctgtgctcctgctgctggccgggctgtatcgagggcaggcgctccacggccggcacccccgcccgcccgccactgtgcagaagctctcccgcttccctctggcccgacagttctccctggagtcaggctcttccggcaagtcaagctcatccctggtacgaggcgtgcgtctctcctccagcggccccgccttgctcgccggcctcgtgagtctagatctacctctcgacccactatgggagttcccccgggacaggctggtgcttgggaagcccctaggcgagggctgctttggccaggtagtacgtgcagaggcctttggcatggaccctgcccggcctgaccaagccagcactgtggccgtcaagatgctcaaagacaacgcctctgacaaggacctggccgacctggtctcggagatggaggtgatgaagctgatcggccgacacaagaacatcatcaacctgcttggtgtctgcacccaggaagggcccctgtacgtgatcgtgggnttgtacgcccggccagaccgagccagctcagctgtactagccaggctgtgcgaagccaagttacctcacctctgtaagcctccatttcctcttgtgtaagttgggggttatggcagctacctcggaattgcatgaggctgtgtgtaaagcacgtagctcagtgcctggcactgagtccaggctcagccagcctttgcagttggtattggaatgaatacatatttcatagtgatcgtggggttgtaa

SEQ ID NO: 60656 - DNA, 1032 bp, Homo sapiens
  misc_feature (4)..(4): n is a, c, g, or t
  misc_feature (6)..(6): n is a, c, g, or t
  misc_feature (957)..(957): n is a, c, g, or t
  misc_feature (967)..(967): n is a, c, g, or t
ggangnggcgctcgcggccacgccgccgtcgcgggtacattcctcgctcccggccgaggagcgctcgggctgtctgcggaccctgccgcgtgcaggggtcgcggccggctggagctgggagtgaggcggcggaggagccaggtgaggaggagccagcaggtgagcaggaccctgtgctgggcgcggagtcacgcaggctcgaggaaggcagttggtgggaagtccagcttgggtccctgagagctgtgagaaggagatgcggctgctgctggccctgttgggggtcctgctgagtgtgcctgggcctccagtcttgtccctggaggcctctgaggaagtggagcttggtggtaagagactctagcagggagtgaagggatgcctggggagacagacctgcccctcttggaccttagatgcttccctctgtccctgatgtagactccttgacctccagcaacgatgatgaggaccccaagtcccatagggacctctcgaataggcacagttacccccagcaagcaccctactggacacacccccagcgcatggagaagaaactgcatgcagtacctgcggggaacaccgtcaagttccgctgtccagctgcaggcaaccccacgcccaccatccgctggcttaaggatggacaggcctttcatggggagaaccgcattggaggcattcggctgcgccatcagcactggagtctcgtgatggagagcgtggtgccctcggaccgcggcacatacacctgcctggtagagaacgctgtgggcagcatccgttataactacctgctagatgtgctggagcggtccccgcaccggcccatcctgcaggccgggctcccggccaacaccacagccgtggtgggcagcgacgtggagctgctgtgcaaggtgtacagcgatgcccagccccacatccagtggctgaagcacatcgtctcacggngagtcgacgnggttcccatggcaggccaaaagggactcctgtccagggggccgccgggagggcggggaggggccc

SEQ ID NO: 60657 - DNA, 580 bp, Homo sapiens
  misc_feature (4)..(4): n is a, c, g, or t
  misc_feature (6)..(6): n is a, c, g, or t
ggangnggcgctcgcggccacgccgccgtcgcgggtacattcctcgctcccggccgaggagcgctcgggctgtctgcggaccctgccgcgtgcaggggtcgcggccggctggagctgggagtgaggcggcggaggagccaggtgaggaggagccaggaaggcagttggtgggaagtccagcttgggtccctgagagctgtgagaaggagatgcggctgctgctggccctgttgggggtcctgctgagtgtgcctgggcctccagtcttgtccctggaggcctctgaggaagtggagcttggtatggcttctgaggtgggagagggtggcaggggtgggaagagtgggcaccaggagggggctgctgggctgagcaaagctggaaaggatccttgcccaggccctgagaaggtggcggcagggcagggctcaaccactgagactcagtcagtgcctggcttccacgtcttgacgggagcattggcccctgagcccagagaagctggaagcctgccgaaaacaggagcaaatggcgttttataaattatttttttgaaataaagctctgtgtgcctgggtct

SEQ ID NO: 60658 - DNA, 268 bp, Homo sapiens
cgccctcccagaggcctaccttcaagcagctggtggaggcgctggacaaggtcctgctggccgtctctgaggaggtacagcccctcccacccaccacctccctctgcctgctcccctccaggcctcatctggcctgaccgcgtggacatgcgccccgtcccatcccgggcgctgcagaggctgaccagctccgttccccacagtacctcgacctccgcctgaccttcggaccctattccccctctggtggggacgccagcagcacctg

SEQ ID NO: 60659 - DNA, 291 bp, Homo sapiens
acaccatagcatatggatttatagattagaaaatttctcccataaaactgagaagtaatgaatctgaggttaggagtttgattagaggtagacagaagtactacgaccattgtggtgaggagaacaagggaatttcttaggatctctggccttatttgttacctgaggtaggtggtttgaaaatctgtagcccttaatgggaagaggagtgaaagaaaataatcagaggaagatctactttgttatttttatgttggagaagagttcaagaacctaagtgtccattatgtt

SEQ ID NO: 60660 - DNA, 223 bp, Homo sapiens
gtatatatacttaaaaatgtctaatcatgcaaggcaaaatagaatcttcattctcttttaagtattttgtttaacactcaagatttagcagaatatgatgtgaatctgcgcttgagttaacctcctttgtaactagggataaaagtatttttcttcttgagaggtgctataggattcagcagatcacaaattaataaaattggcaattaagttacatggtacg

SEQ ID NO: 60661 - DNA, 349 bp, Homo sapiens
gacactttcagaattaagaagccttgccctctttgcgtgtcttcacaattgtgttaagtctattatagtattcattttagtttgaaagcaataaatacaatattagtacaagcacactgtcaagaaatccctagaatatggctcctctgaaggttgacatgggtctgcctcgcatgtatcttttcatctccagcatccagatcagagtcaacaacaacaactctacaaatatcaggcttcttggtggaaagaaatctggacattttttctatgaaaaaaaagttaggttacatggcattaatatttttgctagacttaacctacagaaaatgtttcaagcttataaaaa

SEQ ID NO: 60662 - DNA, 277 bp, Homo sapiens
gccaataccatgctgtcttaatttgtttatagatttgtaagtatgctaatttctgataaggtatctttgatatgttttctttaggtgctgttttgtcatgggtctgtctattcttatgcaaataattaaagtatttttactttaattatttagtgacagatttaaccatattatatttttctttattaaaatttttcatggaaattaggatgaagtaatggattatgggtacactgtaatttacctaattatatctagtgtggtatatttagttgct

SEQ ID NO: 60663 - DNA, 370 bp, Homo sapiens
ttaactctttcttctcttcagtcggattatagagttggagcaaatgtcatgatgaactttgaggcctaggcctggactcttgaggtgtgtgtgtgtgtgtgtgtgtgtgtgtgtgtgtttctttctccataatagtcccaaccctaaacaggggtatggcacagtacttcttatgaacaaaagtgctattggtctacaaggggacttgagcctgcactaattgtatttgattaggatttttgtgctgtctgtatgatgtttaaccacactgtcaattacagacttcctttaaggaatttccaggaaacccccttaccataagagtttaaattaatagtttgctagtttaatgacagcagttggtaaagga

SEQ ID NO: 60664 - DNA, 3722 bp, Homo sapiens
  misc_feature (1966)..(1966): n is a, c, g, or t
  misc_feature (1986)..(1986): n is a, c, g, or t
  misc_feature (2156)..(2156): n is a, c, g, or t
  misc_feature (2695)..(2695): n is a, c, g, or t
aacccatttcaactgcctattcagagcatgcagtaagaggaaatccaccaagtctcaatataataatattctttattcctggacagctcggttaatgaaaaaatggacacagaaagtaataggagagcaaatcttgctctcccacaggagccttccagtgtgcctgcatttgaagtcttggaaatatctccccaggaagtatcttcaggcagactattgaagtcggcctcatccccaccactgcatacatggctgacagttttgaaaaaagagcaggagttcctgggggtaacacaaattctgactgctatgatatgcctttgttttggaacagttgtctgctctgtacttgatatttcacacattgagggagacattttttcatcatttaaagcaggttatccattctggggagccatatttttttctatttctggaatgttgtcaattatatctgaaaggagaaatgcaacatatctggtgagaggaagcctgggagcaaacactgccagcagcatagctgggggaacgggaattaccatcctgatcatcaacctgaagaagagcttggcctatatccacatccacagttgccagaaattttttgagaccaagtgctttatggcttccttttccactgaaattgtagtgatgatgctgtttctcaccattctgggacttggtagtgctgtgtcactcacaatctgtggagctggggaagaactcaaaggaaacaaggttccagaggatcgtgtttatgaagaattaaacatatattcagctacttacagtgagttggaagacccaggggaaatgtctcctcccattgatttataagaatcacgtgtccagaacactctgattcacagccaaggatccagaaggccaaggtcttgttaaggggctactggaaaaatttctattctctccacagcctgctggttttacattagatttattcgcctgataagaatattttgtttctgctgcttctgtccaccttaatattctccttctatttgtagatatgatagactcctatttttcttgttttatattatgaccacacacatctctgctggaaagtcaacatgtagtaagcaagatttaactgtttgattataactgtgcaaatacagaaaaaaagaaggctggctgaaagttgagttaaactttgacagtttgataatatttggttcttagggttttttttttttttagcattcttaatagttacagttgggcatgatttgtaccatccacccatacccacacagtcacagtcacacacacatatgtattacttacactatatataacttcctatgcaaatattttaccaccagtcaataatacatttttgccaagacatgaagttttataaagatctgtataattgcctgaatcaccagcacattcactgacatgatattatttgcagattgacaagtaggaagtggggaattttattaagttactcgttgtctggggaggtaaataggttaaaaacagggaaattataagtgcagagattaacatttcacaaatgtttagtgaaacatttgtgaaaaaagaagactaaattaagacctgagctgaaataaagtgagtggaaatggaaataatggttatatctaaaacatgtagaaaaagagtaactggtagattttgttaacaaattaaagaataaagttagacaagcaactggttgactaatacattaagcgtttgagtctaagatgaaaggagaacactggttatgttgatagaatgataaaaagggtcgggcgcggaggctcacgcctgtaatcccagccctttgggaggccgaggtgggcagatcacgaagtcagtagtttgagaccagcctggccaacatagtgaaaccccgtctctactaaaaatacaaaaaaaaaattagctgggtgtggtggcagtcacctgtagtcccagctacttgggaggntgaggcaggagaatcgcttnaacctgggaggcggaggttgcagtgagccgagatcgcaccagtgcactccagccttggtgacaatgggagactccatctcaaaaaaaaaaaaaaaaaaaaaaagataaaaagtcagaaatctgaaaagtggaggaagagtacaaatagacctaaattaagctcatttttnggctttgattttggggagacaaagggaaatgcagccatagagggcctgatgacatccaatacagagttctggtaaagataaaatttgatacaggtttggtgtcattataagagaaatcattattaaatgaagcaagttaacactctaagagaattattttgagatagaagtgaagctaagctaaacttcacatgcctataattggagggaaaaactaaggataaaatctagcctagaagatacaataattagtcataaacatgcattgtgaaactgtagagagcaggtagcccaaaatagagaaagattagataaagagaaaataagtatccatcagagacagtatctctaggcttgggcaagagaaaagtccacagtgataagcaactccacctaaggcatgaatatgcggcagagaaaacagcaatagtgaatgaatgcaaaaggtgctgagaaattccacacatgagtattgtgatgagtaaatgaataaaacatttgcaaagacctttagagaaagagaatgggagcatatgtgngaaataagatagttgattatgaatagaaggtagtgaagaaaagcaagctaagaaaaaattctgtttataaaagaaggaaaagatagtttatgtttttagcctaagtataagagtcctacagatggactgaaaaaaatcagtctgagagtattagtcacaattaatgaaataattacattttatgtattgaggatgccaagattaaaaggtgacaggtagatgttaatttccctagattgtgaaagtgatcacgacaatcacacaacaaataattaagtgacttggtatgctttatttaattgtagggcctgaggttttccattctcatttttctaaaatacaattttgtttctccaaatttgacagcagaataaaaaccctaccctttcactgtgtatcatgctaagctgcatctctactcttgatcatctgtaggtattaatcacatcacttccatggcatggatgttcacatacagactcttaaccctggtttaccaggacctctaggagtggatccaatctatatctttacagttgtatagtatatgatatctcttttatttcactcaatttatattttcatcattgactacatatttcttatacacaacacacaatttatgaattttttctcaagatcattctgagagttgccccaccctacctgccttttatagtacgcccacctcaggcagacacagagcacaatgctggggttctcttcacactatcactgccccaaattgtctttctaaatttcaacttcaatgtcatcttctccatgaagaccactgaatgaacaccttttcatccagccttaatttcttgctccataactactctatcccacgatgcagtattgtatcattaattattagtgtgcttgtgacctccttatgtattctcaattacctgtatttgtgcaataaattggaataatgtaacttgatttcttatctgtgtttgtgttggcatgcaagatttaggtacttatcaagataatggggaattaaggcatcaataaa

SEQ ID NO: 60665 - DNA, 785 bp, Homo sapiens
ctcccttcaatgaccttcctgtcccataggagttctcaggcagcttcaatggaaggagggagccaagaagggggcctggtatacattcaaagatgataattacgacatggattgtgtatattcttgctcggaaaggtgtagggcttcccttcctaccaataaccagttcggacattgacgttgtggaaagtgaggctgtgtctgtactacatcattggttgaaaaaaacagaagaagaggcttctcggggcataaaggaaaagctgtccatcaaccacccttcccagggtgtaagggagaagatgtccactgactcccctcccacccatggccaggacatccacgtgaccagagatgtggtgaagcaccacctctctaagtctgatttgttggcaaaccagagccaagaggtcctagaggagagaacacgaatccagttcataagatggagccacactcgtatcttccaagtgccaagtgagatgacagaggacatcatgcgagatcgaatagagcaggtgagacgaagcatatcccgtcttacagatgtctcagctcaggacttcagtatgagaccctcctcctcagactgctgagagcaacaggtggaagtccttcagggtccagcagcaacctgtatcagaagaacatccttctctgcttgacctgaagaagggccagacctgggcagaaagactccagcaggtgagctcttcatgcgacagtgtcagcactggagtcttcttgctgaactgcgaataaagagatgtgctgtttaacaaacc

SEQ ID NO: 60666 - DNA, 899 bp, Homo sapiens
ctcccttcaatgaccttcctgtcccataggagttctcaggcagcttcaatggaaggagggagccaagaagggggcctggtatacattcaaagatgataattacgacatggattgtgtatattcttgctcggaaaggtgtagggcttcccttcctaccaataaccagttcggacattgacgttgtggaaagtgaggctgtgtctgtactacatcattggttgaaaaaaacagaagaagaggcttctcggggcataaaggaaaagctgtccatcaaccacccttcccagggtgtaagggagaagatgtccactgactcccctcccacccatggccaggacatccacgtgaccagagatgtggtgaagcaccacctctctaagtctgatttgttggcaaaccagagccaagaggtcctagaggagagaacacgaatccagttcataagatggagccacactcgtatcttccaagtgccaagtgagatgacagaggacatcatgcgagatcgaatagagcaggtgagacgaagcatatcccgtcttacagatgtctcagctcaggacttcagtatgagaccctcctcctcagactgctgagagcaacagatggagctttgggaacgcggagaacagtggggttacagggagtcatcatcagccctaccccttggccaaccacatctccctgctgtgtcccctgggcatttctctacctcccaggtggaagtccttcagggtccagcagcaacctgtatcagaagaacatccttctctgcttgacctgaagaagggccagacctgggcagaaagactccagcaggtgagctcttcatgcgacagtgtcagcactggagtcttcttgctgaactgcgaataaagagatgtgctgtttaacaaacc

SEQ ID NO: 60667 - DNA, 1219 bp, Homo sapiens
  misc_feature (2)..(2): n is a, c, g, or t
gngcacattgttctgatcatctgaagatcagctattagaagagaaagatcagttaagtcctttggacctgatcagcttgatacaagaactactgatttcaacttctttggcttaattctctcggaaacgatgaaatatacaagttatatcttggcttttcagctctgcatcgttttgggttctcttggctgttactgccaggacccatatgtaaaagaagcagaaaaccttaagaaatattttaatgcaggtcattcagatgtagcggataatggaactcttttcttaggcattttgaagaattggaaagaggagagtgacagaaaaataatgcagagccaaattgtctccttttacttcaaactttttaaaaactttaaagatgaccagagcatccaaaagagtgtggagaccatcaaggaagacatgaatgtcaagtttttcaatagcaacaaaaagaaacgagatgacttcgaaaagctgactaattattcggtaactgacttgaatgtccaacgcaaagcaatacatgaactcatccaagtgatggctgaactgtcgccagcagctaaaacagggaagcgaaaaaggagtcagatgctgtttcgaggtcgaagagcatcccagtaatggttgtcctgcctgcaatatttgaattttaaatctaaatctatttattaatatttaacattatttatatggggaatatatttttagactcatcaatcaaataagtatttataatagcaacttttgtgtaatgaaaatgaatatctattaatatatgtattatttataattcctatatcctgtgactgtctcacttaatcctttgttttctgactaattaggcaaggctatgtgattacaaggctttatctcaggggccaactaggcagccaacctaagcaagatcccatgggttgtgtgtttatttcacttgatgatacaatgaacacttataagtgaagtgatactatccagttactgccggtttgaaaatatgcctgcaatctgagccagtgctttaatggcatgtcagacagaacttgaatgtgtcaggtgaccctgatgaaaacatagcatctcaggagatttcatgcctggtgcttccaaatattgttgacaactgtgactgtacccaaatggaaagtaactcatttgttaaaattatcaatatctaatatatatgaataaagtgtaagttcacaactaaaaa

SEQ ID NO: 60668 - DNA, 442 bp, Homo sapiens
tccgtctcataaacaaacaaataaacaaataaataaataaagtttggatcctttttctaaaacaacacacatatgaaacttagataatagttttcagaggtttcctgaacccctgaagcccatctgtagacctcagttaagaattccctttctaggccgggcatggtggctcacgcctgtaatcccagcactttgggaggccaaggcactaggatcactcaagatcaggagttcaagcctggccaacatgatgaaaccctgtctctactaaaaatacaaaattagccagcgtggtggcacgcacctgtaatcccagctactcaggaggctgaggcaggagaatcacttgaacccgggaggcagaggttgcagtgagccgagatcgcaccactgcactccagcctgggcaaaaagagtgaaactccatctcaaaaaaaaaaaa

SEQ ID NO: 60669 - DNA, 805 bp, Homo sapiens
gaaggtaaatgattcttgttgtttttttatttaataaatcaaagaagccattttatttaaatgcttgttttaaatacaatacttagcaaacaattggtgaagcagttttagacagtttatcaagacaccataggaaataggcatcagtagttcctgtaggtaaaggtagataaattgttcttttgatacctgagaagtcttactttcagtgaagcgcttggttgaatgatctgccaggaaaaacttagatggtagatgttggtcttttccattgtggaaactggtggtcattgttttttgaaaacaagtattaaacgtgaattactatctttgttcagtgggcttatgtttcagactgctggagatgctgcaggttacagtagaagcttttactgtactctatagcagaagtagtgatgtattagcagaggtacagatgacatgcagtgtgaagtgggctgccataatagggagaaagctaggaaaaatgaactgaagtagcatttagaggaaattctggctctacaatgggatggatcaatacctgttaccttgaagcaaaaagtgatttttgtactttctagacatttttctaataataacctgccaagtgccaggcgttgtgatatgtagttttgtgtattgtctaaggctcacagcaatcgtttgatgttgggcaggatggcttgtgcttgtagtcccagctactcgggaggctgaggcaggaggattgcttgagcccaggagttcgaggccagcctggggcaacatagaccctgtcttttcttttcttttcttttctttt

SEQ ID NO: 60670 - DNA, 306 bp, Homo sapiens
ttctccctcactgaaccttcccagcagcagctgctgacatatgaacctcgcagatgaagatgccatagcatggctatttctcgactgcactgctgaaggtaagatagtgagaaaatgctttttcgtagcaatttctttgtcatttttaacagggtcaaactcaaatactcataaaaggagattgagagccaatatgctataccatcaaatttaaaaagcaaaaaaatcaaagccataaactgttatcatttccagtatgttattccttctaatgctagcccattagtttcaataaaagaacaacag

SEQ ID NO: 60671 - DNA, 212 bp, Homo sapiens
taacattctctccaacctccccaggtcccatcagtgttgagaaggaatctaggccagctcctgggagatgccagttagccgctttgatcctgtgctttccaattgcccttatagcagtcgatgtcaggattggacaacttcaaaacaagtccataaagtccccatggcactaggggctctgggacccagtgtcgagaggcttagagcattgc

SEQ ID NO: 60672 - DNA, 386 bp, Homo sapiens
aacaagttactttatttctttgcccttaattttctcatcgattaaaggaaattaatacctatagggtaggatggtggtaaaaattagacaacatgtgatcaaattgccaagtgcctagtaaatgctaaataagtagtattataattagttttagttttgatttttgtttgttgtaaataaacagacttctacttctggtgatttaccagccaatagtgcttaaatgaagttgccctctgttaatggagtatttaactcctaagaaaaagtttccatcagtctctcttgttctagtttgtttttgttttttttccttttttttgaggcagagtctcgcactgtcgccaggctggagtgcagtggcgagatctctgctcactgcaacc

SEQ ID NO: 60673 - DNA, 302 bp, Homo sapiens
ggagaaagaaaggtaaagagaggaagataaaagggagaaaaggagggagcaaatagatggttatcagtgagagctaaatcatcaatttccatagcagaaagtcaatacttaatgactacataagtctgttattcagaaatatggatataaatactagaaggaacagataaaagaggaaacatctaaaacagtcaaaactgcttgtaggaagagggacgtcagcaagatggcagaataggactttcaaggactcgtccctgcccctcccatctcccccatcagaaacatcaatttgaataact

SEQ ID NO: 60674 - DNA, 315 bp, Homo sapiens
ctcctttccatcatttagttctctaaaagtattagctttgttattggttttgctattttagtttttctgatgtctttaaggaggaattcagggaaataaaaaaactttcaccaccagtttttttctttccagaaaaccgtggagtttgtatttctttttacctgggttccttttacattatgcttttatttatcccgggagatttctggcattccagttaattatacttagagacattgtagtatttttagatgtcagttgatctttgttcatttgataaagtacattttcaaaatggaaactttctgctatatt

SEQ ID NO: 60675 - DNA, 372 bp, Homo sapiens
ctcaaactcttgggctcaagctttcctcccacctcggctttccaaagtgctgggataacaggcatgagccaccgtgcctggcctagtccttatctttaaataatttacagtatacttacaggtttggaatatgtttcagccattcctttacctgtatgctgatacttcaacagcatgtcttagaagtaacttaaataatagtaacttaggggagccttatttgctctgtcagacagtatttttgagtacccaagtcctagttttttctctgtttgcttctgagacctgttttctgcccgatctgtatcccaggaggccaacccctatgcaccagggctcctatgccagctggcttcttggcagcttcagcca

SEQ ID NO: 60676 - DNA, 219 bp, Homo sapiens
aatcatacacataatacacaaaccaaagacaaatgatgaatattatgtcagaaaatataaagtcttcccctttcttcttttgccaagaaagtccaatattttcaccatttttatgcacacaatcaactttatttaagctggaagttaatgtctcattgttttcattgttctaaataaacaccttttcccttgagtattgttctaaaaaaaattgaagtt

SEQ ID NO: 60677 - DNA, 798 bp, Homo sapiens
ccaggtgaaagctagcgttccatgttctgcctactactctctaagtttattcattttgtttgggtttgggcttctcggtattccctaccaattttctagctcatcaatacattttaaaagatttttaagttattttatccagcattaaagttgctgagccacactcccagaagcagaagtgcatctgtgagttccttaaaggaaaccaatagatacctgacttggaacacccggctctgcttcagcttccttcagtctccaaatgggtgtgagctgaagttctcacacccagttaattccatagcctcttactattgtgaactgcgcacctttcccctgggggctaaaagcccaattattttccagtacatgcactttctacacaaacagcagaaattcaggttgctctccttacaaacagcgttgttctctttcccttttctctgggaggtaccagtgcaggttttaaaacctctgctctcctgggtaggctcaatgtttgagtgctctttctcacattcatcttgcaagtaggagcggtggtgaacgctgccttccgcactaggtggaaggcttactcgtctaaggaattctttttctttcttttgagagagggtcttgctctgtcacgccagctggagtacagtggcacgatctcagctcactgcatcctcaacctcccctagctcaagctgaggcaggagaatcgcttgaacccaggaggcggaggttgtagtgagccaagaattggccattgcactccagactgggcaacaacagcaaaactccgcctcaaac

SEQ ID NO: 60678 - DNA, 510 bp, Homo sapiens
gtcgtgagtgaatgtagggaggaaagggctatccagggtttttttggcctgttttccttcctgaacgtgtgaaagaatggaaattggtaagtcacagcagggagcacgtttcaggggcatcaggaattgggttttggacttggtgaatctaaggtgttctgcactggaggttcatcacgggtagctgaacatgcaggtctggggttctagagagggagttgtgctagagacttcaatgggtgaggcataaggtcaaagcctgtagtagatcagatttagagggtggaatttcaaggaagttattttgtgtggtctctgaagtgagaggtgggtttagggtggaaggccagggatgaaggggtggacacttaagattccttccagaaaggaggggtcctggcatgtgaaagcattctagatggtgttgttggaagtcaatgcttggtgctgcaaagtgaaaccagcactcaggcaaaagttttctcagcaaggcaatttacttctgtgcaa

SEQ ID NO: 60679 - DNA, 570 bp, Homo sapiens
gcgtcctctcccgggaatgtacccacaggccccctctacgcgcttgggttgcccaggaaaccccaacggtgaccccacaatgcccagcagagccctcgccctctgccaatgacggggtcaccagaatccagcgacccaaggaatccctcaaataagtcggccaaatttcgctgcgaactgatttacacatatggcctcacctggacaagaaggaatcttggaagttcctggggcccaactcctggttcacgaagacacacagcgtccacgagcagggggctgcgcagcctcccctgggtcgaggcgtgggtttcagcctcaggcgtgtgttgcgctggagatttgtattttgtgaactggtttcaggtggtctcagcacttttctgttaacagggaaccagagtttcaggaaagatctcaaaacctaattttcttcatctcgcctcactcaaaggcctctttcttgtaagactatgattgttttttttaaataattttttttctgattgcaaacataagatttttgaagaaatgttgtaaaactaatacaaaaaagaaatactccttttt

SEQ ID NO: 60680 - DNA, 433 bp, Homo sapiens
caagggtaaaaatttaacaaaattaataatttgcactgcttcatcaaggacattctcaagtaaaactggccatttttaactggaagtgcatggtggtaaagagtacaatgaccactggtacagtttttcatcactgccttgtttcttgccactgttttacttgttgcttttgcaccatcagtgcaaatgtcaaccttctggagaaaagcaaattatatcaaaactatggaaatagctttgactttgtagattgcctcatgagtctggaggactctcagggttcacgggtcacatggtgagaactgctgctttagataggtgccagcaagcaaatacagcaaaacaaggaaaataactaggaggagaaaaaaggagacaaagggtcatttgttgaagataggatgtctacccatagtggtttagcacaagataa

SEQ ID NO: 60681 - DNA, 142 bp, Homo sapiens
ccctctccaggaaccccaggacctccccaccatgcaaccaccaaagggtgacaggaacagggggctccagcacccacacggtggaggaatcagttctgattgtgaaggctctcaacccactgaatactgaatattttgaaca

SEQ ID NO: 60682 - DNA, 440 bp, Homo sapiens
attaacagaagtgcaaggagctcctgttggacctgtgttccatgaggaaggctttcactagcccttcatgataggttcaaacacttgaagacctgaggaatttcagagttgacatttagatattgaggtaacaggacatcttggagttgaaatttccagaatctttgctggaaagtctcataatctcaaaacaaaatcaagcaaatttggagcaaagaaagttgctgaaaatgtcaaggcatgaaatccaaggtgagtctgacctaaatgagtgagttaggcaaaggtgcatgtgaagatggactgggtacattttccaggtacaagagagggtctttgcagcaggcaaaagagattaggaaaacaaaatctgaagtaaagcctaagaaatagttaatgaaatcaactaactgagcttatgagctaattttttctttgtc

SEQ ID NO: 60683 - DNA, 563 bp, Homo sapiens
tgtctttgtatatcaaattgaaatacaaatgaaattggtcatttgtacatctgcaaatgtggatcgcgaatcctgcgagaagtagcctactgtgacaaagctgcctatgcctttatcactttgcaaaaacagaaaggtgggacacgttggtagcaatccctaaccctgtcataaacagaccttaaagaaactggccataaacaggatttctgcagcaatgggacatgctcatgatggctgtcatgcacactgctaaaagttgttggtttactagagcagggcaaggaacacctggccccgcccggagcaaaaaactgctcaaaccacaaacgatagcaggaaaggcctgtggcttgacagcatgtttttgctacagataatcagccagagcctgtttctctgctcctcactgagattgctttgtttcccataaagaatgcttttagcgaatctacaatctatagaagcaatgcttatcactggctttctgtcaataaatgtgtgggtcaagctctgtttgtggctctcagctctgaaggctgtcagccccctaatccccactt

SEQ ID NO: 60684 - DNA, 278 bp, Homo sapiens
agtatcaagggataaaatatatttttaattttgtatttcacttgaaaattgtaaggaccattttataatgtattgcttgcaaaataagtcatggaagccctgaaaaattaatcaattcactaatcaaagaaacatatattaaagacctactatgcatgaggcaccatgctaattgctttgaagaagacaaagttgaattagacagggatccagtttacaagatatttacaatgcaaagggggatacaagacatataaaaggctatggaacttaaaaag

SEQ ID NO: 60685 - DNA, 300 bp, Homo sapiens
atatgagaaagcagagcaaaacagatgatgctctaaatgcaactgacacacttgctaaagacgttaggtgctccataaatgcttgttgaaatgctgtttgtcaacatttgttgtgaaaaattcatctctttctctaagaatcctcatgagttaaccacaatcagttctacataatttaacagaaaacatctggtggcacttttaaatgtttaaggacagcatttcacaaactatgcccgcccccagtcccactgcagcaggagaaaataaggctatggagaaaagcaagatgagttatca

SEQ ID NO: 60686 - DNA, 311 bp, Homo sapiens
tttcttgctttacaggttagtttaaaataacacgatctgcacccccataatttctaattaaccttttttcagaactaaataaacatcaaattagccatcagaatgaatctctacaagtaaggggaaatggaaaggtaaagcaacatttcagtaatacaagccaaaaagtatgtgcattaatgggaaaaatttttggaggaagctgttactgagaatgactttttctgtcagattcactaagaagttgcttggcttttatttgtgagaatattccattttgaaggcactatttttacactggttaattaaaa

SEQ ID NO: 60687 - DNA, 3767 bp, Homo sapiens
atcaagattaatatctgtagtaataggcagaacacttccagtgtggaattgcttcttttctttggtcaaacactaactttggcagaggatagacacagcttaggaagactgaattttaagtcttctgaattgtttttctggacttccaaatctcaagtgataagaccagcagaagcagatataaagacctgaagatagtcttttctgtccaaagatggaaaacagtactactaccatttctcgggaggagcttgaagaactacaagaggcatttaataaaatagatattgacaatagtgggtatgtcagtgactatgaacttcaagacctgtttaaggaagcaagccttcctctgcctggctacaaggtgcgcgagattgtggagaaaattctatcagttgctgacagcaacaaagatggcaaaatcagttttgaagagtttgtgtcactaatgcaagaattaaaaagcaaagatatcagcaaaacattccgaaaaataattaacaagagggaagggattactgctattggaggaacttcaactatttccagtgagggcacacagcattcttattcagaggaagaaaaagtggcttttgttaactggataaacaaagccctggagaatgaccctgactgtaagcatcttatacccatgaatcccaatgatgatagtcttttcaagtcacttgcagatggcatccttctttgcaaaatgatcaacttatctgaaccagatacaattgatgaaagagccatcaataagaaaaagctcacgccattcactatttctgaaaatttaaacctagctctgaattctgcctcagccattggttgtacagtggtcaacattggtgcatcagatctcaaagaaggaaaacctcacttggtcttgggacttctctggcagatcatcaaagttggcctttttgctgatattgagatttccaggaatgaagctctgattgcattgttaaatgaaggtgaggaactagaggagctgatgaagctttctcccgaggaattactgctgcgatgggtgaactaccatctgaccaatgcaggatggcataccatcagcaacttcagccaagacattaaggactcgagagcctattttcatctgcttaatcagattgcccctaaaggtggggaagatggacctgccattgccattgacctttcaggaattaatgagacaaatgacctgaagcgtgctggactcatgcttcaagaagcagataaactgggctgcaaacagtttgttactcctgcagatgtggtttcaggcaatcctaaacttaatttagcttttgtagctaatttgtttaacacatacccgtgcctgcacaagccgaataataatgacatcgatatgaatttactggaaggagagagcaaggaagagagaacatttcggaactggatgaattccttgggagtcaacccatacattaatcatttgtacagtgaccttgcagatgctttagtgatctttcagctctatgagatgatccgagtgccagtcaactggagccatgtcaacaaacctccttatcctgcccttggagggaacatgaagaagattgaaaactgtaactatgcagtggaacttgggaagaacaaggccaaattctccttggttggcattgctgggcaggacctaaatgaaaggaattcaacacttaccctggcattggtatggcagctgatgagaaggtacacattgaatgtgttatcggatcttggagagggtgaaaaagtaaatgatgaaattataattaaatgggtcaatcagactcttaaaagtgcaaacaaaaagacttctatttccagcttcaaggataaatctataagcacaagtttacctgtcctagatttaatagatgccattgcaccaaatgcagttcgtcaagaaatgatcaggagagaaaacttatctgatgaggacaagctgaacaatgctaaatacgccatttcagttgctcgaaagatcggtgcccggatatatgcattacctgatgacctcgtagaagtgaaaccaaagatggttatgacggtgtttgcatgcttaatgggaaaaggactgaacagaataaaataatcatttcatatgattttctgccacattaaacatattgtatgcctcacagtttacaggattctgaaatgtagtgggtgtaaaaccagagattatttgtatgctcaaaatagttatatattcattaatgaattcaatatcctgttcatactagttagagctggtcagcctttttgggtaacacagttaatttaccaactgatacagataatagaatatattcataatcaagctgatacttcatgattaaattatttttgttgcttaaaagtcgtattagacaagactaaatcattcttttttatggttcaaaaaagatgaatacaaacgtttttgcaggttctgctgtgaaatgtggtttgatttttttggtgtgttaattttgatcataaatgcattcatactcataatccagtttaatccttttatttgcttcctccaactatttaaagtggtccaaaaacacttttctgtaagtttctatactgtctaaaaccttatggtgaccagaattgtttattaatatcaaacttttttatatatgagaactaattcttgaataaaccccaaagttcactctcttgtttaagtagcagcagctttttacttaaaatttaattttaactacattgatactttacacatcctagtttggtaacacagctttaactatgtcatgcaacatatatatgttggtaggatgttattagagagatatgtgtgcatatatatttttttgcacctgaatcacccagcttttcataagtggtatgtttaattggtcattcagccaaccatcagtattttccccccacaacatgtgtaacacttttcagtctgtggatatctgatacattaagatttctttttataagtattcattttgaatgtgcatatagttatttgaccccttccaaatacttgtagccaaacattggctagaacatcccaagatatgctgacactgtcctgttagcttcatattatacttgctagtttaggtctctatagaagccctatataatttagaatatgcccactgaatatctttaatagaaagtaacataaagctagtattcaatgtagagtattttcatatgtttttcacagcccgttacaaattggcaatgtttggttaatgtttgtattacttggaaatcgctacagcttggactatttttttctaaatttttagcattagtccatttctgctgctaacaattgaatccagaaatctactttctccatcttccactgttagtgccagtgagcaatactgttgtgcaacaaaaatgtcactttatctcagtgtgaatgagtagtctaaattccctttctaccattgatttaaatatatatattggtaagagagactgcccatgtgtttagaatagaattttttaaatgaaatgatcaacaggtggaatttgaaatatattcttctacaaaagagatttctttcccttttatattttgatgattgttttcttaagattaagatatgttcttgctcttttataagattatttaaattatgtttccctctgattttttttcaccattgtatttactaagttattggatttacatgaaatctggcactttagggtgttctttttctcacagagtatatttaataaaaatgctgtgtatatagaaaaaagtt

SEQ ID NO: 60688 - DNA, 745 bp, Homo sapiens
  misc_feature (203)..(203): n is a, c, g, or t
  misc_feature (215)..(215): n is a, c, g, or t
cttaagcgtgctggactcatgctcaagaagcagataactgggcggcaaacagtttgttactccgcagatggggttcaggcaatcctaaacttaatttagcttgtgtagctaatttgtttaacacatacccatgcctgcacaagccgaataataatgacatcgatatgaatttactggaaggagagagcaaggaagagagaacntttcggaactgnatgaattccttgggagtcaacccatacattaatcatttgtacagtgaccttgcagatgctttagtgatctttcagctctatgagatgatccgagtgccagtcaactggagccatgtcaacaaacctccttatcctgcccttggagggaacatgaagaaggtgaatgaaataatggccatggatatattgttattgttctgatatgaaacaaagaatttagagtttcatgaagttatacgtgctctgtccccacaattctgattcagaccaaaatgtgttaagcttaatagcctttttacaagtttgctttaataaatttaaagatgaaggcaatccctctagtcagacactttatataactattttcatctttatcaagtcatagtacttaatgttctttgagatgtcctgtaaatgtattctttttttacaattggtataacgttctgaatgtttattggttatccactcatttattcaacagatatttatcaattacctaatacctatacagtgttatgcaggatgta

SEQ ID NO: 60689 - DNA, 3877 bp, Homo sapiens
agtcaattctccataggaacactatcaagtctttttccataaaagtcagataaaagaaagatcacatttcttgatattctttgaagcaactttatttttattgtcatgcttcatcctgcccgaatactgccaagtctttctcaggcacctggaatctgctcctcagcctctgttgtcctgggtctaatgtagagcaaaaggctgagaggaagctcttctattctccatcatcggtcttcagtggctacctgggaaacaccccttggcttagtcggcagattctctccgatataaagacctgaagatagtcttttctgtccaaagatggaaaacagtactactaccatttctcgggaggagcttgaagaactacaagaggcatttaataaaatagatattgacaatagtgggtatgtcagtgactatgaacttcaagacctgtttaaggaagcaagccttcctctgcctggctacaaggtgcgcgagattgtggagaaaattctatcagttgctgacagcaacaaagatggcaaaatcagttttgaagagtttgtgtcactaatgcaagaattaaaaagcaaagatatcagcaaaacattccgaaaaataattaacaagagggaagggattactgctattggaggaacttcaactatttccagtgagggcacacagcattcttattcagaggaagaaaaagtggcttttgttaactggataaacaaagccctggagaatgaccctgactgtaagcatcttatacccatgaatcccaatgatgatagtcttttcaagtcacttgcagatggcatccttctttgcaaaatgatcaacttatctgaaccagatacaattgatgaaagagccatcaataagaaaaagctcacgccattcactatttctgaaaatttaaacctagctctgaattctgcctcagccattggttgtacagtggtcaacattggtgcatcagatctcaaagaaggaaaacctcacttggtcttgggacttctctggcagatcatcaaagttggcctttttgctgatattgagatttccaggaatgaagctctgattgcattgttaaatgaaggtgaggaactagaggagctgatgaagctttctcccgaggaattactgctgcgatgggtgaactaccatctgaccaatgcaggatggcataccatcagcaacttcagccaagacattaaggactcgagagcctattttcatctgcttaatcagattgcccctaaaggtggggaagatggacctgccattgccattgacctttcaggaattaatgagacaaatgacctgaagcgtgctggactcatgcttcaagaagcagataaactgggctgcaaacagtttgttactcctgcagatgtggtttcaggcaatcctaaacttaatttagcttttgtagctaatttgtttaacacatacccgtgcctgcacaagccgaataataatgacatcgatatgaatttactggaaggagagagcaaggaagagagaacatttcggaactggatgaattccttgggagtcaacccatacattaatcatttgtacagtgaccttgcagatgctttagtgatctttcagctctatgagatgatccgagtgccagtcaactggagccatgtcaacaaacctccttatcctgcccttggagggaacatgaagaagattgaaaactgtaactatgcagtggaacttgggaagaacaaggccaaattctccttggttggcattgctgggcaggacctaaatgaaaggaattcaacacttaccctggcattggtatggcagctgatgagaaggtacacattgaatgtgttatcggatcttggagagggtgaaaaagtaaatgatgaaattataattaaatgggtcaatcagactcttaaaagtgcaaacaaaaagacttctatttccagcttcaaggataaatctataagcacaagtttacctgtcctagatttaatagatgccattgcaccaaatgcagttcgtcaagaaatgatcaggagagaaaacttatctgatgaggacaagctgaacaatgctaaatacgccatttcagttgctcgaaagatcggtgcccggatatatgcattacctgatgacctcgtagaagtgaaaccaaagatggttatgacggtgtttgcatgcttaatgggaaaaggactgaacagaataaaataatcatttcatatgattttctgccacattaaacatattgtatgcctcacagtttacaggattctgaaatgtagtgggtgtaaaaccagagattatttgtatgctcaaaatagttatatattcattaatgaattcaatatcctgttcatactagttagagctggtcagcctttttgggtaacacagttaatttaccaactgatacagataatagaatatattcataatcaagctgatacttcatgattaaattatttttgttgcttaaaagtcgtattagacaagactaaatcattcttttttatggttcaaaaaagatgaatacaaacgtttttgcaggttctgctgtgaaatgtggtttgatttttttggtgtgttaattttgatcataaatgcattcatactcataatccagtttaatccttttatttgcttcctccaactatttaaagtggtccaaaaacacttttctgtaagtttctatactgtctaaaaccttatggtgaccagaattgtttattaatatcaaacttttttatatatgagaactaattcttgaataaaccccaaagttcactctcttgtttaagtagcagcagctttttacttaaaatttaattttaactacattgatactttacacatcctagtttggtaacacagctttaactatgtcatgcaacatatatatgttggtaggatgttattagagagatatgtgtgcatatatatttttttgcacctgaatcacccagcttttcataagtggtatgtttaattggtcattcagccaaccatcagtattttccccccacaacatgtgtaacacttttcagtctgtggatatctgatacattaagatttctttttataagtattcattttgaatgtgcatatagttatttgaccccttccaaatacttgtagccaaacattggctagaacatcccaagatatgctgacactgtcctgttagcttcatattatacttgctagtttaggtctctatagaagccctatataatttagaatatgcccactgaatatctttaatagaaagtaacataaagctagtattcaatgtagagtattttcatatgtttttcacagcccgttacaaattggcaatgtttggttaatgtttgtattacttggaaatcgctacagcttggactatttttttctaaatttttagcattagtccatttctgctgctaacaattgaatccagaaatctactttctccatcttccactgttagtgccagtgagcaatactgttgtgcaacaaaaatgtcactttatctcagtgtgaatgagtagtctaaattccctttctaccattgatttaaatatatatattggtaagagagactgcccatgtgtttagaatagaattttttaaatgaaatgatcaacaggtggaatttgaaatatattcttctacaaaagagatttctttcccttttatattttgatgattgttttcttaagattaagatatgttcttgctcttttataagattatttaaattatgtttccctctgattttttttcaccattgtatttactaagttattggatttacatgaaatctggcactttagggtgttctttttctcacagagtatatttaataaaaatgctgtgtatatagaaaaaagtt

SEQ ID NO: 60690 - DNA, 3650 bp, Homo sapiens
gcaggtacttggttctccagtgggagctgccctctcgaaggcaggacagcggtggcggcagatataaagacctgaagatagtcttttctgtccaaagatggaaaacagtactactaccatttctcgggaggagcttgaagaactacaagaggcatttaataaaatagatattgacaatagtgggtatgtcagtgactatgaacttcaagacctgtttaaggaagcaagccttcctctgcctggctacaaggtgcgcgagattgtggagaaaattctatcagttgctgacagcaacaaagatggcaaaatcagttttgaagagtttgtgtcactaatgcaagaattaaaaagcaaagatatcagcaaaacattccgaaaaataattaacaagagggaagggattactgctattggaggaacttcaactatttccagtgagggcacacagcattcttattcagaggaagaaaaagtggcttttgttaactggataaacaaagccctggagaatgaccctgactgtaagcatcttatacccatgaatcccaatgatgatagtcttttcaagtcacttgcagatggcatccttctttgcaaaatgatcaacttatctgaaccagatacaattgatgaaagagccatcaataagaaaaagctcacgccattcactatttctgaaaatttaaacctagctctgaattctgcctcagccattggttgtacagtggtcaacattggtgcatcagatctcaaagaaggaaaacctcacttggtcttgggacttctctggcagatcatcaaagttggcctttttgctgatattgagatttccaggaatgaagctctgattgcattgttaaatgaaggtgaggaactagaggagctgatgaagctttctcccgaggaattactgctgcgatgggtgaactaccatctgaccaatgcaggatggcataccatcagcaacttcagccaagacattaaggactcgagagcctattttcatctgcttaatcagattgcccctaaaggtggggaagatggacctgccattgccattgacctttcaggaattaatgagacaaatgacctgaagcgtgctggactcatgcttcaagaagcagataaactgggctgcaaacagtttgttactcctgcagatgtggtttcaggcaatcctaaacttaatttagcttttgtagctaatttgtttaacacatacccgtgcctgcacaagccgaataataatgacatcgatatgaatttactggaaggagagagcaaggaagagagaacatttcggaactggatgaattccttgggagtcaacccatacattaatcatttgtacagtgaccttgcagatgctttagtgatctttcagctctatgagatgatccgagtgccagtcaactggagccatgtcaacaaacctccttatcctgcccttggagggaacatgaagaagattgaaaactgtaactatgcagtggaacttgggaagaacaaggccaaattctccttggttggcattgctgggcaggacctaaatgaaaggaattcaacacttaccctggcattggtatggcagctgatgagaaggtacacattgaatgtgttatcggatcttggagagggtgaaaaagtaaatgatgaaattataattaaatgggtcaatcagactcttaaaagtgcaaacaaaaagacttctatttccagcttcaaggataaatctataagcacaagtttacctgtcctagatttaatagatgccattgcaccaaatgcagttcgtcaagaaatgatcaggagagaaaacttatctgatgaggacaagctgaacaatgctaaatacgccatttcagttgctcgaaagatcggtgcccggatatatgcattacctgatgacctcgtagaagtgaaaccaaagatggttatgacggtgtttgcatgcttaatgggaaaaggactgaacagaataaaataatcatttcatatgattttctgccacattaaacatattgtatgcctcacagtttacaggattctgaaatgtagtgggtgtaaaaccagagattatttgtatgctcaaaatagttatatattcattaatgaattcaatatcctgttcatactagttagagctggtcagcctttttgggtaacacagttaatttaccaactgatacagataatagaatatattcataatcaagctgatacttcatgattaaattatttttgttgcttaaaagtcgtattagacaagactaaatcattcttttttatggttcaaaaaagatgaatacaaacgtttttgcaggttctgctgtgaaatgtggtttgatttttttggtgtgttaattttgatcataaatgcattcatactcataatccagtttaatccttttatttgcttcctccaactatttaaagtggtccaaaaacacttttctgtaagtttctatactgtctaaaaccttatggtgaccagaattgtttattaatatcaaacttttttatatatgagaactaattcttgaataaaccccaaagttcactctcttgtttaagtagcagcagctttttacttaaaatttaattttaactacattgatactttacacatcctagtttggtaacacagctttaactatgtcatgcaacatatatatgttggtaggatgttattagagagatatgtgtgcatatatatttttttgcacctgaatcacccagcttttcataagtggtatgtttaattggtcattcagccaaccatcagtattttccccccacaacatgtgtaacacttttcagtctgtggatatctgatacattaagatttctttttataagtattcattttgaatgtgcatatagttatttgaccccttccaaatacttgtagccaaacattggctagaacatcccaagatatgctgacactgtcctgttagcttcatattatacttgctagtttaggtctctatagaagccctatataatttagaatatgcccactgaatatctttaatagaaagtaacataaagctagtattcaatgtagagtattttcatatgtttttcacagcccgttacaaattggcaatgtttggttaatgtttgtattacttggaaatcgctacagcttggactatttttttctaaatttttagcattagtccatttctgctgctaacaattgaatccagaaatctactttctccatcttccactgttagtgccagtgagcaatactgttgtgcaacaaaaatgtcactttatctcagtgtgaatgagtagtctaaattccctttctaccattgatttaaatatatatattggtaagagagactgcccatgtgtttagaatagaattttttaaatgaaatgatcaacaggtggaatttgaaatatattcttctacaaaagagatttctttcccttttatattttgatgattgttttcttaagattaagatatgttcttgctcttttataagattatttaaattatgtttccctctgattttttttcaccattgtatttactaagttattggatttacatgaaatctggcactttagggtgttctttttctcacagagtatatttaataaaaatgctgtgtatatagaaaaaagtt

SEQ ID NO: 60691 - DNA, 3926 bp, Homo sapiens
agtcaattctccataggaacactatcaagtctttttccataaaagtcagataaaagaaagatcacatttcttgatattctttgaagcaactttatttttattgtcatgcttcatcctgcccgaatactgccaagtctttctcaggcacctggaatctgctcctcagcctctgttgtcctgggtctaatgtagagcaaaaggctgagaggaagctcttctattctccatcatcggtcttcagtggctacctgggaaacaccccttggcttagtcggcagattctctccgatataaagacctgaagatagtcttttctgtccaaagatggaaaacagtactactaccatttctcgggaggagcttgaagaactacaagaggcatttaataaaatagatattgacaatagtgggtatgtcagtgactatgaacttcaagacctgtttaaggaagcaagccttcctctgcctggctacaaggtgcgcgagattgtggagaaaattctatcagttgctgacagcaacaaagatggcaaaatcagttttgaagagtttgtgtcactaatgcaagaattaaaaagcaaagatatcagcaaaacattccgaaaaataattaacaagagggaagggattactgctattggaggaacttcaactatttccagtgagggcacacagcattcttattcagaggaagaaaaagtggcttttgttaactggataaacaaagccctggagaatgaccctgactgtaagcatcttatacccatgaatcccaatgatgatagtcttttcaagtcacttgcagatggcatccttctttgcaaaatgatcaacttatctgaaccagatacaattgatgaaagagccatcaataagaaaaagctcacgccattcactatttctgaaaatttaaacctagctctgaattctgcctcagccattggttgtacagtggtcaacattggtgcatcagatctcaaagaaggaaaacctcacttggtcttgggacttctctggcagatcatcaaagttggcctttttgctgatattgagatttccaggaatgaagctctgattgcattgttaaatgaaggtgaggaactagaggagctgatgaagctttctcccgaggaattactgctgcgatgggtgaactaccatctgaccaatgcaggatggcataccatcagcaacttcagccaagacattaaggactcgagagcctattttcatctgcttaatcagattgcccctaaaggtggggaagatggacctgccattgccattgacctttcaggaattaatgagacaaatgacctgaagcgtgctggactcatgcttcaagaagcagataaactgggctgcaaacagtttgttactcctgcagatgtggtttcaggcaatcctaaacttaatttagcttttgtagctaatttgtttaacacatacccgtgcctgcacaagccgaataataatgacatcgatatgaatttactggaaggagagagcaaggaagagagaacatttcggaactggatgaattccttgggagtcaacccatacattaatcatttgtacagtgaccttgcagatgctttagtgatctttcagctctatgagatgatccgagtgccagtcaactggagccatgtcaacaaacctccttatcctgcccttggagggaacatgaagaagattgaaaactgtaactatgcagtggaacttgggaagaacaaggccaaattctccttggttggcattgctgggcaggacctaaatgaaaggaattcaacacttaccctggcattggtatggcagctgatgagaaggtacacattgaatgtgttatcggatcttggagagggtgaaaaagtaaatgatgaaattataattaaatgggtcaatcagactcttaaaagtgcaaacaaaaagacttctatttccagcttcaaggataaatctataagcacaagtttacctgtcctagatttaatagatgccattgcaccaaatgcagttcgtcaagaaatgatcaggagagaaaacttatctgatgaggacaagctgaacaatgctaaatacgccatttcagttgctcgaaagatcggtgcccggatatatgcattacctgatgacctcgtagaagtgaaaccaaagatggttatgacggtgtttgcatgcttaatgggaaaaggactgaacagaataaaataatcatttcatatgattttctgccacattaaacatattgtatgcctcacagtttacaggattctgaaatgtagtgggtgtaaaaccagagattatttgtatgctcaaaatagttatatattcattaatgaattcaatatcctgttcatactagttagagctggtcagcctttttgggtaacacagttaatttaccaactgatacagataatagaatatattcataatcaagctgatacttcatgattaaattatttttgttgcttaaaagtcgtattagacaagactaaatcattcttttttatggttcaaaaaagatgaatacaaacgtttttgcaggttctgctgtgaaatgtggtttgatttttttggtgtgttaattttgatcataaatgcattcatactcataatccagtttaatccttttatttgcttcctccaactatttaaagtggtccaaaaacacttttctgtaagtttctatactgtctaaaaccttatggtgaccagaattgtttattaatatcaaacttttttatatatgagaactaattcttgaataaaccccaaagttcactctcttgtttaagtagcagcagctttttacttaaaatttaattttaactacattgatactttacacatcctagtttggtaacacagctttaactatgtcatgcaacatatatatgttggtaggatgttattagagagatatgtgtgcatatatatttttttgcacctgaatcacccagcttttcataagtggtatgtttaattggtcattcagccaaccatcagtattttccccccacaacatgtgtaacacttttcagtctgtggatatctgatacattaagatttctttttataagtattcattttgaatgtgcatatagttatttgaccccttccaaatacttgtagccaaacattggctagaacatcccaagatatgctgacactgtcctgttagcttcatattatacttgctagtttaggtctctatagaagccctatataatttagaatatgcccactgaatatctttaatagaaagtaacataaagctagtattcaatgtagagtattttcatatgtttttcacagcccgttacaaattggcaatgtttggttaatgtttgtattacttggaaatcgctacagcttggactatttttttctaaatttttagcattagtccatttctgctgctaacaattgaatccagaaatctactttctccatcttccactgttagtgccagtgagcaatactgttgtgcaacaaaaatgtcactttatctcagtgtgaatgagtagtctaaattccctttctaccattgatttaaatatatatattggtaagagagactgcccatgtgtttagaatagaattttttaaatgaaatgatcaacaggtggaatttgaaatatattcttctacaaaagagatttctttcccttttatattttgatgattgttttcttaagagcaagaacatatcttaatcttaagaaacaatcattcaaaatataaaaggttaagatatgttcttgctcttttataagattatttaaattatgtttccctctgattttttttcaccattgtatttactaagttattggatttacatgaaatctggcactttagggtgttctttttctcacagagtatatttaataaaaatgctgtgtatatagaaaaaagtt

SEQ ID NO: 60692 - DNA, 142 bp, Homo sapiens
aggcaattgctacaggaacaaggccaggggcctactgtaatttagcctttgcaaacaaagctaaaaatatcaaaacatgatattatagcaacccctttgtctttttggtttccagtcattagaagcatgttttttgtcttgt

SEQ ID NO: 60693 - DNA, 1030 bp, Homo sapiens
agcgcccattggccagcggaacgcgtcgcgtcacaatggagccggtcggaggcggcgagccggacagcgccggggcttcccgctgagcccgcagcctccggcagccgggaaagtgcgggcgcggggccgcagcctgcccgcccggagcggcccaggagcacgccgcggggagcgcgggcgtccggggctggagtcgcgcagaatcctcagagtgaaaacaccaacaggctccagtttgtgttttcagctgcctactagacctcactacctggatggcccacaggtaatagttaacctcttctgtgagaagtcagaaggtgatctctttaatgctttctttttaagaatttttcaaattgagactaattgcagaggttccagttgaccagcattcataggaatgaagacaaacacagagatggtgtgtctaagaaacttcaaaaggtgtagacctcctgactgaagcatattggatttatttaatttttttcactgtatttctgtcctcctacaagggaaagtcatgattacactaactgagctaaaatgcttagcagatgctcagtcatcttatcacatcttaaaaccatggtgggacgtcttctggtattacatcacactgatcatgctgctggtggccgtgctggccggagctctccagctgacgcagagcagggttctgtgctgtcttccatgcaaagtggaatttgacaatcactgtgccgtgccttgggacatcctgaaagccagcatgaacacatcctctaatcctgggacaccgcttccgctccccctccgaattcagaaatgacctccaccgacagcagtactcctatattgatgccgtctgttacgagaaacagctccattggtttgcaaagtttttcccctatctggtgctcttgcacacgctcatctttgcagcctgcagcaacttttggcttcactaccccagtaccagttccaggctcgagcattttgtggccatccttcacaagtgcttcgattctccatggaccacccgcgccct

SEQ ID NO: 60694 - DNA, 832 bp, Homo sapiens
agcgcccattggccagcggaacgcgtcgcgtcacaatggagccggtcggaggcggcgagccggacagcgccggggcttcccgctgagcccgcagcctccggcagccgggaaagtgcgggcgcggggccgcagcctgcccgcccggagcggcccaggagcacgccgcggggagcgcgggcgtccggggctggagtcgcgcagaatgaagacaaacacagagatggtgtgtctaagaaacttcaaaaggtgtagacctcctgactgaagcatattggatttatttaatttttttcactgtatttctgtcctcctacaagggaaagtcatgattacactaactgagctaaaatgcttagcagatgctcagtcatcttatcacatcttaaaaccatggtgggacgtcttctggtattacatcacactgatcatgctgctggtggccgtgctggccggagctctccagctgacgcagagcagggttctgtgctgtcttccatgcaaagtggaatttgacaatcactgtgccgtgccttgggacatcctgaaagccagcatgaacacatcctctaatcctgggacaccgcttccgctccccctccgaattcagaaatgacctccaccgacagcagtactcctatattgatgccgtctgttacgagaaacagctccattggtttgcaaagtttttcccctatctggtgctcttgcacacgctcatctttgcagcctgcagcaacttttggcttcactaccccagtaccagttccaggctcgagcattttgtggccatccttcacaagtgcttcgattctccatggaccacccgcgccct

SEQ ID NO: 60695 - DNA, 948 bp, Homo sapiens
agcgcccattggccagcggaacgcgtcgcgtcacaatggagccggtcggaggcggcgagccggacagcgccggggcttcccgctgagcccgcagcctccggcagccgggaaagtgcgggcgcggggccgcagcctgcccgcccggagcggcccaggagcacgccgcggggagcgcgggcgtccggggctggagtcgcgcaggtaatagttaacctcttctgtgagaagtcagaaggtgatctctttaatgctttctttttaagaatttttcaaattgagactaattgcagaggttccagttgaccagcattcataggaatgaagacaaacacagagatggtgtgtctaagaaacttcaaaaggtgtagacctcctgactgaagcatattggatttatttaatttttttcactgtatttctgtcctcctacaagggaaagtcatgattacactaactgagctaaaatgcttagcagatgctcagtcatcttatcacatcttaaaaccatggtgggacgtcttctggtattacatcacactgatcatgctgctggtggccgtgctggccggagctctccagctgacgcagagcagggttctgtgctgtcttccatgcaaagtggaatttgacaatcactgtgccgtgccttgggacatcctgaaagccagcatgaacacatcctctaatcctgggacaccgcttccgctccccctccgaattcagaaatgacctccaccgacagcagtactcctatattgatgccgtctgttacgagaaacagctccattggtttgcaaagtttttcccctatctggtgctcttgcacacgctcatctttgcagcctgcagcaacttttggcttcactaccccagtaccagttccaggctcgagcattttgtggccatccttcacaagtgcttcgattctccatggaccacccgcgccct

SEQ ID NO: 60696 - DNA, 568 bp, Homo sapiens
gcttcagtagtgtttcttttatttccctcttccagtttctgtcctcctacaagggaaagtcatgattacactaactgagctaaaatgcttagcagatgctcagtcatcttatcacatcttaaaaccatggtgggacgtcttctggtattacatcacactgatcatgctgctggtggccgtgctggccggagctctccagctgacgcagagcagggttctgtgctgtcttccatgcaaagtggaatttgacaatcactgtgccgtgccttgggacatcctgaaagccagcatgaacacatcctctaatcctgggacaccgcttccgctccccctccgaattcagaaatgacctccaccgacagcagtactcctatattgatgccgtctgttacgagaaacagctccattggtttgcaaagtttttcccctatctggtgctcttgcacacgctcatctttgcagcctgcagcaacttttggcttcactaccccagtaccagttccaggctcgagcattttgtggccatccttcacaagtgcttcgattctccatggaccacccgcgccct

SEQ ID NO: 60697 - DNA, 1005 bp, Homo sapiens
agcgcccattggccagcggaacgcgtcgcgtcacaatggagccggtcggaggcggcgagccggacagcgccggggcttcccgctgagcccgcagcctccggcagccgggaaagtgcgggcgcggggccgcagcctgcccgcccggagcggcccaggagcacgccgcggggagcgcgggcgtccggggctggagtcgcgcagggctccagtttgtgttttcagctgcctactagacctcactacctggatggcccacaggtaatagttaacctcttctgtgagaagtcagaaggtgatctctttaatgctttctttttaagaatttttcaaattgagactaattgcagaggttccagttgaccagcattcataggaatgaagacaaacacagagatggtgtgtctaagaaacttcaaaaggtgtagacctcctgactgaagcatattggatttatttaatttttttcactgtatttctgtcctcctacaagggaaagtcatgattacactaactgagctaaaatgcttagcagatgctcagtcatcttatcacatcttaaaaccatggtgggacgtcttctggtattacatcacactgatcatgctgctggtggccgtgctggccggagctctccagctgacgcagagcagggttctgtgctgtcttccatgcaaagtggaatttgacaatcactgtgccgtgccttgggacatcctgaaagccagcatgaacacatcctctaatcctgggacaccgcttccgctccccctccgaattcagaaatgacctccaccgacagcagtactcctatattgatgccgtctgttacgagaaacagctccattggtttgcaaagtttttcccctatctggtgctcttgcacacgctcatctttgcagcctgcagcaacttttggcttcactaccccagtaccagttccaggctcgagcattttgtggccatccttcacaagtgcttcgattctccatggaccacccgcgccct

SEQ ID NO: 60698 - DNA, 973 bp, Homo sapiens
agcgcccattggccagcggaacgcgtcgcgtcacaatggagccggtcggaggcggcgagccggacagcgccggggcttcccgctgagcccgcagcctccggcagccgggaaagtgcgggcgcggggccgcagcctgcccgcccggagcggcccaggagcacgccgcggggagcgcgggcgtccggggctggagtcgcgcagaatcctcagagtgaaaacaccaacagtaatagttaacctcttctgtgagaagtcagaaggtgatctctttaatgctttctttttaagaatttttcaaattgagactaattgcagaggttccagttgaccagcattcataggaatgaagacaaacacagagatggtgtgtctaagaaacttcaaaaggtgtagacctcctgactgaagcatattggatttatttaatttttttcactgtatttctgtcctcctacaagggaaagtcatgattacactaactgagctaaaatgcttagcagatgctcagtcatcttatcacatcttaaaaccatggtgggacgtcttctggtattacatcacactgatcatgctgctggtggccgtgctggccggagctctccagctgacgcagagcagggttctgtgctgtcttccatgcaaagtggaatttgacaatcactgtgccgtgccttgggacatcctgaaagccagcatgaacacatcctctaatcctgggacaccgcttccgctccccctccgaattcagaaatgacctccaccgacagcagtactcctatattgatgccgtctgttacgagaaacagctccattggtttgcaaagtttttcccctatctggtgctcttgcacacgctcatctttgcagcctgcagcaacttttggcttcactaccccagtaccagttccaggctcgagcattttgtggccatccttcacaagtgcttcgattctccatggaccacccgcgccct

SEQ ID NO: 60699 - DNA, 1356 bp, Homo sapiens
agcgcccattggccagcggaacgcgtcgcgtcacaatggagccggtcggaggcggcgagccggacagcgccggggcttcccgctgagcccgcagcctccggcagccgggaaagtgcgggcgcggggccgcagcctgcccgcccggagcggcccaggagcacgccgcggggagcgcgggcgtccggggctggagtcgcgcagaatcctcagagtgaaaacaccaacaggctccagtttgtgttttcagctgcctactagacctcactacctggatggcccacagctctggagactggaaggtccaagatcaagatactacagatttgatttctggacgttgaacatggtgtaggagtagaaaagcaacagggacggaaggagagaacttaccccttcaagcccttttataaggcactaaatcccatcattgagggcagagtcctcatagcctaatcacctcctaaatgctccatttcttaatattgttgcactgaggattaagcttcaacatgaattctgaagaggacacaaacatccaaaccatagcagtcaatgccttagcccttgatgttgctatcaacctgagattcggggatcaaggaaggacaggtaatagttaacctcttctgtgagaagtcagaaggtgatctctttaatgctttctttttaagaatttttcaaattgagactaattgcagaggttccagttgaccagcattcataggaatgaagacaaacacagagatggtgtgtctaagaaacttcaaaaggtgtagacctcctgactgaagcatattggatttatttaatttttttcactgtatttctgtcctcctacaagggaaagtcatgattacactaactgagctaaaatgcttagcagatgctcagtcatcttatcacatcttaaaaccatggtgggacgtcttctggtattacatcacactgatcatgctgctggtggccgtgctggccggagctctccagctgacgcagagcagggttctgtgctgtcttccatgcaaagtggaatttgacaatcactgtgccgtgccttgggacatcctgaaagccagcatgaacacatcctctaatcctgggacaccgcttccgctccccctccgaattcagaaatgacctccaccgacagcagtactcctatattgatgccgtctgttacgagaaacagctccattggtttgcaaagtttttcccctatctggtgctcttgcacacgctcatctttgcagcctgcagcaacttttggcttcactaccccagtaccagttccaggctcgagcattttgtggccatccttcacaagtgcttcgattctccatggaccacccgcgccct

SEQ ID NO: 60700 - DNA, 1331 bp, Homo sapiens
agcgcccattggccagcggaacgcgtcgcgtcacaatggagccggtcggaggcggcgagccggacagcgccggggcttcccgctgagcccgcagcctccggcagccgggaaagtgcgggcgcggggccgcagcctgcccgcccggagcggcccaggagcacgccgcggggagcgcgggcgtccggggctggagtcgcgcagggctccagtttgtgttttcagctgcctactagacctcactacctggatggcccacagctctggagactggaaggtccaagatcaagatactacagatttgatttctggacgttgaacatggtgtaggagtagaaaagcaacagggacggaaggagagaacttaccccttcaagcccttttataaggcactaaatcccatcattgagggcagagtcctcatagcctaatcacctcctaaatgctccatttcttaatattgttgcactgaggattaagcttcaacatgaattctgaagaggacacaaacatccaaaccatagcagtcaatgccttagcccttgatgttgctatcaacctgagattcggggatcaaggaaggacaggtaatagttaacctcttctgtgagaagtcagaaggtgatctctttaatgctttctttttaagaatttttcaaattgagactaattgcagaggttccagttgaccagcattcataggaatgaagacaaacacagagatggtgtgtctaagaaacttcaaaaggtgtagacctcctgactgaagcatattggatttatttaatttttttcactgtatttctgtcctcctacaagggaaagtcatgattacactaactgagctaaaatgcttagcagatgctcagtcatcttatcacatcttaaaaccatggtgggacgtcttctggtattacatcacactgatcatgctgctggtggccgtgctggccggagctctccagctgacgcagagcagggttctgtgctgtcttccatgcaaagtggaatttgacaatcactgtgccgtgccttgggacatcctgaaagccagcatgaacacatcctctaatcctgggacaccgcttccgctccccctccgaattcagaaatgacctccaccgacagcagtactcctatattgatgccgtctgttacgagaaacagctccattggtttgcaaagtttttcccctatctggtgctcttgcacacgctcatctttgcagcctgcagcaacttttggcttcactaccccagtaccagttccaggctcgagcattttgtggccatccttcacaagtgcttcgattctccatggaccacccgcgccct

SEQ ID NO: 60701 - DNA, 1515 bp, Homo sapiens
caaaccagctagcctagctgaagagaagagggaagggggaagaggccagagaaaggaggaggcagtcagatcttagacctgtcgctacagggacagcttgaaagaagtagcactaagaaagatcatccgagcagtccccagtacagcccccactttttggcagaggttgggtaaggcttatgcgcaccgtgcctccctacatgcaacatcatttgtgtcatagagggagataactctattcagactctgcatcttgcttatcctggctacaagttagggagcttagaaagtatatctattggtacccactgtgtagtctagaatggtgacgcacacaagatgggacaattaggctcaatcctggctttggagttcagggagtcaaaggccaacacctggggccatattttcagaataaggaatgtaaatgtattcctcacagctctggagactggaaggtccaagatcaagatactacagatttgatttctggacgttgaacatggtgtaggagtagaaaagcaacagggacggaaggagagaacttaccccttcaagcccttttataaggcactaaatcccatcattgagggcagagtcctcatagcctaatcacctcctaaatgctccatttcttaatattgttgcactgaggattaagcttcaacatgaattctgaagaggacacaaacatccaaaccatagcagtcaatgccttagcccttgatgttgctatcaacctgagattcggggatcaaggaaggacaggtaatagttaacctcttctgtgagaagtcagaaggtgatctctttaatgctttctttttaagaatttttcaaattgagactaattgcagaggttccagttgaccagcattcataggaatgaagacaaacacagagatggtgtgtctaagaaacttcaaaaggtgtagacctcctgactgaagcatattggatttatttaatttttttcactgtatttctgtcctcctacaagggaaagtcatgattacactaactgagctaaaatgcttagcagatgctcagtcatcttatcacatcttaaaaccatggtgggacgtcttctggtattacatcacactgatcatgctgctggtggccgtgctggccggagctctccagctgacgcagagcagggttctgtgctgtcttccatgcaaagtggaatttgacaatcactgtgccgtgccttgggacatcctgaaagccagcatgaacacatcctctaatcctgggacaccgcttccgctccccctccgaattcagaaatgacctccaccgacagcagtactcctatattgatgccgtctgttacgagaaacagctccattggtttgcaaagtttttcccctatctggtgctcttgcacacgctcatctttgcagcctgcagcaacttttggcttcactaccccagtaccagttccaggctcgagcattttgtggccatccttcacaagtgcttcgattctccatggaccacccgcgccct

SEQ ID NO: 60702 - DNA, 246 bp, Homo sapiens
agaaggggctagtttaagagaccattggatttgagggaatagaggaagagaaagtttctgggttaggtgcctgccttagtctgtttgtgctgctgtaacaaaacacctaaaactgggtaatttataagtaacgtaaatgtattcctcacagctctggagactggaaggtccaagatcaagatactacagatttgatttctggacgttgaacatggtgtaggagtagaaaagcaacagggacggaag

SEQ ID NO: 60703 - DNA, 481 bp, Homo sapiens
attttaaaatatgttgtgtttaaattgctgtgggaactaacctgtaattgaaaggaagttcagggagtgagtatggtttaatgaatgtgagtggggccctgtagatacacctttgccagaatgtgccccagtgtgaaaagtaaactgacctatgaaaatctaagccaggcacagtggctcacacctgtaatcccagcatttgagaggccaaggtggaaggattgcttgaggcccagagtgtgaaaatctatttgccatgtcatgtcttatgactgagagggcttctggagacagtatctccagtttgtttgtttgaatgactgtagctatttcaagatatctatgttttctcatagaatgaagacaaacacagagatggtgtgtctaagaaacttcaaaaggtgtagacctcctgactgaagcatattggatttatttaatttttttcactgtagtaagtataaatatttaaaacactttt

SEQ ID NO: 60704 - DNA, 4447 bp, Homo sapiens
agaggaggatccgggaagccggctgcggcgggaggagggaatgcgcgtgcgcgctggaccgcctcgtcccgttccgtcccaatcattgtaaacaggcagaggctgggcggggtgggaatggggcgcccgaggccggcctggggcgcagcgcaggaggcggctccggtggctgcggcggcagcgtgagcgcgaggaggcggaggctgcggcggggcggacggtcgcgcggcggcaggcacaggtgtaatggataggtaacagagaagacctcgtcccttcctagtcagggcatcagcatgactgagtgcttcctgccccccaccagcagccccagtgaacaccgcagggtggagcatggcagcgggcttacccggacccccagctctgaagagatcagccctactaagtttcctggattgtaccgcactggcgagccctcacctccccatgacatcctccatgagcctcctgatgtagtgtctgatgatgagaaagatcatgggaagaaaaaagggaaatttaagaaaaaggaaaagaggactgaaggctatgcagcctttcaggaagatagctctggagatgaggcagaaagtccttctaaaatgaagaggtccaagggaatccatgttttcaagaagcccagcttttctaaaaagaaggaaaaggattttaaaataaaagagaaacccaaagaagaaaagcataaagaagaaaagcacaaagaagaaaaacataaagagaagaagtcaaaagacttgacagcagctgatgttgttaaacagtggaaggaaaagaagaaaaagaaaaagccaattcaggagccagaggtgcctcagattgatgttccaaatctcaaacccatttttggaattcctttggctgatgcagtagagaggaccatgatgtatgatggcattcggctgccagccgttttccgtgaatgtatagattacgtagagaagtatggcatgaagtgtgaaggcatctacagagtatcaggaattaaatcaaaggtggatgagctaaaagcagcctatgaccgggaggagtctacaaacttggaagactatgagcctaacactgtagccagtttgctgaagcagtatttgcgagaccttccagagaatttgcttaccaaagagcttatgcccagatttgaagaggcttgtgggaggaccacggagactgagaaagtgcaggaattccagcgtttactcaaagaactgccagaatgtaactatcttctgatttcttggctcattgtgcacatggaccatgtcattgcaaaggaactggaaacaaaaatgaatatacagaacatttctatagtgctcagcccaactgtgcagatcagcaatcgagtcctgtatgtgtttttcacacatgtgcaagaactctttggaaatgtggtactaaagcaagtgatgaaacctctgcgatggtctaacatggccacgatgcccacgctgccagagacccaggcgggcatcaaggaggagatcaggagacaggagtttcttttgaattgtttacatcgagatctgcagggtgggataaaggatttgtctaaagaagaaagattatgggaagtacaaagaattttgacagccctcaaaagaaaactgagagaagctaaaagacaggagtgtgaaaccaagattgcacaagagatagccagtctttcaaaagaggatgtttccaaagaagagatgaatgaaaatgaagaagttataaatattctccttgctcaggagaatgagatcctgactgaacaggaggagctcctggccatggagcagtttctgcgccggcagattgcctcagaaaaagaagagattgaacgcctcagagctgagattgctgaaattcagagtcgccagcagcacggccgaagtgagactgaggagtactcctccgagagcgagagcgagagtgaggatgaggaggagctgcagatcattctggaagacttacagagacagaacgaagagctggaaataaagaacaatcatttgaatcaagcaattcatgaggagcgcgaggccatcatcgagctgcgcgtgcagctgcggctgctccagatgcagcgagccaaggccgagcagcaggcgcaggaggacgaggagcctgagtggcgcgggggtgccgtccagccgcccagagacggcgtccttgagccaaaagcagctaaagagcagccaaaggcaggcaaggagccggcaaagccatcgcccagcagggataggaaggagacgtccatctgagcagcctgcgtggccgtctggagtccgtgagactgaaaggacccgtgcatcttactgtaacccgggggccaggccggctctctcgctgtacattctgtaaaggtgtcttctcttctcagactcttcctctgtcacacgtctgactccttcacgtcaggctcaggttccatgggaggacgaagcagtggacgcattgtgggctttagggacagatgagttttccagatagtgtcagcttatttgaagattaattttctttgttaacttaaaataactattttaacccttgagtggcttctttttaaaccaaaaaccgtctttctttgcttttttatcacagcagaatcaggatctctttctcattcaaggggggaaccacaccaggtcagcgctgcgcctgctgtggccgccgcgagccacgccctctgggatctctggtaccgtcactcttgcttgtgccttccacaccttctcggtgcagatccctatgggggagctgcctcacgttctctgactggtcagagcagcgcctggtgggtgttccctggcccactctcctctctccttctgcagttctaaaccacagtctataagcccgagtcaccaggacggcctgtctggccacagacaggggctgcctgtggagcctgcccaccggcccccggcagtgcagtccagcggggaggaggctgcccgttcctgccagttcctcactgcggggaccagcaaaggccttctcactgggttggtcaaaggtagtcaccttggcctggtgcatccacagaggatgttgttcaaaccagaaatcttttaaacgactgaccttccttaaaaacagaatgactccgattgcttgcttgggctagaatgtacacgtctccttgcctgaataagccatatatatgctcttaaacaaaagtttgaaattatccatatcatctcagtgaacctactggtggactcccaattgacaagattgagcaatagaaaaaaattcctttcctttgaatgatagctgtgattcaccccaccccattttcttgtttctggtccatccgatgagacggatgctctgatgctctgaggcttctgggaggctgggccctggaggcaacgtgctgcaggcgcactctgtcagagtgaacagcaccgcgagacaggccaggctcgtggctcggaagacaaaccccacacacactcaaggggtcgaaaacaaaccccacacgagggctctcacctccttctcctaggtagtatttattttcagcacctgtttgatgcagtttttaatcctctacctattgcactgttgtgactcgttggccattatttgatttttgtacgaaaaaaagctttgttatagaaatcagcatactatttttttaaatctggagagaagatattctggtgactgaaagtatggtcgggtgtcagatataaatgtgcaaatgccttcttgctgtcctgtcggtctcagtacgttcactttatagctgctggcaatatcgaaggttccttttttgtttgtgtaaactctaatttctatcaaggtgtcatggatttttaaaattagtatttcattacaaatgtctcagcattggttaactaatttttgccaggaccattattgatcaagcaaataaattcaacagccatttgggaaaaagaaaagcttctagtttttttgtacacattctttctgtgaggagattgagtactctgcagctggcgaggagttggttgaggcacttcttcaaggccaagggggaacacagtgttttgtttccagctcactttgtacccctcacctctgcagacacggggagaaccccggacccctggcatgcatgctggcggcggcatgcctcccttccacaagcccatgctgctgcagagggagcctgtgtttgcaaaacccagtggactgggctgggtctgctgtctgagcagctcctggctccggtgggaactgcacacaagtccactggcctggcttggccccaggcattgcaattgacagacatttgcatttcatacggtaaatgaggactcagcacagccaaccataatcagcatgtctgggatagactggtctagaataaaaatgaagtttccattgctttgtttgctttaaaaattccacaattaaaatatctgtcattgaaagcttagaaaaaaaaaaa

SEQ ID NO: 60705 - DNA, 1060 bp, Homo sapiens
agaggaggatccgggaagccggctgcggcgggaggagggaatgcgcgtgcgcgctggaccgcctcgtcccgttccgtcccaatcattgtaaacaggcagaggctgggcggggtgggaatggggcgcccgaggccggcctggggcgcagcgcaggaggcggctccggtggctgcggcggcagcgtgagcgcgaggaggcggaggctgcggcggggcggacggtcgcgcggcggcaggcacaggtgtaatggataggtaacagagaagacctcgtcccttcctagtcagggcatcagcatgactgagtgcttcctgccccccaccagcagccccagtgaacaccgcagggtggagcatggcagcgggcttacccggacccccagctctgaagagatcagccctactaagtttcctggattgtaccgcactggcgagccctcacctccccatgacatcctccatgagcctcctgatgtagtgtctgatgatgagaaagatcatgggaagaaaaaagggaaatttaagaaaaaggaaaagaggactgaaggctatgcagcctttcaggaagatagctctggagatgaggcagaaagtccttctaaaatgaagaggtccaagggaatccatgttttcaagaagcccagcttttctaaaaagaaggaaaaggattttaaaataaaagagaaacccaaagaagaaaagcataaagaagaaaagcacaacaaacaagcgcaaccagcacagcacaaccgcgcgacacacagacctcagcacacacgaacacccgggggggggcgggtaccaattggcctaagggagcggatacaatcacgggcgcggataaacgtgtgatgggaaaacgtggtacaattatggctggcagatccttgggctggtataaaaagcgcggatggtcaaatgaccgtaggaggatgaagaaatgaagagggactgaaactatcggaggacatgaggggttgggacaatcggactgttctcttttagttgttggtgtttctattagtgagagagagagacaggtaggaagagcgagcaggggg

SEQ ID NO: 60706 - DNA, 850 bp, Homo sapiens
gaaagtcaaagaccaatggctacctcagaccatcccgtatccactcgtgggaggcccctgaatgaatctaaggccccaggggttgaactttactgagtagggagcgcagagtactagggacaaatttaccgcccgctttgaggaaagctgatgtgggagcagagagcaagatggatagcagcggccaatctaaacgggcaacgaagtgccacagagtgctgcacgtaggaatgcgagtgacaggtagggtcgtctattccaagtccctcctctcccctaataaactgccacatttcagaaaacacgaagactgctgaagccgtttccagccttcgctacgcattagcagagcaactcaacaagcctgggtgaaaggcttctcgaagaaattcagttatctctactgccagccaaacacggactgggcagctttcctcgggggctgctcggtaactgctgagccgggggcgcgctgaagccctgcagaagcccacacccgcttcaggaattccgtggatgttcccgacagaggtttattcccgcctatccctacaggcccacggcgctctttcctccaatcccacacccagtcgaaggcggggcagccgccccacccagcggccagccgggcggcccccagtctggtttaactggttggaacgactaaagcacgctggcgcaaggaaagctctcaacttcgggagctgaggcgcaggctggccagagcgtggagaggaaagccctttccatcctcaaggccgttgcaggagatgcccgcgagccaccttcgccagcaccacaccggggtaagccgtccgtccccgaaacccgcaaggccaccgactgcgca

SEQ ID NO: 60707 - DNA, 5012 bp, Homo sapiens
gaaagtcaaagaccaatggctacctcagaccatcccgtatccactcgtgggaggcccctgaatgaatctaaggccccaggggttgaactttactgagtagggagcgcagagtactagggacaaatttaccgcccgctttgaggaaagctgatgtgggagcagagagcaagatggatagcagcggccaatctaaacgggcaacgaagtgccacagagtgctgcacgtaggaatgcgagtgacaggtagggtcgtctattccaagtccctcctctcccctaataaactgccacatttcagaaaacacgaagactgctgaagccgtttccagccttcgctacgcattagcagagcaactcaacaagcctgggtgaaaggcttctcgaagaaattcagttatctctactgccagccaaacacggactgggcagctttcctcgggggctgctcggtaactgctgagccgggggcgcgctgaagccctgcagaagcccacacccgcttcaggaattccgtggatgttcccgacagaggtttattcccgcctatccctacaggcccacggcgctctttcctccaatcccacacccagtcgaaggcggggcagccgccccacccagcggccagccgggcggcccccagtctggtttaactggttggaacgactaaagcacgctggcgcaaggaaagctctcaacttcgggagctgaggcgcaggctggccagagcgtggagaggaaagccctttccatcctcaaggccgttgcaggagatgcccgcgagccaccttcgccagcaccacaccggggtgtaatggataggtaacagagaagacctcgtcccttcctagtcagggcatcagcatgactgagtgcttcctgccccccaccagcagccccagtgaacaccgcagggtggagcatggcagcgggcttacccggacccccagctctgaagagatcagccctactaagtttcctggattgtaccgcactggcgagccctcacctccccatgacatcctccatgagcctcctgatgtagtgtctgatgatgagaaagatcatgggaagaaaaaagggaaatttaagaaaaaggaaaagaggactgaaggctatgcagcctttcaggaagatagctctggagatgaggcagaaagtccttctaaaatgaagaggtccaagggaatccatgttttcaagaagcccagcttttctaaaaagaaggaaaaggattttaaaataaaagagaaacccaaagaagaaaagcataaagaagaaaagcacaaagaagaaaaacataaagagaagaagtcaaaagacttgacagcagctgatgttgttaaacagtggaaggaaaagaagaaaaagaaaaagccaattcaggagccagaggtgcctcagattgatgttccaaatctcaaacccatttttggaattcctttggctgatgcagtagagaggaccatgatgtatgatggcattcggctgccagccgttttccgtgaatgtatagattacgtagagaagtatggcatgaagtgtgaaggcatctacagagtatcaggaattaaatcaaaggtggatgagctaaaagcagcctatgaccgggaggagtctacaaacttggaagactatgagcctaacactgtagccagtttgctgaagcagtatttgcgagaccttccagagaatttgcttaccaaagagcttatgcccagatttgaagaggcttgtgggaggaccacggagactgagaaagtgcaggaattccagcgtttactcaaagaactgccagaatgtaactatcttctgatttcttggctcattgtgcacatggaccatgtcattgcaaaggaactggaaacaaaaatgaatatacagaacatttctatagtgctcagcccaactgtgcagatcagcaatcgagtcctgtatgtgtttttcacacatgtgcaagaactctttggaaatgtggtactaaagcaagtgatgaaacctctgcgatggtctaacatggccacgatgcccacgctgccagagacccaggcgggcatcaaggaggagatcaggagacaggagtttcttttgaattgtttacatcgagatctgcagggtgggataaaggatttgtctaaagaagaaagattatgggaagtacaaagaattttgacagccctcaaaagaaaactgagagaagctaaaagacaggagtgtgaaaccaagattgcacaagagatagccagtctttcaaaagaggatgtttccaaagaagagatgaatgaaaatgaagaagttataaatattctccttgctcaggagaatgagatcctgactgaacaggaggagctcctggccatggagcagtttctgcgccggcagattgcctcagaaaaagaagagattgaacgcctcagagctgagattgctgaaattcagagtcgccagcagcacggccgaagtgagactgaggagtactcctccgagagcgagagcgagagtgaggatgaggaggagctgcagatcattctggaagacttacagagacagaacgaagagctggaaataaagaacaatcatttgaatcaagcaattcatgaggagcgcgaggccatcatcgagctgcgcgtgcagctgcggctgctccagatgcagcgagccaaggccgagcagcaggcgcaggaggacgaggagcctgagtggcgcgggggtgccgtccagccgcccagagacggcgtccttgagccaaaagcagctaaagagcagccaaaggcaggcaaggagccggcaaagccatcgcccagcagggataggaaggagacgtccatctgagcagcctgcgtggccgtctggagtccgtgagactgaaaggacccgtgcatcttactgtaacccgggggccaggccggctctctcgctgtacattctgtaaaggtgtcttctcttctcagactcttcctctgtcacacgtctgactccttcacgtcaggctcaggttccatgggaggacgaagcagtggacgcattgtgggctttagggacagatgagttttccagatagtgtcagcttatttgaagattaattttctttgttaacttaaaataactattttaacccttgagtggcttctttttaaaccaaaaaccgtctttctttgcttttttatcacagcagaatcaggatctctttctcattcaaggggggaaccacaccaggtcagcgctgcgcctgctgtggccgccgcgagccacgccctctgggatctctggtaccgtcactcttgcttgtgccttccacaccttctcggtgcagatccctatgggggagctgcctcacgttctctgactggtcagagcagcgcctggtgggtgttccctggcccactctcctctctccttctgcagttctaaaccacagtctataagcccgagtcaccaggacggcctgtctggccacagacaggggctgcctgtggagcctgcccaccggcccccggcagtgcagtccagcggggaggaggctgcccgttcctgccagttcctcactgcggggaccagcaaaggccttctcactgggttggtcaaaggtagtcaccttggcctggtgcatccacagaggatgttgttcaaaccagaaatcttttaaacgactgaccttccttaaaaacagaatgactccgattgcttgcttgggctagaatgtacacgtctccttgcctgaataagccatatatatgctcttaaacaaaagtttgaaattatccatatcatctcagtgaacctactggtggactcccaattgacaagattgagcaatagaaaaaaattcctttcctttgaatgatagctgtgattcaccccaccccattttcttgtttctggtccatccgatgagacggatgctctgatgctctgaggcttctgggaggctgggccctggaggcaacgtgctgcaggcgcactctgtcagagtgaacagcaccgcgagacaggccaggctcgtggctcggaagacaaaccccacacacactcaaggggtcgaaaacaaaccccacacgagggctctcacctccttctcctaggtagtatttattttcagcacctgtttgatgcagtttttaatcctctacctattgcactgttgtgactcgttggccattatttgatttttgtacgaaaaaaagctttgttatagaaatcagcatactatttttttaaatctggagagaagatattctggtgactgaaagtatggtcgggtgtcagatataaatgtgcaaatgccttcttgctgtcctgtcggtctcagtacgttcactttatagctgctggcaatatcgaaggttccttttttgtttgtgtaaactctaatttctatcaaggtgtcatggatttttaaaattagtatttcattacaaatgtctcagcattggttaactaatttttgccaggaccattattgatcaagcaaataaattcaacagccatttgggaaaaagaaaagcttctagtttttttgtacacattctttctgtgaggagattgagtactctgcagctggcgaggagttggttgaggcacttcttcaaggccaagggggaacacagtgttttgtttccagctcactttgtacccctcacctctgcagacacggggagaaccccggacccctggcatgcatgctggcggcggcatgcctcccttccacaagcccatgctgctgcagagggagcctgtgtttgcaaaacccagtggactgggctgggtctgctgtctgagcagctcctggctccggtgggaactgcacacaagtccactggcctggcttggccccaggcattgcaattgacagacatttgcatttcatacggtaaatgaggactcagcacagccaaccataatcagcatgtctgggatagactggtctagaataaaaatgaagtttccattgctttgtttgctttaaaaattccacaattaaaatatctgtcattgaaagcttagaaaaaaaaaaa

SEQ ID NO: 60708 - DNA, 4958 bp, Homo sapiens
gaaagtcaaagaccaatggctacctcagaccatcccgtatccactcgtgggaggcccctgaatgaatctaaggccccaggggttgaactttactgagtagggagcgcagagtactagggacaaatttaccgcccgctttgaggaaagctgatgtgggagcagagagcaagatggatagcagcggccaatctaaacgggcaacgaagtgccacagagtgctgcacgtaggaatgcgagtgacaggtagggtcgtctattccaagtccctcctctcccctaataaactgccacatttcagaaaacacgaagactgctgaagccgtttccagccttcgctacgcattagcagagcaactcaacaagcctgggtgaaaggcttctcgaagaaattcagttatctctactgccagccaaacacggactgggcagctttcctcgggggctgctcggtaactgctgagccgggggcgcgctgaagccctgcagaagcccacacccgcttcaggaattccgtggatgttcccgacagaggtttattcccgcctatccctacaggcccacggcgctctttcctccaatcccacacccagtcgaaggcggggcagccgccccacccagcggccagccgggcggcccccagtctggtttaactggttggaacgactaaagcacgctggcgcaaggaaagctctcaacttcgggagctgaggcgcaggctggccagagcgtggagaggaaagccctttccatcctcaaggccgttgcaggagatgcccgcgagccaccttcgccagcaccacaccggggtgtaatggataggtaacagagaagacctcgtcccttcctagtcagggcatcagcatgactgagtgcttcctgccccccaccagcagccccagtgaacaccgcagggtggagcatggcagcgggcttacccggacccccagctctgaagagatcagccctactaagtttcctggattgtaccgcactggcgagccctcacctccccatgacatcctccatgagcctcctgatgtagtgtctgatgatgagaaagatcatgggaagaaaaaagggaaatttaagaaaaaggaaaagaggactgaaggctatgcagcctttcaggaagatagctctggagatgaggcagaaagtccttctaaaatgaagaggtccaagggaatccatgttttcaagaagcccagcttttctaaaaagaaggaaaaggattttaaaataaaagagaaacccaaagaagaaaagcataaagaagaaaagcacaaagaagaaaaacataaagagaagaagtcaaaagacttgacagcagctgatgttgttaaacagtggaaggaaaagaagaaaaagaaaaagccaattcaggagccagaggtgcctcagattgatgttccaaatctcaaacccatttttggaattcctttggctgatgcagtagagaggaccatgatgtatgatggcattcggctgccagccgttttccgtgaatgtatagattacgtagagaagtatggcatgaagtgtgaaggcatctacagagtatcaggaattaaatcaaaggtggatgagctaaaagcagcctatgaccgggaggagtctacaaacttggaagactatgagcctaacactgtagccagtttgctgaagcagtatttgcgagaccttccagagaatttgcttaccaaagagcttatgcccagatttgaagaggcttgtgggaggaccacggagactgagaaagtgcaggaattccagcgtttactcaaagaactgccagaatgtaactatcttctgatttcttggctcattgtgcacatggaccatgtcattgcaaaggaactggaaacaaaaatgaatatacagaacatttctatagtgctcagcccaactgtgcagatcagcaatcgagtcctgtatgtgtttttcacacatgtgcaagaactctttggaaatgtggtactaaagcaagtgatgaaacctctgcgatggtctaacatggccacgatgcccacgctgccagagacccaggcgggcatcaaggaggagatcaggagacaggagtttcttttgaattgtttacatcgagatctgcagggtgggataaaggatttgtctaaagaagaaagattatgggaagtacaaagaattttgacagccctcaaaagaaaactgagagaagctaaaagacaggagtgtgaaaccaagattgcacaagagatagccagtctttcaaaagaggatgtttccaaagaagagatgaatgaaaatgaagaagttataaatattctccttgctcaggagaatgagatcctgactgaacaggaggagctcctggccatggagcagtttctgcgccggcagattgcctcagaaaaagaagagattgaacgcctcagagctgagattgctgaaattcagagtcgccagcagcacggccgaagtgagactgaggagtactcctccgagagcgagagcgagagtgaggatgaggaggagctgcagatcattctggaagacttacagagacagaacgaagagctggaaataaagaacaatcatttgaatcaagcaattcatgaggagcgcgaggccatcatcgagctgcgcgtgcagctgcggctgctccagatgcagcgagccaaggccgagcagcaggcgcaggaggacgaggagcctgagtggcgcgggggtgccgtccagccgcccagagacggcgtccttgagccaaaagcagctaaagagcagccaaaggcaggcaaggagccggcaaagccatcgcccagcagggataggaaggagacgtccatctgagcagcctgcgtggccgtctggagtccgtgagactgaaaggacccgtgcatcttactgtaacccgggggccaggccggctctctcgctgtacattctgtaaaggtgtcttctcttctcagactcttcctctgtcacacgtctgactccttcacgtcaggctcaggttccatgggaggacgaagcagtggacgcattgtgggctttagggacagatgagttttccagatagtgtcagcttatttgaagattaattttctttgttaacttaaaataactattttaacccttgagtggcttctttttaaaccaaaaaccgtctttctttgcttttttatcacagcagaatcaggatctctttctcattcaaggggggaaccacaccaggtcagcgctgcgcctgctgtggccgccgcgagccacgccctctgggatctctggtaccgtcactcttgcttgtgccttccacaccttctcggtgcagatccctatgggggagctgcctcacgttctctgactggtcagagcagcgcctggtgggtgttccctggcccactctcctctctccttctgcagttctaaaccacagtctataagcccgagtcaccaggacggcctgtctggccacagacaggggctgcctgtggagcctgcccaccggcccccggcagtgcagtccagcggggaggaggctgcccgttcctgccagttcctcactgcggggaccagcaaaggccttctcactgggttggtcaaaggtagtcaccttggcctggtgcatccacagaggatgttgttcaaaccagaaatcttttaaacgactgaccttccttaaaaacagaatgactccgattgcttgcttgggctagaatgtacacgtctccttgcctgaataagccatatatatgctcttaaacaaaagtttgaaattatccatatcatctcagtgaacctactggtggactcccaattgacaagattgagcaatagaaaaaaattcctttcctttgaatgatagctgtgattcaccccaccccattttcttgtttctggtccatccgatgagacggatgctctgatgctctgaggcttctgggaggctgggccctggaggcaacgtgctgcaggcgcactctgtcagagtgaacagcaccgcgagacaggccaggctcgtggctcggaagacaaaccccacacacactcaaggggtcgaaaacaaaccccacacgagggctctcacctccttctcctaggtagtatttattttcagcacctgtttgatgcagtttttaatcctctacctattgcactgttgtgactcgttggccattatttgatttttgtacgaaaaaaagctttgttatagaaatcagcatactatttttttaaatctggagagaagatattctggtgactgaaagtatggtcgggtgtcagatataaatgtgcaaatgccttcttgctgtcctgtcggtctcagtacgttcactttatagctgctggcaatatcgaaggttccttttttgtttgtgtaaactctaatttctatcaaggtgtcatggatttttaaaattagtatttcattacaaatgtctcagcattggttaactaatttttgccaggaccattattgatcaagcaaataaattcaacagccatttgggaaaaagaaaactggcgaggagttggttgaggcacttcttcaaggccaagggggaacacagtgttttgtttccagctcactttgtacccctcacctctgcagacacggggagaaccccggacccctggcatgcatgctggcggcggcatgcctcccttccacaagcccatgctgctgcagagggagcctgtgtttgcaaaacccagtggactgggctgggtctgctgtctgagcagctcctggctccggtgggaactgcacacaagtccactggcctggcttggccccaggcattgcaattgacagacatttgcatttcatacggtaaatgaggactcagcacagccaaccataatcagcatgtctgggatagactggtctagaataaaaatgaagtttccattgctttgtttgctttaaaaattccacaattaaaatatctgtcattgaaagcttagaaaaaaaaaaa

SEQ ID NO: 60709 - DNA, 4375 bp, Homo sapiens
aggaaccctctcccgcgccggcctcgcgcccgcgtctgtcaggcagcgtgtggggctcggtgctcgcagcgctcgggtttcagtgggaatggacagacagatctgaagttgaaaattcttttcacaactcatgttcaactatgtgtgttgtcagaatgctcttaatgaggtgtaatggataggtaacagagaagacctcgtcccttcctagtcagggcatcagcatgactgagtgcttcctgccccccaccagcagccccagtgaacaccgcagggtggagcatggcagcgggcttacccggacccccagctctgaagagatcagccctactaagtttcctggattgtaccgcactggcgagccctcacctccccatgacatcctccatgagcctcctgatgtagtgtctgatgatgagaaagatcatgggaagaaaaaagggaaatttaagaaaaaggaaaagaggactgaaggctatgcagcctttcaggaagatagctctggagatgaggcagaaagtccttctaaaatgaagaggtccaagggaatccatgttttcaagaagcccagcttttctaaaaagaaggaaaaggattttaaaataaaagagaaacccaaagaagaaaagcataaagaagaaaagcacaaagaagaaaaacataaagagaagaagtcaaaagacttgacagcagctgatgttgttaaacagtggaaggaaaagaagaaaaagaaaaagccaattcaggagccagaggtgcctcagattgatgttccaaatctcaaacccatttttggaattcctttggctgatgcagtagagaggaccatgatgtatgatggcattcggctgccagccgttttccgtgaatgtatagattacgtagagaagtatggcatgaagtgtgaaggcatctacagagtatcaggaattaaatcaaaggtggatgagctaaaagcagcctatgaccgggaggagtctacaaacttggaagactatgagcctaacactgtagccagtttgctgaagcagtatttgcgagaccttccagagaatttgcttaccaaagagcttatgcccagatttgaagaggcttgtgggaggaccacggagactgagaaagtgcaggaattccagcgtttactcaaagaactgccagaatgtaactatcttctgatttcttggctcattgtgcacatggaccatgtcattgcaaaggaactggaaacaaaaatgaatatacagaacatttctatagtgctcagcccaactgtgcagatcagcaatcgagtcctgtatgtgtttttcacacatgtgcaagaactctttggaaatgtggtactaaagcaagtgatgaaacctctgcgatggtctaacatggccacgatgcccacgctgccagagacccaggcgggcatcaaggaggagatcaggagacaggagtttcttttgaattgtttacatcgagatctgcagggtgggataaaggatttgtctaaagaagaaagattatgggaagtacaaagaattttgacagccctcaaaagaaaactgagagaagctaaaagacaggagtgtgaaaccaagattgcacaagagatagccagtctttcaaaagaggatgtttccaaagaagagatgaatgaaaatgaagaagttataaatattctccttgctcaggagaatgagatcctgactgaacaggaggagctcctggccatggagcagtttctgcgccggcagattgcctcagaaaaagaagagattgaacgcctcagagctgagattgctgaaattcagagtcgccagcagcacggccgaagtgagactgaggagtactcctccgagagcgagagcgagagtgaggatgaggaggagctgcagatcattctggaagacttacagagacagaacgaagagctggaaataaagaacaatcatttgaatcaagcaattcatgaggagcgcgaggccatcatcgagctgcgcgtgcagctgcggctgctccagatgcagcgagccaaggccgagcagcaggcgcaggaggacgaggagcctgagtggcgcgggggtgccgtccagccgcccagagacggcgtccttgagccaaaagcagctaaagagcagccaaaggcaggcaaggagccggcaaagccatcgcccagcagggataggaaggagacgtccatctgagcagcctgcgtggccgtctggagtccgtgagactgaaaggacccgtgcatcttactgtaacccgggggccaggccggctctctcgctgtacattctgtaaaggtgtcttctcttctcagactcttcctctgtcacacgtctgactccttcacgtcaggctcaggttccatgggaggacgaagcagtggacgcattgtgggctttagggacagatgagttttccagatagtgtcagcttatttgaagattaattttctttgttaacttaaaataactattttaacccttgagtggcttctttttaaaccaaaaaccgtctttctttgcttttttatcacagcagaatcaggatctctttctcattcaaggggggaaccacaccaggtcagcgctgcgcctgctgtggccgccgcgagccacgccctctgggatctctggtaccgtcactcttgcttgtgccttccacaccttctcggtgcagatccctatgggggagctgcctcacgttctctgactggtcagagcagcgcctggtgggtgttccctggcccactctcctctctccttctgcagttctaaaccacagtctataagcccgagtcaccaggacggcctgtctggccacagacaggggctgcctgtggagcctgcccaccggcccccggcagtgcagtccagcggggaggaggctgcccgttcctgccagttcctcactgcggggaccagcaaaggccttctcactgggttggtcaaaggtagtcaccttggcctggtgcatccacagaggatgttgttcaaaccagaaatcttttaaacgactgaccttccttaaaaacagaatgactccgattgcttgcttgggctagaatgtacacgtctccttgcctgaataagccatatatatgctcttaaacaaaagtttgaaattatccatatcatctcagtgaacctactggtggactcccaattgacaagattgagcaatagaaaaaaattcctttcctttgaatgatagctgtgattcaccccaccccattttcttgtttctggtccatccgatgagacggatgctctgatgctctgaggcttctgggaggctgggccctggaggcaacgtgctgcaggcgcactctgtcagagtgaacagcaccgcgagacaggccaggctcgtggctcggaagacaaaccccacacacactcaaggggtcgaaaacaaaccccacacgagggctctcacctccttctcctaggtagtatttattttcagcacctgtttgatgcagtttttaatcctctacctattgcactgttgtgactcgttggccattatttgatttttgtacgaaaaaaagctttgttatagaaatcagcatactatttttttaaatctggagagaagatattctggtgactgaaagtatggtcgggtgtcagatataaatgtgcaaatgccttcttgctgtcctgtcggtctcagtacgttcactttatagctgctggcaatatcgaaggttccttttttgtttgtgtaaactctaatttctatcaaggtgtcatggatttttaaaattagtatttcattacaaatgtctcagcattggttaactaatttttgccaggaccattattgatcaagcaaataaattcaacagccatttgggaaaaagaaaagcttctagtttttttgtacacattctttctgtgaggagattgagtactctgcagctggcgaggagttggttgaggcacttcttcaaggccaagggggaacacagtgttttgtttccagctcactttgtacccctcacctctgcagacacggggagaaccccggacccctggcatgcatgctggcggcggcatgcctcccttccacaagcccatgctgctgcagagggagcctgtgtttgcaaaacccagtggactgggctgggtctgctgtctgagcagctcctggctccggtgggaactgcacacaagtccactggcctggcttggccccaggcattgcaattgacagacatttgcatttcatacggtaaatgaggactcagcacagccaaccataatcagcatgtctgggatagactggtctagaataaaaatgaagtttccattgctttgtttgctttaaaaattccacaattaaaatatctgtcattgaaagcttagaaaaaaaaaaa

SEQ ID NO: 60710 - DNA, 4394 bp, Homo sapiens
agaggaggatccgggaagccggctgcggcgggaggagggaatgcgcgtgcgcgctggaccgcctcgtcccgttccgtcccaatcattgtaaacaggcagaggctgggcggggtgggaatggggcgcccgaggccggcctggggcgcagcgcaggaggcggctccggtggctgcggcggcagcgtgagcgcgaggaggcggaggctgcggcggggcggacggtcgcgcggcggcaggcacaggtgtaatggataggtaacagagaagacctcgtcccttcctagtcagggcatcagcatgactgagtgcttcctgccccccaccagcagccccagtgaacaccgcagggtggagcatggcagcgggcttacccggacccccagctctgaagagatcagccctactaagtttcctggattgtaccgcactggcgagccctcacctccccatgacatcctccatgagcctcctgatgtagtgtctgatgatgagaaagatcatgggaagaaaaaagggaaatttaagaaaaaggaaaagaggactgaaggctatgcagcctttcaggaagatagctctggagatgaggcagaaagtccttctaaaatgaagaggtccaagggaatccatgttttcaagaagcccagcttttctaaaaagaaggaaaaggattttaaaataaaagagaaacccaaagaagaaaagcataaagaagaaaagcacaaagaagaaaaacataaagagaagaagtcaaaagacttgacagcagctgatgttgttaaacagtggaaggaaaagaagaaaaagaaaaagccaattcaggagccagaggtgcctcagattgatgttccaaatctcaaacccatttttggaattcctttggctgatgcagtagagaggaccatgatgtatgatggcattcggctgccagccgttttccgtgaatgtatagattacgtagagaagtatggcatgaagtgtgaaggcatctacagagtatcaggaattaaatcaaaggtggatgagctaaaagcagcctatgaccgggaggagtctacaaacttggaagactatgagcctaacactgtagccagtttgctgaagcagtatttgcgagaccttccagagaatttgcttaccaaagagcttatgcccagatttgaagaggcttgtgggaggaccacggagactgagaaagtgcaggaattccagcgtttactcaaagaactgccagaatgtaactatcttctgatttcttggctcattgtgcacatggaccatgtcattgcaaaggaactggaaacaaaaatgaatatacagaacatttctatagtgctcagcccaactgtgcagatcagcaatcgagtcctgtatgtgtttttcacacatgtgcaagaactctttggaaatgtggtactaaagcaagtgatgaaacctctgcgatggtctaacatggccacgatgcccacgctgccagagacccaggcgggcatcaaggaggagatcaggagacaggagtttcttttgaattgtttacatcgagatctgcagggtgggataaaggatttgtctaaagaagaaagattatgggaagtacaaagaattttgacagccctcaaaagaaaactgagagaagctaaaagacaggagtgtgaaaccaagattgcacaagagatagccagtctttcaaaagaggatgtttccaaagaagagatgaatgaaaatgaagaagttataaatattctccttgctcaggagaatgagatcctgactgaacaggaggagctcctggccatggagcagtttctgcgccggcagattgcctcagaaaaagaagagattgaacgcctcagagctgagattgctgaaattcagagtcgccagcagcacggccgaagtgagactgaggagtactcctccgagagcgagagcgagagtgaggatgaggaggagctgcagatcattctggaagacttacagagacagaacgaagagctggaaataaagaacaatcatttgaatcaagcaattcatgaggagcgcgaggccatcatcgagctgcgcgtgcagctgcggctgctccagatgcagcgagccaaggccgagcagcaggcgcaggaggacgaggagcctgagtggcgcgggggtgccgtccagccgcccagagacggcgtccttgagccaaaagcagctaaagagcagccaaaggcaggcaaggagccggcaaagccatcgcccagcagggataggaaggagacgtccatctgagcagcctgcgtggccgtctggagtccgtgagactgaaaggacccgtgcatcttactgtaacccgggggccaggccggctctctcgctgtacattctgtaaaggtgtcttctcttctcagactcttcctctgtcacacgtctgactccttcacgtcaggctcaggttccatgggaggacgaagcagtggacgcattgtgggctttagggacagatgagttttccagatagtgtcagcttatttgaagattaattttctttgttaacttaaaataactattttaacccttgagtggcttctttttaaaccaaaaaccgtctttctttgcttttttatcacagcagaatcaggatctctttctcattcaaggggggaaccacaccaggtcagcgctgcgcctgctgtggccgccgcgagccacgccctctgggatctctggtaccgtcactcttgcttgtgccttccacaccttctcggtgcagatccctatgggggagctgcctcacgttctctgactggtcagagcagcgcctggtgggtgttccctggcccactctcctctctccttctgcagttctaaaccacagtctataagcccgagtcaccaggacggcctgtctggccacagacaggggctgcctgtggagcctgcccaccggcccccggcagtgcagtccagcggggaggaggctgcccgttcctgccagttcctcactgcggggaccagcaaaggccttctcactgggttggtcaaaggtagtcaccttggcctggtgcatccacagaggatgttgttcaaaccagaaatcttttaaacgactgaccttccttaaaaacagaatgactccgattgcttgcttgggctagaatgtacacgtctccttgcctgaataagccatatatatgctcttaaacaaaagtttgaaattatccatatcatctcagtgaacctactggtggactcccaattgacaagattgagcaatagaaaaaaattcctttcctttgaatgatagctgtgattcaccccaccccattttcttgtttctggtccatccgatgagacggatgctctgatgctctgaggcttctgggaggctgggccctggaggcaacgtgctgcaggcgcactctgtcagagtgaacagcaccgcgagacaggccaggctcgtggctcggaagacaaaccccacacacactcaaggggtcgaaaacaaaccccacacgagggctctcacctccttctcctaggtagtatttattttcagcacctgtttgatgcagtttttaatcctctacctattgcactgttgtgactcgttggccattatttgatttttgtacgaaatattctggtgactgaaagtatggtcgggtgtcagatataaatgtgcaaatgccttcttgctgtcctgtcggtctcagtacgttcactttatagctgctggcaatatcgaaggttccttttttgtttgtgtaaactctaatttctatcaaggtgtcatggatttttaaaattagtatttcattacaaatgtctcagcattggttaactaatttttgccaggaccattattgatcaagcaaataaattcaacagccatttgggaaaaagaaaagcttctagtttttttgtacacattctttctgtgaggagattgagtactctgcagctggcgaggagttggttgaggcacttcttcaaggccaagggggaacacagtgttttgtttccagctcactttgtacccctcacctctgcagacacggggagaaccccggacccctggcatgcatgctggcggcggcatgcctcccttccacaagcccatgctgctgcagagggagcctgtgtttgcaaaacccagtggactgggctgggtctgctgtctgagcagctcctggctccggtgggaactgcacacaagtccactggcctggcttggccccaggcattgcaattgacagacatttgcatttcatacggtaaatgaggactcagcacagccaaccataatcagcatgtctgggatagactggtctagaataaaaatgaagtttccattgctttgtttgctttaaaaattccacaattaaaatatctgtcattgaaagcttagaaaaaaaaaaa

SEQ ID NO: 60711 - DNA, 3947 bp, Homo sapiens
agaggaggatccgggaagccggctgcggcgggaggagggaatgcgcgtgcgcgctggaccgcctcgtcccgttccgtcccaatcattgtaaacaggcagaggctgggcggggtgggaatggggcgcccgaggccggcctggggcgcagcgcaggaggcggctccggtggctgcggcggcagcgtgagcgcgaggaggcggaggctgcggcggggcggacggtcgcgcggcggcaggcacaggtgtaatggataggtaacagagaagacctcgtcccttcctagtcagggcatcagcatgactgagtgcttcctgccccccaccagcagccccagtgaacaccgcagggtggagcatggcagcgggcttacccggacccccagctctgaagagatcagccctactaagtttcctggattgtaccgcactggcgagccctcacctccccatgacatcctccatgagcctcctgatgtagtgtctgatgatgagaaagatcatgggaagaaaaaagggaaatttaagaaaaaggaaaagaggactgaaggctatgcagcctttcaggaagatagctctggagatgaggcagaaagtccttctaaaatgaagaggtccaagggaatccatgttttcaagaagcccagcttttctaaaaagaaggaaaaggattttaaaataaaagagaaacccaaagaagaaaagcataaagaagaaaagcacaaagaagaaaaacataaagagaagaagtcaaaagacttgacagcagctgatgttgttaaacagtggaaggaaaagaagaaaaagaaaaagccaattcaggagccagaggtgcctcagattgatgttccaaatctcaaacccatttttggaattcctttggctgatgcagtagagaggaccatgatgtatgatggcattcggctgccagccgttttccgtgaatgtatagattacgtagagaagtatggcatgaagtgtgaaggcatctacagagtatcaggaattaaatcaaaggtggatgagctaaaagcagcctatgaccgggaggagtctacaaacttggaagactatgagcctaacactgtagccagtttgctgaagcagtatttgcgagaccttccagagaatttgcttaccaaagagcttatgcccagatttgaagaggcttgtgggaggaccacggagactgagaaagtgcaggaattccagcgtttactcaaagaactgccagaatgtaactatcttctgatttcttggctcattgtgcacatggaccatgtcattgcaaaggaactggaaacaaaaatgaatatacagaacatttctatagtgctcagcccaactgtgcagatcagcaatcgagtcctgtatgtgtttttcacacatgtgcaagaactctttggaaatgtggtactaaagcaagtgatgaaacctctgcgatggtctaacatggccacgatgcccacgctgccagagacccaggcgggcatcaaggaggagatcaggagacaggagtttcttttgaattgtttacatcgagatctgcagggtgggataaaggatttgtctaaagaagaaagattatgggaagtacaaagaattttgacagccctcaaaagaaaactgagagaagctaaaagacaggagtgtgaaaccaagattgcacaagagatagccagtctttcaaaagaggatgtttccaaagaagagatgaatgaaaatgaagaagttataaatattctccttgctcaggagaatgagatcctgactgaacaggaggagctcctggccatggagcagtttctgcgccggcagattgcctcagaaaaagaagagattgaacgcctcagagctgagattgctgaaattcagagtcgccagcagcacggccgaagtgagactgaggagtactcctccgagagcgagagcgagagtgaggatgaggaggagctgcagatcattctggaagacttacagatgagttttccagatagtgtcagcttatttgaagattaattttctttgttaacttaaaataactattttaacccttgagtggcttctttttaaaccaaaaaccgtctttctttgcttttttatcacagcagaatcaggatctctttctcattcaaggggggaaccacaccaggtcagcgctgcgcctgctgtggccgccgcgagccacgccctctgggatctctggtaccgtcactcttgcttgtgccttccacaccttctcggtgcagatccctatgggggagctgcctcacgttctctgactggtcagagcagcgcctggtgggtgttccctggcccactctcctctctccttctgcagttctaaaccacagtctataagcccgagtcaccaggacggcctgtctggccacagacaggggctgcctgtggagcctgcccaccggcccccggcagtgcagtccagcggggaggaggctgcccgttcctgccagttcctcactgcggggaccagcaaaggccttctcactgggttggtcaaaggtagtcaccttggcctggtgcatccacagaggatgttgttcaaaccagaaatcttttaaacgactgaccttccttaaaaacagaatgactccgattgcttgcttgggctagaatgtacacgtctccttgcctgaataagccatatatatgctcttaaacaaaagtttgaaattatccatatcatctcagtgaacctactggtggactcccaattgacaagattgagcaatagaaaaaaattcctttcctttgaatgatagctgtgattcaccccaccccattttcttgtttctggtccatccgatgagacggatgctctgatgctctgaggcttctgggaggctgggccctggaggcaacgtgctgcaggcgcactctgtcagagtgaacagcaccgcgagacaggccaggctcgtggctcggaagacaaaccccacacacactcaaggggtcgaaaacaaaccccacacgagggctctcacctccttctcctaggtagtatttattttcagcacctgtttgatgcagtttttaatcctctacctattgcactgttgtgactcgttggccattatttgatttttgtacgaaaaaaagctttgttatagaaatcagcatactatttttttaaatctggagagaagatattctggtgactgaaagtatggtcgggtgtcagatataaatgtgcaaatgccttcttgctgtcctgtcggtctcagtacgttcactttatagctgctggcaatatcgaaggttccttttttgtttgtgtaaactctaatttctatcaaggtgtcatggatttttaaaattagtatttcattacaaatgtctcagcattggttaactaatttttgccaggaccattattgatcaagcaaataaattcaacagccatttgggaaaaagaaaagcttctagtttttttgtacacattctttctgtgaggagattgagtactctgcagctggcgaggagttggttgaggcacttcttcaaggccaagggggaacacagtgttttgtttccagctcactttgtacccctcacctctgcagacacggggagaaccccggacccctggcatgcatgctggcggcggcatgcctcccttccacaagcccatgctgctgcagagggagcctgtgtttgcaaaacccagtggactgggctgggtctgctgtctgagcagctcctggctccggtgggaactgcacacaagtccactggcctggcttggccccaggcattgcaattgacagacatttgcatttcatacggtaaatgaggactcagcacagccaaccataatcagcatgtctgggatagactggtctagaataaaaatgaagtttccattgctttgtttgctttaaaaattccacaattaaaatatctgtcattgaaagcttagaaaaaaaaaaa

SEQ ID NO: 60712 - DNA, 4393 bp, Homo sapiens
agaggaggatccgggaagccggctgcggcgggaggagggaatgcgcgtgcgcgctggaccgcctcgtcccgttccgtcccaatcattgtaaacaggcagaggctgggcggggtgggaatggggcgcccgaggccggcctggggcgcagcgcaggaggcggctccggtggctgcggcggcagcgtgagcgcgaggaggcggaggctgcggcggggcggacggtcgcgcggcggcaggcacaggtgtaatggataggtaacagagaagacctcgtcccttcctagtcagggcatcagcatgactgagtgcttcctgccccccaccagcagccccagtgaacaccgcagggtggagcatggcagcgggcttacccggacccccagctctgaagagatcagccctactaagtttcctggattgtaccgcactggcgagccctcacctccccatgacatcctccatgagcctcctgatgtagtgtctgatgatgagaaagatcatgggaagaaaaaagggaaatttaagaaaaaggaaaagaggactgaaggctatgcagcctttcaggaagatagctctggagatgaggcagaaagtccttctaaaatgaagaggtccaagggaatccatgttttcaagaagcccagcttttctaaaaagaaggaaaaggattttaaaataaaagagaaacccaaagaagaaaagcataaagaagaaaagcacaaagaagaaaaacataaagagaagaagtcaaaagacttgacagcagctgatgttgttaaacagtggaaggaaaagaagaaaaagaaaaagccaattcaggagccagaggtgcctcagattgatgttccaaatctcaaacccatttttggaattcctttggctgatgcagtagagaggaccatgatgtatgatggcattcggctgccagccgttttccgtgaatgtatagattacgtagagaagtatggcatgaagtgtgaaggcatctacagagtatcaggaattaaatcaaaggtggatgagctaaaagcagcctatgaccgggaggagtctacaaacttggaagactatgagcctaacactgtagccagtttgctgaagcagtatttgcgagaccttccagagaatttgcttaccaaagagcttatgcccagatttgaagaggcttgtgggaggaccacggagactgagaaagtgcaggaattccagcgtttactcaaagaactgccagaatgtaactatcttctgatttcttggctcattgtgcacatggaccatgtcattgcaaaggaactggaaacaaaaatgaatatacagaacatttctatagtgctcagcccaactgtgcagatcagcaatcgagtcctgtatgtgtttttcacacatgtgcaagaactctttggaaatgtggtactaaagcaagtgatgaaacctctgcgatggtctaacatggccacgatgcccacgctgccagagacccaggcgggcatcaaggaggagatcaggagacaggagtttcttttgaattgtttacatcgagatctgcagggtgggataaaggatttgtctaaagaagaaagattatgggaagtacaaagaattttgacagccctcaaaagaaaactgagagaagctaaaagacaggagtgtgaaaccaagattgcacaagagatagccagtctttcaaaagaggatgtttccaaagaagagatgaatgaaaatgaagaagttataaatattctccttgctcaggagaatgagatcctgactgaacaggaggagctcctggccatggagcagtttctgcgccggcagattgcctcagaaaaagaagagattgaacgcctcagagctgagattgctgaaattcagagtcgccagcagcacggccgaagtgagactgaggagtactcctccgagagcgagagcgagagtgaggatgaggaggagctgcagatcattctggaagacttacagagacagaacgaagagctggaaataaagaacaatcatttgaatcaagcaattcatgaggagcgcgaggccatcatcgagctgcgcgtgcagctgcggctgctccagatgcagcgagccaaggccgagcagcaggcgcaggaggacgaggagcctgagtggcgcgggggtgccgtccagccgcccagagacggcgtccttgagccaaaagcagctaaagagcagccaaaggcaggcaaggagccggcaaagccatcgcccagcagggataggaaggagacgtccatctgagcagcctgcgtggccgtctggagtccgtgagactgaaaggacccgtgcatcttactgtaacccgggggccaggccggctctctcgctgtacattctgtaaaggtgtcttctcttctcagactcttcctctgtcacacgtctgactccttcacgtcaggctcaggttccatgggaggacgaagcagtggacgcattgtgggctttagggacagatgagttttccagatagtgtcagcttatttgaagattaattttctttgttaacttaaaataactattttaacccttgagtggcttcttctttctcattcaaggggggaaccacaccaggtcagcgctgcgcctgctgtggccgccgcgagccacgccctctgggatctctggtaccgtcactcttgcttgtgccttccacaccttctcggtgcagatccctatgggggagctgcctcacgttctctgactggtcagagcagcgcctggtgggtgttccctggcccactctcctctctccttctgcagttctaaaccacagtctataagcccgagtcaccaggacggcctgtctggccacagacaggggctgcctgtggagcctgcccaccggcccccggcagtgcagtccagcggggaggaggctgcccgttcctgccagttcctcactgcggggaccagcaaaggccttctcactgggttggtcaaaggtagtcaccttggcctggtgcatccacagaggatgttgttcaaaccagaaatcttttaaacgactgaccttccttaaaaacagaatgactccgattgcttgcttgggctagaatgtacacgtctccttgcctgaataagccatatatatgctcttaaacaaaagtttgaaattatccatatcatctcagtgaacctactggtggactcccaattgacaagattgagcaatagaaaaaaattcctttcctttgaatgatagctgtgattcaccccaccccattttcttgtttctggtccatccgatgagacggatgctctgatgctctgaggcttctgggaggctgggccctggaggcaacgtgctgcaggcgcactctgtcagagtgaacagcaccgcgagacaggccaggctcgtggctcggaagacaaaccccacacacactcaaggggtcgaaaacaaaccccacacgagggctctcacctccttctcctaggtagtatttattttcagcacctgtttgatgcagtttttaatcctctacctattgcactgttgtgactcgttggccattatttgatttttgtacgaaaaaaagctttgttatagaaatcagcatactatttttttaaatctggagagaagatattctggtgactgaaagtatggtcgggtgtcagatataaatgtgcaaatgccttcttgctgtcctgtcggtctcagtacgttcactttatagctgctggcaatatcgaaggttccttttttgtttgtgtaaactctaatttctatcaaggtgtcatggatttttaaaattagtatttcattacaaatgtctcagcattggttaactaatttttgccaggaccattattgatcaagcaaataaattcaacagccatttgggaaaaagaaaagcttctagtttttttgtacacattctttctgtgaggagattgagtactctgcagctggcgaggagttggttgaggcacttcttcaaggccaagggggaacacagtgttttgtttccagctcactttgtacccctcacctctgcagacacggggagaaccccggacccctggcatgcatgctggcggcggcatgcctcccttccacaagcccatgctgctgcagagggagcctgtgtttgcaaaacccagtggactgggctgggtctgctgtctgagcagctcctggctccggtgggaactgcacacaagtccactggcctggcttggccccaggcattgcaattgacagacatttgcatttcatacggtaaatgaggactcagcacagccaaccataatcagcatgtctgggatagactggtctagaataaaaatgaagtttccattgctttgtttgctttaaaaattccacaattaaaatatctgtcattgaaagcttagaaaaaaaaaaa

SEQ ID NO: 60713 - DNA, 2988 bp, Homo sapiens
ctagaggatccgattgcattgtcttcccatcaaggaggagatcaggagacaggagtttcttttgaattgtttacatcgagatctgcagggtgggataaaggatttgtctaaagaagaaagattatgggaagtacaaagaattttgacagccctcaaaagaaaactgagagaagctaaaagacaggagtgtgaaaccaagattgcacaagagatagccagtctttcaaaagaggatgtttccaaagaagagatgaatgaaaatgaagaagttataaatattctccttgctcaggagaatgagatcctgactgaacaggaggagctcctggccatggagcagtttctgcgccggcagattgcctcagaaaaagaagagattgaacgcctcagagctgagattgctgaaattcagagtcgccagcagcacggccgaagtgagactgaggagtactcctccgagagcgagagcgagagtgaggatgaggaggagctgcagatcattctggaagacttacagagacagaacgaagagctggaaataaagaacaatcatttgaatcaagcaattcatgaggagcgcgaggccatcatcgagctgcgcgtgcagctgcggctgctccagatgcagcgagccaaggccgagcagcaggcgcaggaggacgaggagcctgagtggcgcgggggtgccgtccagccgcccagagacggcgtccttgagccaaaagcagctaaagagcagccaaaggcaggcaaggagccggcaaagccatcgcccagcagggataggaaggagacgtccatctgagcagcctgcgtggccgtctggagtccgtgagactgaaaggacccgtgcatcttactgtaacccgggggccaggccggctctctcgctgtacattctgtaaaggtgtcttctcttctcagactcttcctctgtcacacgtctgactccttcacgtcaggctcaggttccatgggaggacgaagcagtggacgcattgtgggctttagggacagatgagttttccagatagtgtcagcttatttgaagattaattttctttgttaacttaaaataactattttaacccttgagtggcttctttttaaaccaaaaaccgtctttctttgcttttttatcacagcagaatcaggatctctttctcattcaaggggggaaccacaccaggtcagcgctgcgcctgctgtggccgccgcgagccacgccctctgggatctctggtaccgtcactcttgcttgtgccttccacaccttctcggtgcagatccctatgggggagctgcctcacgttctctgactggtcagagcagcgcctggtgggtgttccctggcccactctcctctctccttctgcagttctaaaccacagtctataagcccgagtcaccaggacggcctgtctggccacagacaggggctgcctgtggagcctgcccaccggcccccggcagtgcagtccagcggggaggaggctgcccgttcctgccagttcctcactgcggggaccagcaaaggccttctcactgggttggtcaaaggtagtcaccttggcctggtgcatccacagaggatgttgttcaaaccagaaatcttttaaacgactgaccttccttaaaaacagaatgactccgattgcttgcttgggctagaatgtacacgtctccttgcctgaataagccatatatatgctcttaaacaaaagtttgaaattatccatatcatctcagtgaacctactggtggactcccaattgacaagattgagcaatagaaaaaaattcctttcctttgaatgatagctgtgattcaccccaccccattttcttgtttctggtccatccgatgagacggatgctctgatgctctgaggcttctgggaggctgggccctggaggcaacgtgctgcaggcgcactctgtcagagtgaacagcaccgcgagacaggccaggctcgtggctcggaagacaaaccccacacacactcaaggggtcgaaaacaaaccccacacgagggctctcacctccttctcctaggtagtatttattttcagcacctgtttgatgcagtttttaatcctctacctattgcactgttgtgactcgttggccattatttgatttttgtacgaaaaaaagctttgttatagaaatcagcatactatttttttaaatctggagagaagatattctggtgactgaaagtatggtcgggtgtcagatataaatgtgcaaatgccttcttgctgtcctgtcggtctcagtacgttcactttatagctgctggcaatatcgaaggttccttttttgtttgtgtaaactctaatttctatcaaggtgtcatggatttttaaaattagtatttcattacaaatgtctcagcattggttaactaatttttgccaggaccattattgatcaagcaaataaattcaacagccatttgggaaaaagaaaagcttctagtttttttgtacacattctttctgtgaggagattgagtactctgcagctggcgaggagttggttgaggcacttcttcaaggccaagggggaacacagtgttttgtttccagctcactttgtacccctcacctctgcagacacggggagaaccccggacccctggcatgcatgctggcggcggcatgcctcccttccacaagcccatgctgctgcagagggagcctgtgtttgcaaaacccagtggactgggctgggtctgctgtctgagcagctcctggctccggtgggaactgcacacaagtccactggcctggcttggccccaggcattgcaattgacagacatttgcatttcatacggtaaatgaggactcagcacagccaaccataatcagcatgtctgggatagactggtctagaataaaaatgaagtttccattgctttgtttgctttaaaaattccacaattaaaatatctgtcattgaaagcttagaaaaaaaaaaa

SEQ ID NO: 60714 - DNA, 2523 bp, Homo sapiens
accgcgctctgctcctgagaaatcgtcctctgacttccttaagtgataactgccctttctgtcattccccaagataaagaacaatcatttgaatcaagcaattcatgaggagcgcgaggccatcatcgagctgcgcgtgcagctgcggctgctccagatgcagcgagccaaggccgagcagcaggcgcaggaggacgaggagcctgagtggcgcgggggtgccgtccagccgcccagagacggcgtccttgagccaaaagcagctaaagagcagccaaaggcaggcaaggagccggcaaagccatcgcccagcagggataggaaggagacgtccatctgagcagcctgcgtggccgtctggagtccgtgagactgaaaggacccgtgcatcttactgtaacccgggggccaggccggctctctcgctgtacattctgtaaaggtgtcttctcttctcagactcttcctctgtcacacgtctgactccttcacgtcaggctcaggttccatgggaggacgaagcagtggacgcattgtgggctttagggacagatgagttttccagatagtgtcagcttatttgaagattaattttctttgttaacttaaaataactattttaacccttgagtggcttctttttaaaccaaaaaccgtctttctttgcttttttatcacagcagaatcaggatctctttctcattcaaggggggaaccacaccaggtcagcgctgcgcctgctgtggccgccgcgagccacgccctctgggatctctggtaccgtcactcttgcttgtgccttccacaccttctcggtgcagatccctatgggggagctgcctcacgttctctgactggtcagagcagcgcctggtgggtgttccctggcccactctcctctctccttctgcagttctaaaccacagtctataagcccgagtcaccaggacggcctgtctggccacagacaggggctgcctgtggagcctgcccaccggcccccggcagtgcagtccagcggggaggaggctgcccgttcctgccagttcctcactgcggggaccagcaaaggccttctcactgggttggtcaaaggtagtcaccttggcctggtgcatccacagaggatgttgttcaaaccagaaatcttttaaacgactgaccttccttaaaaacagaatgactccgattgcttgcttgggctagaatgtacacgtctccttgcctgaataagccatatatatgctcttaaacaaaagtttgaaattatccatatcatctcagtgaacctactggtggactcccaattgacaagattgagcaatagaaaaaaattcctttcctttgaatgatagctgtgattcaccccaccccattttcttgtttctggtccatccgatgagacggatgctctgatgctctgaggcttctgggaggctgggccctggaggcaacgtgctgcaggcgcactctgtcagagtgaacagcaccgcgagacaggccaggctcgtggctcggaagacaaaccccacacacactcaaggggtcgaaaacaaaccccacacgagggctctcacctccttctcctaggtagtatttattttcagcacctgtttgatgcagtttttaatcctctacctattgcactgttgtgactcgttggccattatttgatttttgtacgaaaaaaagctttgttatagaaatcagcatactatttttttaaatctggagagaagatattctggtgactgaaagtatggtcgggtgtcagatataaatgtgcaaatgccttcttgctgtcctgtcggtctcagtacgttcactttatagctgctggcaatatcgaaggttccttttttgtttgtgtaaactctaatttctatcaaggtgtcatggatttttaaaattagtatttcattacaaatgtctcagcattggttaactaatttttgccaggaccattattgatcaagcaaataaattcaacagccatttgggaaaaagaaaagcttctagtttttttgtacacattctttctgtgaggagattgagtactctgcagctggcgaggagttggttgaggcacttcttcaaggccaagggggaacacagtgttttgtttccagctcactttgtacccctcacctctgcagacacggggagaaccccggacccctggcatgcatgctggcggcggcatgcctcccttccacaagcccatgctgctgcagagggagcctgtgtttgcaaaacccagtggactgggctgggtctgctgtctgagcagctcctggctccggtgggaactgcacacaagtccactggcctggcttggccccaggcattgcaattgacagacatttgcatttcatacggtaaatgaggactcagcacagccaaccataatcagcatgtctgggatagactggtctagaataaaaatgaagtttccattgctttgtttgctttaaaaattccacaattaaaatatctgtcattgaaagcttagaaaaaaaaaaa

SEQ ID NO: 60715 - DNA, 3655 bp, Homo sapiens
  misc_feature (2536)..(2536): n is a, c, g, or t
agaggaggatccgggaagccggctgcggcgggaggagggaatgcgcgtgcgcgctggaccgcctcgtcccgttccgtcccaatcattgtaaacaggcagaggctgggcggggtgggaatggggcgcccgaggccggcctggggcgcagcgcaggaggcggctccggtggctgcggcggcagcgtgagcgcgaggaggcggaggctgcggcggggcggacggtcgcgcggcggcaggcacaggtgtaatggataggtaacagagaagacctcgtcccttcctagtcagggcatcagcatgactgagtgcttcctgccccccaccagcagccccagtgaacaccgcagggtggagcatggcagcgggcttacccggacccccagctctgaagagatcagccctactaagtttcctggattgtaccgcactggcgagccctcacctccccatgacatcctccatgagcctcctgatgtagtgtctgatgatgagaaagatcatgggaagaaaaaagggaaatttaagaaaaaggaaaagaggactgaaggctatgcagcctttcaggaagatagctctggagatgaggcagaaagtccttctaaaatgaagaggtccaagggaatccatgttttcaagaagcccagcttttctaaaaagaaggaaaaggattttaaaataaaagagaaacccaaagaagaaaagcataaagaagaaaagcacaaagaagaaaaacataaagagaagaagtcaaaagacttgacagcagctgatgttgttaaacagtggaaggaaaagaagaaaaagaaaaagccaattcaggagccagaggtgcctcagattgatgttccaaatctcaaacccatttttggaattcctttggctgatgcagtagagaggaccatgatgtatgatggcattcggctgccagccgttttccgtgaatgtatagattacgtagagaagtatggcatgaagtgtgaaggcatctacagagtatcaggaattaaatcaaaggtggatgagctaaaagcagcctatgaccgggaggagtctacaaacttggaagactatgagcctaacactgtagccagtttgctgaagcagtatttgcgagaccttccagagaatttgcttaccaaagagcttatgcccagatttgaagaggcttgtgggaggaccacggagactgagaaagtgcaggaattccagcgtttactcaaagaactgccagaatgtaactatcttctgatttcttggctcattgtgcacatggaccatgtcattgcaaaggaactggaaacaaaaatgaatatacagaacatttctatagtgctcagcccaactgtgcagatcagcaatcgagtcctgtatgtgtttttcacacatgtgcaagaactctttggaaatgtggtactaaagcaagtgatgaaacctctgcgatggtctaacatggccacgatgcccacgctgccagagacccaggcgggcatcaaggaggagatcaggagacaggagtttcttttgaattgtttacatcgagatctgcagggtgggataaaggatttgtctaaagaagaaagattatgggaagtacaaagaattttgacagccctcaaaagaaaactgagagaagctaaaagacaggagtgtgaaaccaagattgcacaagagatagccagtctttcaaaagaggatgtttccaaagaagagatgaatgaaaatgaagaagttataaatattctccttgctcaggagaatgagatcctgactgaacaggaggagctcctggccatggagcagtttctgcgccggcagattgcctcagaaaaagaagagattgaacgcctcagagctgagattgctgaaattcagagtcgccagcagcacggccgaagtgagactgaggagtactcctccgagagcgagagcgagagtgaggatgaggaggagctgcagatcattctggaagacttacagagacagaacgaagagctggaaataaagaacaatcatttgaatcaagcaattcatgaggagcgcgaggccatcatcgagctgcgcgtgcagctgcggctgctccagatgcagcgagccaaggccgagcagcaggcgcaggaggacgaggagcctgagtggcgcgggggtgccgtccagccgcccagagacggcgtccttgagccaaaagcagctaaagagcagccaaaggcaggcaaggagccggcaaagccatcgcccagcagggataggaaggagacgtccatctgagcagcctgcgtggtccagcggggaggaggctgcccgttcctgccagttcctcactgcggggaccagcaaaggccttctcactgggttggtcaaaggtagtcaccttggcctggtgcatccacagaggatgttgttcaaaccagaaatcttttaaacgactgaccttccttaaaaacagaatgactccgattgcttgcttgggctagaatgtacacgtctccttgcctgaataagccatatatatgctcttaaacaaaagtttgaaatgtganacttgtgagaaggcatttgccaaaccaagccagctgggccctggaggcaacgtgctgcaggcgcactctgtcagagtgaacagcaccgcgagacaggccaggctcgtggctcggaagacaaaccccacacacactcaaggggtcgaaaacaaaccccacacgagggctctcacctccttctcctaggtagtatttattttcagcacctgtttgatgcagtttttaatcctctacctattgcactgttgtgactcgttggccattatttgatttttgtacgaaaaaaagctttgttatagaaatcagcatactatttttttaaatctggagagaagatattctggtgactgaaagtatggtcgggtgtcagatataaatgtgcaaatgccttcttgctgtcctgtcggtctcagtacgttcactttatagctgctggcaatatcgaaggttccttttttgtttgtgtaaactctaatttctatcaaggtgtcatggatttttaaaattagtatttcattacaaatgtctcagcattggttaactaatttttgccaggaccattattgatcaagcaaataaattcaacagccatttgggaaaaagaaaagcttctagtttttttgtacacattctttctgtgaggagattgagtactctgcagctggcgaggagttggttgaggcacttcttcaaggccaagggggaacacagtgttttgtttccagctcactttgtacccctcacctctgcagacacggggagaaccccggacccctggcatgcatgctggcggcggcatgcctcccttccacaagcccatgctgctgcagagggagcctgtgtttgcaaaacccagtggactgggctgggtctgctgtctgagcagctcctggctccggtgggaactgcacacaagtccactggcctggcttggccccaggcattgcaattgacagacatttgcatttcatacggtaaatgaggactcagcacagccaaccataatcagcatgtctgggatagactggtctagaataaaaatgaagtttccattgctttgtttgctttaaaaattccacaattaaaatatctgtcattgaaagcttagaaaaaaaaaaa

SEQ ID NO: 60716 - DNA, 2544 bp, Homo sapiens
cggacgcgtgggtcgacccacgcgtcgccagcagcacggccgaagtgagactgaggagtactcctccgagagcgagagcgagagtgaggatgaggaggagctgcagatcattctggaagacttacagagacagaacgaagagctggaaataaagaacaatcatttgaatcaagcaattcatgaggagcgcgaggccatcatcgagctgcgcgtgcagctgcggctgctccagatgcagcgagccaaggccgagcagcaggcgcaggaggacgaggagcctgagtggcgcgggggtgccgtccagccgcccagagacggcgtccttgagccaaaagcagctaaagagcagccaaaggcaggcaaggagccggcaaagccatcgcccagcagggataggaaggagacgtccatctgagcagcctgcgtggccgtctggagtccgtgagactgaaaggacccgtgcatcttactgtaacccgggggccaggccggctctctcgctgtacattctgtaaaggtgtcttctcttctcagactcttcctctgtcacacgtctgactccttcacgtcaggctcaggttccatgggaggacgaagcagtggacgcattgtgggctttagggacagatgagttttccagatagtgtcagcttatttgaagattaattttctttgttaacttaaaataactattttaacccttgagtggcttcttctttctcattcaaggggggaaccacaccaggtcagcgctgcgcctgctgtggccgccgcgagccacgccctctgggatctctggtaccgtcactcttgcttgtgccttccacaccttctcggtgcagatccctatgggggagctgcctcacgttctctgactggtcagagcagcgcctggtgggtgttccctggcccactctcctctctccttctgcagttctaaaccacagtctataagcccgagtcaccaggacggcctgtctggccacagacaggggctgcctgtggagcctgcccaccggcccccggcagtgcagtccagcggggaggaggctgcccgttcctgccagttcctcactgcggggaccagcaaaggccttctcactgggttggtcaaaggtagtcaccttggcctggtgcatccacagaggatgttgttcaaaccagaaatcttttaaacgactgaccttccttaaaaacagaatgactccgattgcttgcttgggctagaatgtacacgtctccttgcctgaataagccatatatatgctcttaaacaaaagtttgaaattatccatatcatctcagtgaacctactggtggactcccaattgacaagattgagcaatagaaaaaaattcctttcctttgaatgatagctgtgattcaccccaccccattttcttgtttctggtccatccgatgagacggatgctctgatgctctgaggcttctgggaggctgggccctggaggcaacgtgctgcaggcgcactctgtcagagtgaacagcaccgcgagacaggccaggctcgtggctcggaagacaaaccccacacacactcaaggggtcgaaaacaaaccccacacgagggctctcacctccttctcctaggtagtatttattttcagcacctgtttgatgcagtttttaatcctctacctattgcactgttgtgactcgttggccattatttgatttttgtacgaaaaaaagctttgttatagaaatcagcatactatttttttaaatctggagagaagatattctggtgactgaaagtatggtcgggtgtcagatataaatgtgcaaatgccttcttgctgtcctgtcggtctcagtacgttcactttatagctgctggcaatatcgaaggttccttttttgtttgtgtaaactctaatttctatcaaggtgtcatggatttttaaaattagtatttcattacaaatgtctcagcattggttaactaatttttgccaggaccattattgatcaagcaaataaattcaacagccatttgggaaaaagaaaagcttctagtttttttgtacacattctttctgtgaggagattgagtactctgcagctggcgaggagttggttgaggcacttcttcaaggccaagggggaacacagtgttttgtttccagctcactttgtacccctcacctctgcagacacggggagaaccccggacccctggcatgcatgctggcggcggcatgcctcccttccacaagcccatgctgctgcagagggagcctgtgtttgcaaaacccagtggactgggctgggtctgctgtctgagcagctcctggctccggtgggaactgcacacaagtccactggcctggcttggccccaggcattgcaattgacagacatttgcatttcatacggtaaatgaggactcagcacagccaaccataatcagcatgtctgggatagactggtctagaataaaaatgaagtttccattgctttgtttgctttaaaaattccacaattaaaatatctgtcattgaaagcttagaaaaaaaaaaa

SEQ ID NO: 60717 - DNA, 1863 bp, Homo sapiens
accgcgctctgctcctgagaaatcgtcctctgacttccttaagtgataactgccctttctgtcattccccaagataaagaacaatcatttgaatcaagcaattcatgaggagcgcgaggccatcatcgagctgcgcgtgcagctgcggctgctccagatgcagcgagccaaggccgagcagcaggcgcaggaggacgaggagcctgagtggcgcgggggtgccgtccagccgcccagagacggcgtccttgagccaaaagcagctaaagagcagccaaaggcaggcaaggagccggcaaagccatcgcccagcagggataggaaggagacgtccatctgagcagcctgcgtggtccagcggggaggaggctgcccgttcctgccagttcctcactgcggggaccagcaaaggccttctcactgggttggtcaaaggtagtcaccttggcctggtgcatccacagaggatgttgttcaaaccagaaatcttttaaacgactgaccttccttaaaaacagaatgactccgattgcttgcttgggctagaatgtacacgtctccttgcctgaataagccatatatatgctcttaaacaaaagtttgaaattatccatatcatctcagtgaacctactggtggactcccaattgacaagattgagcaatagaaaaaaattcctttcctttgaatgatagctgtgattcaccccaccccattttcttgtttctggtccatccgatgagacggatgctctgatgctctgaggcttctgggaggctgggccctggaggcaacgtgctgcaggcgcactctgtcagagtgaacagcaccgcgagacaggccaggctcgtggctcggaagacaaaccccacacacactcaaggggtcgaaaacaaaccccacacgagggctctcacctccttctcctaggtagtatttattttcagcacctgtttgatgcagtttttaatcctctacctattgcactgttgtgactcgttggccattatttgatttttgtacgaaaaaaagctttgttatagaaatcagcatactatttttttaaatctggagagaagatattctggtgactgaaagtatggtcgggtgtcagatataaatgtgcaaatgccttcttgctgtcctgtcggtctcagtacgttcactttatagctgctggcaatatcgaaggttccttttttgtttgtgtaaactctaatttctatcaaggtgtcatggatttttaaaattagtatttcattacaaatgtctcagcattggttaactaatttttgccaggaccattattgatcaagcaaataaattcaacagccatttgggaaaaagaaaagcttctagtttttttgtacacattctttctgtgaggagattgagtactctgcagctggcgaggagttggttgaggcacttcttcaaggccaagggggaacacagtgttttgtttccagctcactttgtacccctcacctctgcagacacggggagaaccccggacccctggcatgcatgctggcggcggcatgcctcccttccacaagcccatgctgctgcagagggagcctgtgtttgcaaaacccagtggactgggctgggtctgctgtctgagcagctcctggctccggtgggaactgcacacaagtccactggcctggcttggccccaggcattgcaattgacagacatttgcatttcatacggtaaatgaggactcagcacagccaaccataatcagcatgtctgggatagactggtctagaataaaaatgaagtttccattgctttgtttgctttaaaaattccacaattaaaatatctgtcattgaaagcttagaaaaaaaaaaa

SEQ ID NO: 60718 - DNA, 1270 bp, Homo sapiens
  misc_feature (14)..(14): n is a, c, g, or t
  misc_feature (17)..(17): n is a, c, g, or t
  misc_feature (25)..(26): n is a, c, g, or t
ccagtctggtacgnccncgaggtanngatatcgtcgatccacgcgctctcccaattgacaagattgagcaatagaaaaaaattcctttcctttgaatgatagctgtgattcaccccaccccattttcttgtttctggtccatccgatgagacggatgctctgatgctctgaggcttctgggaggctgggccctggaggcaacgtgctgcaggcgcactctgtcagagtgaacagcaccgcgagacaggccaggctcgtggctcggaagacaaaccccacacacactcaaggggtcgaaaacaaaccccacacgagggctctcacctccttctcctaggtagtatttattttcagcacctgtttgatgcagtttttaatcctctacctattgcactgttgtgactcgttggccattatttgatttttgtacgaaaaaaagctttgttatagaaatcagcatactatttttttaaatctggagagaagatattctggtgactgaaagtatggtcgggtgtcagatataaatgtgcaaatgccttcttgctgtcctgtcggtctcagtacgttcactttatagctgctggcaatatcgaaggttccttttttgtttgtgtaaactctaatttctatcaaggtgtcatggatttttaaaattagtatttcattacaaatgtctcagcattggttaactaatttttgccaggaccattattgatcaagcaaataaattcaacagccatttgggaaaaagaaaagcttctagtttttttgtacacattctttctgtgaggagattgagtactctgcagctggcgaggagttggttgaggcacttcttcaaggccaagggggaacacagtgttttgtttccagctcactttgtacccctcacctctgcagacacggggagaaccccggacccctggcatgcatgctggcggcggcatgcctcccttccacaagcccatgctgctgcagagggagcctgtgtttgcaaaacccagtggactgggctgggtctgctgtctgagcagctcctggctccggtgggaactgcacacaagtccactggcctggcttggccccaggcattgcaattgacagacatttgcatttcatacggtaaatgaggactcagcacagccaaccataatcagcatgtctgggatagactggtctagaataaaaatgaagtttccattgctttgtttgctttaaaaattccacaattaaaatatctgtcattgaaagcttagaaaaaaaaaaa

SEQ ID NO: 60719 - DNA, 1259 bp, Homo sapiens
tattgctcaatcttgtcaattgggagtccaccagtaggttcactgagatgatatggacaatagaaaaaaattcctttcctttgaatgatagctgtgattcaccccaccccattttcttgtttctggtccatccgatgagacggatgctctgatgctctgaggcttctgggaggctgggccctggaggcaacgtgctgcaggcgcactctgtcagagtgaacagcaccgcgagacaggccaggctcgtggctcggaagacaaaccccacacacactcaaggggtcgaaaacaaaccccacacgagggctctcacctccttctcctaggtagtatttattttcagcacctgtttgatgcagtttttaatcctctacctattgcactgttgtgactcgttggccattatttgatttttgtacgaaaaaaagctttgttatagaaatcagcatactatttttttaaatctggagagaagatattctggtgactgaaagtatggtcgggtgtcagatataaatgtgcaaatgccttcttgctgtcctgtcggtctcagtacgttcactttatagctgctggcaatatcgaaggttccttttttgtttgtgtaaactctaatttctatcaaggtgtcatggatttttaaaattagtatttcattacaaatgtctcagcattggttaactaatttttgccaggaccattattgatcaagcaaataaattcaacagccatttgggaaaaagaaaagcttctagtttttttgtacacattctttctgtgaggagattgagtactctgcagctggcgaggagttggttgaggcacttcttcaaggccaagggggaacacagtgttttgtttccagctcactttgtacccctcacctctgcagacacggggagaaccccggacccctggcatgcatgctggcggcggcatgcctcccttccacaagcccatgctgctgcagagggagcctgtgtttgcaaaacccagtggactgggctgggtctgctgtctgagcagctcctggctccggtgggaactgcacacaagtccactggcctggcttggccccaggcattgcaattgacagacatttgcatttcatacggtaaatgaggactcagcacagccaaccataatcagcatgtctgggatagactggtctagaataaaaatgaagtttccattgctttgtttgctttaaaaattccacaattaaaatatctgtcattgaaagcttagaaaaaaaaaaa

SEQ ID NO: 60720 - DNA, 2471 bp, Homo sapiens
agaggaggatccgggaagccggctgcggcgggaggagggaatgcgcgtgcgcgctggaccgcctcgtcccgttccgtcccaatcattgtaaacaggcagaggctgggcggggtgggaatggggcgcccgaggccggcctggggcgcagcgcaggaggcggctccggtggctgcggcggcagcgtgagcgcgaggaggcggaggctgcggcggggcggacggtcgcgcggcggcaggcacaggtgtaatggataggtaacagagaagacctcgtcccttcctagtcagggcatcagcatgactgagtgcttcctgccccccaccagcagccccagtgaacaccgcagggtggagcatggcagcgggcttacccggacccccagctctgaagagatcagccctactaagtttcctggattgtaccgcactggcgagccctcacctccccatgacatcctccatgagcctcctgatgtagtgtctgatgatgagaaagatcatgggaagaaaaaagggaaatttaagaaaaaggaaaagaggactgaaggctatgcagcctttcaggaagatagctctggagatgaggcagaaagtccttctaaaatgaagaggtccaagggaatccatgttttcaagaagcccagcttttctaaaaagaaggaaaaggattttaaaataaaagagaaacccaaagaagaaaagcataaagaagaaaagcacaaagaagaaaaacataaagagaagaagtcaaaagacttgacagcagctgatgttgttaaacagtggaaggaaaagaagaaaaagaaaaagccaattcaggagccagaggtgcctcagattgatgttccaaatctcaaacccatttttggaattcctttggctgatgcagtagagaggaccatgatgtatgatggcattcggctgccagccgttttccgtgaatgtatagattacgtagagaagtatggcatgaagtgtgaaggcatctacagagtatcaggaattaaatcaaaggtggatgagctaaaagcagcctatgaccgggaggagtctacaaacttggaagactatgagcctaacactgtagccagtttgctgaagcagtatttgcgagaccttccagagaatttgcttaccaaagagcttatgcccagatttgaagaggcttgtgggaggaccacggagactgagaaagtgcaggaattccagcgtttactcaaagaactgccagaatgtaactatcttctgatttcttggctcattgtgcacatggaccatgtcattgcaaaggaactggaaacaaaaatgaatatacagaacatttctatagtgctcagcccaactgtgcagatcagcaatcgagtcctgtatgtgtttttcacacatgtgcaagaactctttggaaatgtggtactaaagcaagtgatgaaacctctgcgatggtctaacatggccacgatgcccacgctgccagagacccaggcgggcatcaaggaggagatcaggagacaggagtttcttttgaattgtttacatcgagatctgcagggtgggataaaggatttgtctaaagaagaaagattatgggaagtacaaagaattttgacagccctcaaaagaaaactgagagaagctaaaagacaggagtgtgaaaccaagattgcacaagagatagccagtctttcaaaagaggatgtttccaaagaagagatgaatgaaaatgaagaagttataaatattctccttgctcaggagaatgagatcctgactgaacaggaggagctcctggccatggagcagtttctgcgccggcagattgcctcagaaaaagaagagattgaacgcctcagagctgagattgctgaaattcagagtcgccagcagcacggccgaagtgagactgaggagtactcctccgagagcgagagcgagagtgaggatgaggaggagctgcagatcattctggaagacttacagagacagaacgaagagctggaaataaagaacaatcatttgaatcaagcaattcatgaggagcgcgaggccatcatcgagctgcgcgtgcagctgcggctgctccagatgcagcgagccaaggccgagcagcaggcgcaggaggacgaggagcctgagtggcgcgggggtgccgtccagccgcccagagacggcgtccttgagccaaaagcagctaaagagcagccaaaggcaggcaaggagccggcaaagccatcgcccagcagggataggaaggagacgtccatctgagcagcctgcgtggctggcttggccccaggcattgcaattgacagacatttgcatttcatacggtaaatgaggactcagcacagccaaccataatcagcatgtctgggatagactggtctagaataaaaatgaagtttccattgctttgtttgctttaaaaattccacaattaaaatatctgtcattgaaagcttagaaaaaaaaaaa

SEQ ID NO: 60721 - DNA, 8114 bp, Homo sapiens
  misc_feature (1019)..(1019): n is a, c, g, or t
gctctcctaccttctcgggcagcccagtctttgccatccttgcccagccggtgtggtgcttgtgtgtcacagccttgtagccgggagtcgctgccgagtgggcgctcagttttcgggtcgtcatggctggctacgaatacgtgagcccggagcagctggctggctttgataagtacaagtacagtgctgtggataccaatccactttctctgtatgtcatgcatccattctggaacactatagtaaaggtatttcctacttggctggcgcccaatctgataactttttctggctttctgctggtcgtattcaattttctgctaatggcatactttgatcctgacttttatgcctcagcaccaggtcacaagcacgtgcctgactgggtttggattgtagtgggcatcctcaacttcgtagcctacactctagatggtgtggacggaaagcaagctcgcagaaccaattctagcactcccttaggggagctttttgatcatggcctggatagttggtcatgtgtttactttgttgtgactgtttattccatctttggaagaggatcaactggtgtcagtgtttttgttctttatctcctgctatgggtagttttgttttctttcatcctgtcccactgggaaaagtataacacagggattcttttcctgccatggggatatgacattagccaggtgactatttcttttgtctacatagtgactgcagttgtgggagttgaggcctggtatgaacctttcctgtttaatttcttatatagagacctattcactgcaatgattattggttgtgcattatgtgtgactcttccaatgagtttattaaactttttcagaagctataaaaataacaccttgaaactcaattcagtctatgaagctatggttcccttattttctccatgcttgctgttcattttgtctacagcgtggatcctttggtcaccttcagatattttagagctacatcctagagtattctactttatggttggaacagcntttgccaacagtacatgtcagctgattgtttgccaaatgagtagtacccggtgtccaactttgaattggttgctggttcctctcttcttggttgtcttagtggtaaacctaggagtagcctcttacgttgagagcattctcctgtatacattaacaactgcttttactctggcccacatccattatggagtacgagtggtaaagcagctgagcagccattttcagatttaccccttctcattgaggaaaccaaactcagattgactaggaatggaagaaaagaatattggcctgtaataatctttctttgggcacaaagaagtactgtaaataaatgcttgtaaatatttcctccatcaccattgaactagactgatctgcttgacagacgtgggatctcagtatggtacttggacagcaggaatgatacatataatctgaacttgggaaattttggacctactaactctaagcctattttattttttataaaactatgtgacattttggttgagcagaatgtacgttagaccagcaaaatgttcctaatggttctaacttcgtgagtttacaatgttgtgattcatgcagggttaaagatgctttgtttttattttttaagtaccaaaattggtttcagaacactgataacactcagaaaaccacagtgtgttttcatatttggaactttgtaatagcgggagtagcagtagtccaaacctagtatagggaaaggataaaaataagtcaccttcaccaagagatgccaatgattaccaaacaacagacagttgccaaatactggtttctctttcccctgaaaatggcttttgttctcaaatgataagagagctaatacatttagctaatattctagctctctttattatggaacagatcttgatagatggtttaattttctcctaaagagaaataatcagttgagaatttgagaatgggttgtaattatcgctcacccattgggatggttcattgtttaaatatggcattttccccccttcagctgcaggttcctgagatttggtgcctgtgagctctgattgtaggaatgcatgtgacagtcccagtcctatggtaatgacttaggaggaatgcagataaaagtaccttgtaagataaatataaattggagttaggaatttcatgaacctcactatgaccaaaattaattttttgattcagtttgtctgtctgtctgtccttcccctctcttcttttttcagggtgaggtgctgtgtttcttatttcatacgagataaaacagagagaagttctctcttctccagcttgtccatttccccacttgaagaaaacttttgatatatatgccttactgagtacatgccccctttaatgttaatatgacttggagtaatttctgaggtttactgacaaacataaaaatccctttaattgtagtgtagttgttctataaaccatattttttcatgatgtggatattttcttctatttctttgtcttcatttaatttggtggtggtgaactttacttgctgattttcttttatttttcactgaatgaagtttgtgcttgaatgaagagtgtatcttaaaccccctttttttggacaggctgcacttggataaaataggcaccactgtgttgatatgtaattaaattcataactatttatgaatgtgaccattgttaaatttaattatagtgtatttctttcttgaatttcagtctgctgctttgtaaaaaataactgtaattgatatttcatttttaaaatttataaattccaatcattgtcattcaagttattagaaatgagtcacggcactaactcatggttctatactcattttaagaaattgtaaaggttgaggtgtatttggtgactttctctgagacacagatgaacgttggaaatagatgagaaatggatgcagaataatgcagatagtgatcccatgtttgttaattgccatcatggaagtcagagaattaaccaattaagtgacggtaactattttttgtataccttgttctttgtgatctataaaattaaactggataaaatgttaattgggggtagggaaaaagctttgttttaagatttctaagctaattattttaccgttttgttgaccttgtacacaagaatgagattaatctgtattatataagaaaagaactgataaatatttataaaatgacaaacttggaccacaggctttcttgaccttgtacagtatagtaaaaataccctttacttctgacattaaggtcacgtcctatagtttgggggctcttttacttcaaaggtgtgtttctgccctcttttggttgtatcaaatttatttgaaaattgttttgtgctgtactttatgacttgtttccctatggtggtaaagaatgatgccatagtcagttttattgacattgttagatgaaagaaaagtagctgtcaacaaggggaaagtgaaattgagcaattcactgtttcaggatacttgaggatctttagtgtactgctgactctttttcttgttttgtctgccattcttgaaagtgcatcttgagagcccccatttgttgtgtagagatatagcagctgaagcaggacttcattccagatagctgtgtgcatttatgtcatgccaattactataacatttccaaagtatgaaaggtctttcaggcttatgcatgatattgtgggtgacttcatgccccagcctttctccccagcatacagtgagctgccttttggggagcaatgccatgataaggagcatacgtgcatgttttccgtactttcagaatagagtgccttagctaggccagaggctcgtattgtgtttctgctgaccaaagttgcatacacctgtaagaagtgtctttttaggttatggtattaaaaaaagtcgtttcaggcttatcagataataattctcctatatttgaggggggcatgggataaaaagatttaataatacctggatagagaatgctaatgctgccttttgtgatcctttaatattatccatgcttttataaagtgcagtacacattttgacattgccacagtttacagtgtcattcttccacgaataggtaattgatagagtttatgggtcttagtcttaagggtaacagagtgaataccttccaaataaaaagctaaatattcctccttgtcattttaatgtcattattgaaatacttttaattctaattttcaaaagaaagctaaatgctgattgtggtttaggatgttacagtactaataccatcatgttatttattctaatatagaggcattgagaggaggggagtgtatgtctagagttaccccaattctaaataggtaccaaaagagtattgattatgacctggagcctgagctttgggagaatatacaaaggaaaaagcaggcatagtttccactttaaagggaagaagggactttaacatcctatgaatttgaaacatcctatgaatttgaaagtttcctaagtgttgttttcaaagaactggtttattttatagtcagtcaaaatgcatttggaatgtaccttgcttccataacagactttgactctatgacctatgaagaataaaaagataatctgaaggtgtttgagtcagaggctacttttcccctttatattttatatagaagcctatttgtaattcttcctcttcgttcttcacctgggtttcctcttatctacccaccacctaggacagaggctgcccactcaggtcttgccttgttgcccctagatgttgccacattcacatctccttgatggccttagatctcttgactagtcaaggactgggaacgtgccagggggaacaaagtaagcttgatgggctggaacttttgactttgggtccccaaacagccaaaaacagatacagaaatctttggttgtgtggatgcctgtgttcagagtggccttatcttgacctcagttctggatttaagtactctatagaaaatttgtgaagtcagaccagaattttctttgtcccatgaggtgtctttgtaagtcagcatgctcttgcttgaacaccctgtgggtgaataactttagtaagttagctgccagcattagaaccttccaggaagaattttaactagtatgctacatttgaagcactctgacatgtacatttaaagtgacagttttaaaagtaaaatggtgttaaatctctgaaacttgaacgtatgatgctctggacattttaggaagcttaagtaaatttctgattttcctttattgattatgtaacccacgtgatttgcatattttagtttttatgtttgacagtggtacaaatgactgacattggcaggcagttattgtagggtatatggttaatcacgattgtctaacttttccagagaaagtggtgatatgcttcttccttgcatggagctgtgggaattggatttgttggctcttcatttccagtgtttctacagtgcagaataaatgtaactttttaagcctgcatgctagtaatatgctttgctctttagtaaacaaatatgcaatagatagtaatctatctactttttttaaagcagggatctgctccctatctagacagatcttttaatgcattaatatttagagtagcaaaagaagttttgccatttgtagctctctcacaggtagcttaagcgagggggttgtgttgcatgtgcttagaaaggccaggttcccagaattggaaggtgccacatatacttttagaatattttaacaaaggcttgtctctaggaaaatccacttggactgcagcaggattgttctggtcttccacagaccattcacatggtctttctctccagagaatcattcttagaaagccaggctaaatcagagtagtgctgtttttaaagcaagtatattggatgatggctatagggtaccttaatgctgtgttgaaattggaagcagactgctcttcagcagcacatatactgcaactgaagttagagacagtactgaagacgagggagtagctaaatgctgtggatatttcatgtctgtttggctaatgtcttctcttgaggagtttctatgggtagcaattaaaattagaatttattttaaggtttttattaaaatatatacaatttgccataaattctagattctgatattcttgacaagcactttttgaatatctcaagagtaagttcttgacctggaacatatatagttagtacttgatgtcactaaccaagttgtagaaggagcctgttataattctgcaagatctgtgaatagcattataaatctggggcaggtgcctgtaatcccagcactttgggaagccaaggcaggtggattgcttgagcccaggagttcgacaccaacctgagcaacatggcgaaaccccgtctgtaataaaaatacaaaaaaattagctgggcatggtggcatgtgcctgtaatcccagttactggggaggctgaggcaggagaatcacttgaacctgggagatggagattgcagtgagcagagattgtgccactgcactccagccagagtgacagagcaagactccatctcaaaaaataataataaaaataaacaaatctgtttaaattactgttgcctttcagcattagactttgagtttaataactacaaattgagactgctcacaatattaactttttttgtaggttattttgttgtttagataacttgcctccctagaggagcattcaggagataaagacctagctacatgtaatgatatgatcatttcaaaaatgtgccaagaaagcaaaattcattattgaactctaaatttctgggtgtttttttttttaaagtagcattttctctgggtaaagggaaaggcaatgaatgattgccaacatgtaaactccctgctgcccgccttcccccagtcccctccatctaacataatacagtaaatttgtagccagttgtagaaaaagaaattgatatctttctgagtaaggtttcatgccctgtgactaagaataggtggaggaatcatggccaaatcaaatatgaattgtttagcttggtcctgttgcagttggctttctgtagtgttctgaaacaagaggacgattccattccttctcaggaacctagaaacaacaccgcttgagcaactggaatatgtttgctgcaagcagaatattttggggagaggaagagtagtttaattcaagtagtttaattgaacatattagtcattggtctgtctgggacgtgcagtgttcatagtagcaatgtatgtaccatttattttatctggttgtgtgtgatgtgtgtgtatgcctatttaatatgtacacatatattcactacatatgtatgtatgatatattcatatatacatgcagtctgcttgattatcagcaaaatggtcagcctttatcagatagtttcttcatgtggagttcatctgcatgtggcccttactctgaagcctcttcctgatctggagccacagtctgtctgtcttccagttcatctcagtcctcgagaaaggccctttaaatatgtcactttcccattttcctttaaccatgggttgtgtgagccagaaagagctttgagaaagatggctgcttccaccagggtggaggcttctaggtctgcatgatgatggggcccgtttctggccagagggtggctctgggagcagttgtgctgcgggcttgctgggggagaactctaactgttgcagaaacagagcttcatggcttgcttaaattacttagctggaatattttaaagtgtcagataatgtgatgtacaaagagagtatgccgatgcatttcattgtttttgcattatctgtatcagtgtttcccattgctagcccgaataatcaagaccagactgtttcttgtcactggattctggaagccttgccctttcaactggatttatgtttgtttctgctgctgtgaaaccccaaagtaatgcagtaggttttaattgaaaattgtttaattctattattgataattatttattgtaataaaagtaaaagagtaatttttaaatccttttaattgttttcagattgtct

SEQ ID NO: 60722 - DNA, 490 bp, Homo sapiens
gctctcctaccttctcgggcagcccagtctttgccatccttgcccagccggtgtggtgcttgtgtgtcacagccttgtagccgggagtcgctgccgagtgggcgctcagttttcgggtcgtcatggctggctacgaatacgtgagcccggagcagctggctggctttgataagtacaagcccccgaaaggatggagttccttctgttgtgtcaatcgccttcattttagtgaagtttccactcgcctgtcatgcatacaacttcggaggaggagatgatcgtttggcagatgaggcccgggaggggagcgacttgccgatgccatcctgctgatgtctccacttctgctcccggcagggacttcctaagcggcagcttgtggcgctagggccaccagatgaaagggaggtgcacaggaaggagctgtggagtggaaagagcgcgggctttcgagcacatacaaacctgattacaaaagtcagatttcttt

SEQ ID NO: 60723 - DNA, 7701 bp, Homo sapiens
gctctcctaccttctcgggcagcccagtctttgccatccttgcccagccggtgtggtgcttgtgtgtcacagccttgtagccgggagtcgctgccgagtgggcgctcagttttcgggtcgtcatggctggctacgaatacgtgagcccggagcagctggctggctttgataagtacaagtacagtgctgtggataccaatccactttctctgtatgtcatgcatccattctggaacactatagtaaaggtatttcctacttggctggcgcccaatctgataactttttctggctttctgctggtcgtattcaattttctgctaatggcatactttgatcctgacttttatgcctcagcaccaggtcacaagcacgtgcctgactgggtttggattgtagtgggcatcctcaacttcgtagcctacactctagatggtgtggacggaaagcaagctcgcagaaccaattctagcactcccttaggggagctttttgatcatggcctggatagttggtcatgtgtttactttgttgtgactgtttattccatctttggaagaggatcaactggtgtcagtgtttttgttctttatctcctgctatgggtagttttgttttctttcatcctgtcccactgggaaaagtataacacagggattcttttcctgccatggggatatgacattagccaggtgactatttcttttgtctacatagtgactgcagttgtgggagttgaggcctggtatgaacctttcctgtttaatttcttatatagagacctattcactgcaatgattattggtaaagcagctgagcagccattttcagatttaccccttctcattgaggaaaccaaactcagattgactaggaatggaagaaaagaatattggcctgtaataatctttctttgggcacaaagaagtactgtaaataaatgcttgtaaatatttcctccatcaccattgaactagactgatctgcttgacagacgtgggatctcagtatggtacttggacagcaggaatgatacatataatctgaacttgggaaattttggacctactaactctaagcctattttattttttataaaactatgtgacattttggttgagcagaatgtacgttagaccagcaaaatgttcctaatggttctaacttcgtgagtttacaatgttgtgattcatgcagggttaaagatgctttgtttttattttttaagtaccaaaattggtttcagaacactgataacactcagaaaaccacagtgtgttttcatatttggaactttgtaatagcgggagtagcagtagtccaaacctagtatagggaaaggataaaaataagtcaccttcaccaagagatgccaatgattaccaaacaacagacagttgccaaatactggtttctctttcccctgaaaatggcttttgttctcaaatgataagagagctaatacatttagctaatattctagctctctttattatggaacagatcttgatagatggtttaattttctcctaaagagaaataatcagttgagaatttgagaatgggttgtaattatcgctcacccattgggatggttcattgtttaaatatggcattttccccccttcagctgcaggttcctgagatttggtgcctgtgagctctgattgtaggaatgcatgtgacagtcccagtcctatggtaatgacttaggaggaatgcagataaaagtaccttgtaagataaatataaattggagttaggaatttcatgaacctcactatgaccaaaattaattttttgattcagtttgtctgtctgtctgtccttcccctctcttcttttttcagggtgaggtgctgtgtttcttatttcatacgagataaaacagagagaagttctctcttctccagcttgtccatttccccacttgaagaaaacttttgatatatatgccttactgagtacatgccccctttaatgttaatatgacttggagtaatttctgaggtttactgacaaacataaaaatccctttaattgtagtgtagttgttctataaaccatattttttcatgatgtggatattttcttctatttctttgtcttcatttaatttggtggtggtgaactttacttgctgattttcttttatttttcactgaatgaagtttgtgcttgaatgaagagtgtatcttaaaccccctttttttggacaggctgcacttggataaaataggcaccactgtgttgatatgtaattaaattcataactatttatgaatgtgaccattgttaaatttaattatagtgtatttctttcttgaatttcagtctgctgctttgtaaaaaataactgtaattgatatttcatttttaaaatttataaattccaatcattgtcattcaagttattagaaatgagtcacggcactaactcatggttctatactcattttaagaaattgtaaaggttgaggtgtatttggtgactttctctgagacacagatgaacgttggaaatagatgagaaatggatgcagaataatgcagatagtgatcccatgtttgttaattgccatcatggaagtcagagaattaaccaattaagtgacggtaactattttttgtataccttgttctttgtgatctataaaattaaactggataaaatgttaattgggggtagggaaaaagctttgttttaagatttctaagctaattattttaccgttttgttgaccttgtacacaagaatgagattaatctgtattatataagaaaagaactgataaatatttataaaatgacaaacttggaccacaggctttcttgaccttgtacagtatagtaaaaataccctttacttctgacattaaggtcacgtcctatagtttgggggctcttttacttcaaaggtgtgtttctgccctcttttggttgtatcaaatttatttgaaaattgttttgtgctgtactttatgacttgtttccctatggtggtaaagaatgatgccatagtcagttttattgacattgttagatgaaagaaaagtagctgtcaacaaggggaaagtgaaattgagcaattcactgtttcaggatacttgaggatctttagtgtactgctgactctttttcttgttttgtctgccattcttgaaagtgcatcttgagagcccccatttgttgtgtagagatatagcagctgaagcaggacttcattccagatagctgtgtgcatttatgtcatgccaattactataacatttccaaagtatgaaaggtctttcaggcttatgcatgatattgtgggtgacttcatgccccagcctttctccccagcatacagtgagctgccttttggggagcaatgccatgataaggagcatacgtgcatgttttccgtactttcagaatagagtgccttagctaggccagaggctcgtattgtgtttctgctgaccaaagttgcatacacctgtaagaagtgtctttttaggttatggtattaaaaaaagtcgtttcaggcttatcagataataattctcctatatttgaggggggcatgggataaaaagatttaataatacctggatagagaatgctaatgctgccttttgtgatcctttaatattatccatgcttttataaagtgcagtacacattttgacattgccacagtttacagtgtcattcttccacgaataggtaattgatagagtttatgggtcttagtcttaagggtaacagagtgaataccttccaaataaaaagctaaatattcctccttgtcattttaatgtcattattgaaatacttttaattctaattttcaaaagaaagctaaatgctgattgtggtttaggatgttacagtactaataccatcatgttatttattctaatatagaggcattgagaggaggggagtgtatgtctagagttaccccaattctaaataggtaccaaaagagtattgattatgacctggagcctgagctttgggagaatatacaaaggaaaaagcaggcatagtttccactttaaagggaagaagggactttaacatcctatgaatttgaaacatcctatgaatttgaaagtttcctaagtgttgttttcaaagaactggtttattttatagtcagtcaaaatgcatttggaatgtaccttgcttccataacagactttgactctatgacctatgaagaataaaaagataatctgaaggtgtttgagtcagaggctacttttcccctttatattttatatagaagcctatttgtaattcttcctcttcgttcttcacctgggtttcctcttatctacccaccacctaggacagaggctgcccactcaggtcttgccttgttgcccctagatgttgccacattcacatctccttgatggccttagatctcttgactagtcaaggactgggaacgtgccagggggaacaaagtaagcttgatgggctggaacttttgactttgggtccccaaacagccaaaaacagatacagaaatctttggttgtgtggatgcctgtgttcagagtggccttatcttgacctcagttctggatttaagtactctatagaaaatttgtgaagtcagaccagaattttctttgtcccatgaggtgtctttgtaagtcagcatgctcttgcttgaacaccctgtgggtgaataactttagtaagttagctgccagcattagaaccttccaggaagaattttaactagtatgctacatttgaagcactctgacatgtacatttaaagtgacagttttaaaagtaaaatggtgttaaatctctgaaacttgaacgtatgatgctctggacattttaggaagcttaagtaaatttctgattttcctttattgattatgtaacccacgtgatttgcatattttagtttttatgtttgacagtggtacaaatgactgacattggcaggcagttattgtagggtatatggttaatcacgattgtctaacttttccagagaaagtggtgatatgcttcttccttgcatggagctgtgggaattggatttgttggctcttcatttccagtgtttctacagtgcagaataaatgtaactttttaagcctgcatgctagtaatatgctttgctctttagtaaacaaatatgcaatagatagtaatctatctactttttttaaagcagggatctgctccctatctagacagatcttttaatgcattaatatttagagtagcaaaagaagttttgccatttgtagctctctcacaggtagcttaagcgagggggttgtgttgcatgtgcttagaaaggccaggttcccagaattggaaggtgccacatatacttttagaatattttaacaaaggcttgtctctaggaaaatccacttggactgcagcaggattgttctggtcttccacagaccattcacatggtctttctctccagagaatcattcttagaaagccaggctaaatcagagtagtgctgtttttaaagcaagtatattggatgatggctatagggtaccttaatgctgtgttgaaattggaagcagactgctcttcagcagcacatatactgcaactgaagttagagacagtactgaagacgagggagtagctaaatgctgtggatatttcatgtctgtttggctaatgtcttctcttgaggagtttctatgggtagcaattaaaattagaatttattttaaggtttttattaaaatatatacaatttgccataaattctagattctgatattcttgacaagcactttttgaatatctcaagagtaagttcttgacctggaacatatatagttagtacttgatgtcactaaccaagttgtagaaggagcctgttataattctgcaagatctgtgaatagcattataaatctggggcaggtgcctgtaatcccagcactttgggaagccaaggcaggtggattgcttgagcccaggagttcgacaccaacctgagcaacatggcgaaaccccgtctgtaataaaaatacaaaaaaattagctgggcatggtggcatgtgcctgtaatcccagttactggggaggctgaggcaggagaatcacttgaacctgggagatggagattgcagtgagcagagattgtgccactgcactccagccagagtgacagagcaagactccatctcaaaaaataataataaaaataaacaaatctgtttaaattactgttgcctttcagcattagactttgagtttaataactacaaattgagactgctcacaatattaactttttttgtaggttattttgttgtttagataacttgcctccctagaggagcattcaggagataaagacctagctacatgtaatgatatgatcatttcaaaaatgtgccaagaaagcaaaattcattattgaactctaaatttctgggtgtttttttttttaaagtagcattttctctgggtaaagggaaaggcaatgaatgattgccaacatgtaaactccctgctgcccgccttcccccagtcccctccatctaacataatacagtaaatttgtagccagttgtagaaaaagaaattgatatctttctgagtaaggtttcatgccctgtgactaagaataggtggaggaatcatggccaaatcaaatatgaattgtttagcttggtcctgttgcagttggctttctgtagtgttctgaaacaagaggacgattccattccttctcaggaacctagaaacaacaccgcttgagcaactggaatatgtttgctgcaagcagaatattttggggagaggaagagtagtttaattcaagtagtttaattgaacatattagtcattggtctgtctgggacgtgcagtgttcatagtagcaatgtatgtaccatttattttatctggttgtgtgtgatgtgtgtgtatgcctatttaatatgtacacatatattcactacatatgtatgtatgatatattcatatatacatgcagtctgcttgattatcagcaaaatggtcagcctttatcagatagtttcttcatgtggagttcatctgcatgtggcccttactctgaagcctcttcctgatctggagccacagtctgtctgtcttccagttcatctcagtcctcgagaaaggccctttaaatatgtcactttcccattttcctttaaccatgggttgtgtgagccagaaagagctttgagaaagatggctgcttccaccagggtggaggcttctaggtctgcatgatgatggggcccgtttctggccagagggtggctctgggagcagttgtgctgcgggcttgctgggggagaactctaactgttgcagaaacagagcttcatggcttgcttaaattacttagctggaatattttaaagtgtcagataatgtgatgtacaaagagagtatgccgatgcatttcattgtttttgcattatctgtatcagtgtttcccattgctagcccgaataatcaagaccagactgtttcttgtcactggattctggaagccttgccctttcaactggatttatgtttgtttctgctgctgtgaaaccccaaagtaatgcagtaggttttaattgaaaattgtttaattctattattgataattatttattgtaataaaagtaaaagagtaatttttaaatccttttaattgttttcagattgtct

SEQ ID NO: 60724 - DNA, 8047 bp, Homo sapiens
  misc_feature (952)..(952): n is a, c, g, or t
ttaaacaatgggctaatgatcgatgccgtggtttgaatgcaggtgtgttaagctgtagcggatgtgcgatgcgtcatcgggtcgtcatgtgacgatcgtaccacatgtgtgatagtacagtaagttgtatacctcactttctctgtatgtcatgcatccattctggaacactatagtaaaggtatttcctacttggctggcgcccaatctgataactttttctggctttctgctggtcgtattcaattttctgctaatggcatactttgatcctgacttttatgcctcagcaccaggtcacaagcacgtgcctgactgggtttggattgtagtgggcatcctcaacttcgtagcctacactctagatggtgtggacggaaagcaagctcgcagaaccaattctagcactcccttaggggagctttttgatcatggcctggatagttggtcatgtgtttactttgttgtgactgtttattccatctttggaagaggatcaactggtgtcagtgtttttgttctttatctcctgctatgggtagttttgttttctttcatcctgtcccactgggaaaagtataacacagggattcttttcctgccatggggatatgacattagccaggtgactatttcttttgtctacatagtgactgcagttgtgggagttgaggcctggtatgaacctttcctgtttaatttcttatatagagacctattcactgcaatgattattggttgtgcattatgtgtgactcttccaatgagtttattaaactttttcagaagctataaaaataacaccttgaaactcaattcagtctatgaagctatggttcccttattttctccatgcttgctgttcattttgtctacagcgtggatcctttggtcaccttcagatattttagagctacatcctagagtattctactttatggttggaacagcntttgccaacagtacatgtcagctgattgtttgccaaatgagtagtacccggtgtccaactttgaattggttgctggttcctctcttcttggttgtcttagtggtaaacctaggagtagcctcttacgttgagagcattctcctgtatacattaacaactgcttttactctggcccacatccattatggagtacgagtggtaaagcagctgagcagccattttcagatttaccccttctcattgaggaaaccaaactcagattgactaggaatggaagaaaagaatattggcctgtaataatctttctttgggcacaaagaagtactgtaaataaatgcttgtaaatatttcctccatcaccattgaactagactgatctgcttgacagacgtgggatctcagtatggtacttggacagcaggaatgatacatataatctgaacttgggaaattttggacctactaactctaagcctattttattttttataaaactatgtgacattttggttgagcagaatgtacgttagaccagcaaaatgttcctaatggttctaacttcgtgagtttacaatgttgtgattcatgcagggttaaagatgctttgtttttattttttaagtaccaaaattggtttcagaacactgataacactcagaaaaccacagtgtgttttcatatttggaactttgtaatagcgggagtagcagtagtccaaacctagtatagggaaaggataaaaataagtcaccttcaccaagagatgccaatgattaccaaacaacagacagttgccaaatactggtttctctttcccctgaaaatggcttttgttctcaaatgataagagagctaatacatttagctaatattctagctctctttattatggaacagatcttgatagatggtttaattttctcctaaagagaaataatcagttgagaatttgagaatgggttgtaattatcgctcacccattgggatggttcattgtttaaatatggcattttccccccttcagctgcaggttcctgagatttggtgcctgtgagctctgattgtaggaatgcatgtgacagtcccagtcctatggtaatgacttaggaggaatgcagataaaagtaccttgtaagataaatataaattggagttaggaatttcatgaacctcactatgaccaaaattaattttttgattcagtttgtctgtctgtctgtccttcccctctcttcttttttcagggtgaggtgctgtgtttcttatttcatacgagataaaacagagagaagttctctcttctccagcttgtccatttccccacttgaagaaaacttttgatatatatgccttactgagtacatgccccctttaatgttaatatgacttggagtaatttctgaggtttactgacaaacataaaaatccctttaattgtagtgtagttgttctataaaccatattttttcatgatgtggatattttcttctatttctttgtcttcatttaatttggtggtggtgaactttacttgctgattttcttttatttttcactgaatgaagtttgtgcttgaatgaagagtgtatcttaaaccccctttttttggacaggctgcacttggataaaataggcaccactgtgttgatatgtaattaaattcataactatttatgaatgtgaccattgttaaatttaattatagtgtatttctttcttgaatttcagtctgctgctttgtaaaaaataactgtaattgatatttcatttttaaaatttataaattccaatcattgtcattcaagttattagaaatgagtcacggcactaactcatggttctatactcattttaagaaattgtaaaggttgaggtgtatttggtgactttctctgagacacagatgaacgttggaaatagatgagaaatggatgcagaataatgcagatagtgatcccatgtttgttaattgccatcatggaagtcagagaattaaccaattaagtgacggtaactattttttgtataccttgttctttgtgatctataaaattaaactggataaaatgttaattgggggtagggaaaaagctttgttttaagatttctaagctaattattttaccgttttgttgaccttgtacacaagaatgagattaatctgtattatataagaaaagaactgataaatatttataaaatgacaaacttggaccacaggctttcttgaccttgtacagtatagtaaaaataccctttacttctgacattaaggtcacgtcctatagtttgggggctcttttacttcaaaggtgtgtttctgccctcttttggttgtatcaaatttatttgaaaattgttttgtgctgtactttatgacttgtttccctatggtggtaaagaatgatgccatagtcagttttattgacattgttagatgaaagaaaagtagctgtcaacaaggggaaagtgaaattgagcaattcactgtttcaggatacttgaggatctttagtgtactgctgactctttttcttgttttgtctgccattcttgaaagtgcatcttgagagcccccatttgttgtgtagagatatagcagctgaagcaggacttcattccagatagctgtgtgcatttatgtcatgccaattactataacatttccaaagtatgaaaggtctttcaggcttatgcatgatattgtgggtgacttcatgccccagcctttctccccagcatacagtgagctgccttttggggagcaatgccatgataaggagcatacgtgcatgttttccgtactttcagaatagagtgccttagctaggccagaggctcgtattgtgtttctgctgaccaaagttgcatacacctgtaagaagtgtctttttaggttatggtattaaaaaaagtcgtttcaggcttatcagataataattctcctatatttgaggggggcatgggataaaaagatttaataatacctggatagagaatgctaatgctgccttttgtgatcctttaatattatccatgcttttataaagtgcagtacacattttgacattgccacagtttacagtgtcattcttccacgaataggtaattgatagagtttatgggtcttagtcttaagggtaacagagtgaataccttccaaataaaaagctaaatattcctccttgtcattttaatgtcattattgaaatacttttaattctaattttcaaaagaaagctaaatgctgattgtggtttaggatgttacagtactaataccatcatgttatttattctaatatagaggcattgagaggaggggagtgtatgtctagagttaccccaattctaaataggtaccaaaagagtattgattatgacctggagcctgagctttgggagaatatacaaaggaaaaagcaggcatagtttccactttaaagggaagaagggactttaacatcctatgaatttgaaacatcctatgaatttgaaagtttcctaagtgttgttttcaaagaactggtttattttatagtcagtcaaaatgcatttggaatgtaccttgcttccataacagactttgactctatgacctatgaagaataaaaagataatctgaaggtgtttgagtcagaggctacttttcccctttatattttatatagaagcctatttgtaattcttcctcttcgttcttcacctgggtttcctcttatctacccaccacctaggacagaggctgcccactcaggtcttgccttgttgcccctagatgttgccacattcacatctccttgatggccttagatctcttgactagtcaaggactgggaacgtgccagggggaacaaagtaagcttgatgggctggaacttttgactttgggtccccaaacagccaaaaacagatacagaaatctttggttgtgtggatgcctgtgttcagagtggccttatcttgacctcagttctggatttaagtactctatagaaaatttgtgaagtcagaccagaattttctttgtcccatgaggtgtctttgtaagtcagcatgctcttgcttgaacaccctgtgggtgaataactttagtaagttagctgccagcattagaaccttccaggaagaattttaactagtatgctacatttgaagcactctgacatgtacatttaaagtgacagttttaaaagtaaaatggtgttaaatctctgaaacttgaacgtatgatgctctggacattttaggaagcttaagtaaatttctgattttcctttattgattatgtaacccacgtgatttgcatattttagtttttatgtttgacagtggtacaaatgactgacattggcaggcagttattgtagggtatatggttaatcacgattgtctaacttttccagagaaagtggtgatatgcttcttccttgcatggagctgtgggaattggatttgttggctcttcatttccagtgtttctacagtgcagaataaatgtaactttttaagcctgcatgctagtaatatgctttgctctttagtaaacaaatatgcaatagatagtaatctatctactttttttaaagcagggatctgctccctatctagacagatcttttaatgcattaatatttagagtagcaaaagaagttttgccatttgtagctctctcacaggtagcttaagcgagggggttgtgttgcatgtgcttagaaaggccaggttcccagaattggaaggtgccacatatacttttagaatattttaacaaaggcttgtctctaggaaaatccacttggactgcagcaggattgttctggtcttccacagaccattcacatggtctttctctccagagaatcattcttagaaagccaggctaaatcagagtagtgctgtttttaaagcaagtatattggatgatggctatagggtaccttaatgctgtgttgaaattggaagcagactgctcttcagcagcacatatactgcaactgaagttagagacagtactgaagacgagggagtagctaaatgctgtggatatttcatgtctgtttggctaatgtcttctcttgaggagtttctatgggtagcaattaaaattagaatttattttaaggtttttattaaaatatatacaatttgccataaattctagattctgatattcttgacaagcactttttgaatatctcaagagtaagttcttgacctggaacatatatagttagtacttgatgtcactaaccaagttgtagaaggagcctgttataattctgcaagatctgtgaatagcattataaatctggggcaggtgcctgtaatcccagcactttgggaagccaaggcaggtggattgcttgagcccaggagttcgacaccaacctgagcaacatggcgaaaccccgtctgtaataaaaatacaaaaaaattagctgggcatggtggcatgtgcctgtaatcccagttactggggaggctgaggcaggagaatcacttgaacctgggagatggagattgcagtgagcagagattgtgccactgcactccagccagagtgacagagcaagactccatctcaaaaaataataataaaaataaacaaatctgtttaaattactgttgcctttcagcattagactttgagtttaataactacaaattgagactgctcacaatattaactttttttgtaggttattttgttgtttagataacttgcctccctagaggagcattcaggagataaagacctagctacatgtaatgatatgatcatttcaaaaatgtgccaagaaagcaaaattcattattgaactctaaatttctgggtgtttttttttttaaagtagcattttctctgggtaaagggaaaggcaatgaatgattgccaacatgtaaactccctgctgcccgccttcccccagtcccctccatctaacataatacagtaaatttgtagccagttgtagaaaaagaaattgatatctttctgagtaaggtttcatgccctgtgactaagaataggtggaggaatcatggccaaatcaaatatgaattgtttagcttggtcctgttgcagttggctttctgtagtgttctgaaacaagaggacgattccattccttctcaggaacctagaaacaacaccgcttgagcaactggaatatgtttgctgcaagcagaatattttggggagaggaagagtagtttaattcaagtagtttaattgaacatattagtcattggtctgtctgggacgtgcagtgttcatagtagcaatgtatgtaccatttattttatctggttgtgtgtgatgtgtgtgtatgcctatttaatatgtacacatatattcactacatatgtatgtatgatatattcatatatacatgcagtctgcttgattatcagcaaaatggtcagcctttatcagatagtttcttcatgtggagttcatctgcatgtggcccttactctgaagcctcttcctgatctggagccacagtctgtctgtcttccagttcatctcagtcctcgagaaaggccctttaaatatgtcactttcccattttcctttaaccatgggttgtgtgagccagaaagagctttgagaaagatggctgcttccaccagggtggaggcttctaggtctgcatgatgatggggcccgtttctggccagagggtggctctgggagcagttgtgctgcgggcttgctgggggagaactctaactgttgcagaaacagagcttcatggcttgcttaaattacttagctggaatattttaaagtgtcagataatgtgatgtacaaagagagtatgccgatgcatttcattgtttttgcattatctgtatcagtgtttcccattgctagcccgaataatcaagaccagactgtttcttgtcactggattctggaagccttgccctttcaactggatttatgtttgtttctgctgctgtgaaaccccaaagtaatgcagtaggttttaattgaaaattgtttaattctattattgataattatttattgtaataaaagtaaaagagtaatttttaaatccttttaattgttttcagattgtct

SEQ ID NO: 60725 - DNA, 8060 bp, Homo sapiens
  misc_feature (1019)..(1019): n is a, c, g, or t
gctctcctaccttctcgggcagcccagtctttgccatccttgcccagccggtgtggtgcttgtgtgtcacagccttgtagccgggagtcgctgccgagtgggcgctcagttttcgggtcgtcatggctggctacgaatacgtgagcccggagcagctggctggctttgataagtacaagtacagtgctgtggataccaatccactttctctgtatgtcatgcatccattctggaacactatagtaaaggtatttcctacttggctggcgcccaatctgataactttttctggctttctgctggtcgtattcaattttctgctaatggcatactttgatcctgacttttatgcctcagcaccaggtcacaagcacgtgcctgactgggtttggattgtagtgggcatcctcaacttcgtagcctacactctagatggtgtggacggaaagcaagctcgcagaaccaattctagcactcccttaggggagctttttgatcatggcctggatagttggtcatgtgtttactttgttgtgactgtttattccatctttggaagaggatcaactggtgtcagtgtttttgttctttatctcctgctatgggtagttttgttttctttcatcctgtcccactgggaaaagtataacacagggattcttttcctgccatggggatatgacattagccaggtgactatttcttttgtctacatagtgactgcagttgtgggagttgaggcctggtatgaacctttcctgtttaatttcttatatagagacctattcactgcaatgattattggttgtgcattatgtgtgactcttccaatgagtttattaaactttttcagaagctataaaaataacaccttgaaactcaattcagtctatgaagctatggttcccttattttctccatgcttgctgttcattttgtctacagcgtggatcctttggtcaccttcagatattttagagctacatcctagagtattctactttatggttggaacagcntttgccaacagtacatgtcagctgattgtttgccaaatgagtagtacccggtgtccaactttgaattggttgctggttcctctcttcttggttgtcttagtggtaaacctaggagtagcctcttacgttgagagcattctcctgtatacattaacaactgcttttactctggcccacatccattatggagtacgagtggtaaagcagctgagcagccattttcagatttaccccttctcattgaggaaaccaaactcagattgactaggaatggaagaaaagaatattggcctgtaataatctttctttgggcacaaagaagtactgtaaataaatgcttgtaaatatttcctccatcaccattgaactagactgatctgcttgacagacgtgggatctcagtatggtacttggacagcaggaatgatacatataatctgaacttgggaaattttggacctactaactctaagcctattttattttttataaaactatgtgacattttggttgagcagaatgtacgttagaccagcaaaatgttcctaatggttctaacttcgtgagtttacaatgttgtgattcatgcagggttaaagatgctttgtttttattttttaagtaccaaaattggtttcagaacactgataacactcagaaaaccacagtgtgttttcatatttggaactttgtaatagcgggagtagcagtagtccaaacctagtatagggaaaggataaaaataagtcaccttcaccaagagatgccaatgattaccaaacaacagacagttgccaaatactggtttctctttcccctgaaaatggcttttgttctcaaatgataagagagctaatacatttagctaatattctagctctctttattatggaacagatcttgatagatggtttaattttctcctaaagagaaataatcagttgagaatttgagaatgggttgtaattatcgctcacccattgggatggttcattgtttaaatatggcattttccccccttcagctgcaggttcctgagatttggtgcctgtgagctctgattgtaggaatgcatgtgacagtcccagtcctatggtaatgacttaggaggaatgcagataaaagtaccttgtaagataaatataaattggagttaggaatttcatgaacctcactatgaccaaaattaattttttgattcagtttgtctgtctgtctgtccttcccctctcttcttttttcagggtgaggtgctgtgtttcttatttcatacgagataaaacagagagaagttctctcttctccagcttgtccatttccccacttgaagaaaacttttgatatatatgccttactgagtacatgccccctttaatgttaatatgacttggagtaatttctgaggtttactgacaaacataaaaatccctttaattgtagtgtagttgttctataaaccatattttttcatgatgtggatattttcttctatttctttgtcttcatttaatttggtggtggtgaactttacttgctgattttcttttatttttcactgaatgaagtttgtgcttgaatgaagagtgtatcttaaaccccctttttttggacaggctgcacttggataaaataggcaccactgtgttgatatgtaattaaattcataactatttatgaatgtgaccattgttaaatttaattatagtgtatttctttcttgaatttcagtctgctgctttgtaaaaaataactgtaattgatatttcatttttaaaatttataaattccaatcattgtcattcaagttattagaaatgagtcacggcactaactcatggttctatactcattttaagaaattgtaaaggttgaggtgtatttggtgactttctctgagacacagatgaacgttggaaatagatgagaaatggatgcagaataatgcagatagtgatcccatgtttgttaattgccatcatggaagtcagagaattaaccaattaagtgacggtaactattttttgtataccttgttctttgtgatctataaaattaaactggataaaatgttaattgggggtagggaaaaagctttgttttaagatttctaagctaattattttaccgttttgttgaccttgtacacaagaatgagattaatctgtattatataagaaaagaactgataaatatttataaaatgacaaacttggaccacaggctttcttgaccttgtacagtatagtaaaaataccctttacttctgacattaaggtcacgtcctatagtttgggggctcttttacttcaaaggtgtgtttctgccctcttttggttgtatcaaatttatttgaaaattgttttgtgctgtactttatgacttgtttccctatggtggtaaagaatgatgccatagtcagttttattgacattgttagatgaaagaaaagtagctgtcaacaaggggaaagtgaaattgagcaattcactgtttcaggatacttgaggatctttagtgtactgctgactctttttcttgttttgtctgccattcttgaaagtgcatcttgagagcccccatttgttgtgtagagatatagcagctgaagcaggacttcattccagatagctgtgtgcatttatgtcatgccaattactataacatttccaaagtatgaaaggtctttcaggcttatgcatgatattgtgggtgacttcatgccccagcctttctccccagcatacagtgagctgccttttggggagcaatgccatgataaggagcatacgtgcatgttttccgtactttcagaatagagtgccttagctaggccagaggctcgtattgtgtttctgctgaccaaagttgcatacacctgtaagaagtgtctttttaggttatggtattaaaaaaagtcgtttcaggcttatcagataataattctcctatatttgaggggggcatgggataaaaagatttaataatacctggatagagaatgctaatgctgccttttgtgatcctttaatattatccatgcttttataaagtgcagtacacattttgacattgccacagtttacagtgtcattcttccacgaataggtaattgatagagtttatgggtcttagtcttaagggtaacagagtgaataccttccaaataaaaagctaaatattcctccttgtcattttaatgtcattattgaaatacttttaattctaattttcaaaagaaagctaaatgctgattgtggtttaggatgttacagtactaataccatcatgttatttattctaatatagaggcattgagaggaggggagtgtatgtctagagttaccccaattctaaataggtaccaaaagagtattgattatgacctggagcctgagctttgggagaatatacaaaggaaaaagcaggcatagtttccactttaaagggaagaagggactttaacatcctatgaatttgaaacatcctatgaatttgaaagtttcctaagtgttgttttcaaagaactggtttattttatagtcagtcaaaatgcatttggaatgtaccttgcttccataacagactttgactctatgacctatgaagaataaaaagataatctgaaggtgtttgagtcagaggctacttttcccctttatattttatatagaagcctatttgtaattcttcctcttcgttcttcacctgggtttcctcttatctacccaccacctaggacagaggctgcccactcaggtcttgccttgttgcccctagatgttgccacattcacatctccttgatggccttagatctcttgactagtcaaggactgggaacgtgccagggggaacaaagtaagcttgatgggctggaacttttgactttgggtccccaaacagccaaaaacagatacagaaatctttggttgtgtggatgcctgtgttcagagtggccttatcttgacctcagttctggatttaagtactctatagaaaatttgtgaagtcagaccagaattttctttgtcccatgaggtgtctttgtaagtcagcatgctcttgcttgaacaccctgtgggtgaataactttagtaagttagctgccagcattagaaccttccaggaagaattttaactagtatgctacatttgaagcactctgacatgtacatttaaagtgacagttttaaaagtaaaatggtgttaaatctctgaaacttgaacgtatgatgctctggacattttaggaagcttaagtaaatttctgattttcctttattgattatgtaacccacgtgatttgcatattttagtttttatgtttgacagtggtacaaatgactgacattggcaggcagttattgtagggtatatggttaatcacgattgtctaacttttccagagaaagtggtgatatgcttcttccttgcatggagctgtgggaattggatttgttggctcttcatttccagtgtttctacagtgcagaataaatgtaactttttaagcctgcatgctagtaatatgctttgctctttagtaaacaaatatgcaatagatagtaatctatctactttttttaaagcagggatctgctccctatctagacagatcttttaatgcattaatatttagagtagcaaaagaagttttgccatttgtagctctctcacaggtagcttaagcgagggggttgtgttgcatgtgcttagaaaggccaggttcccagaattggaaggtgccacatatacttttagaatattttaacaaaggcttgtctctaggaaaatccacttggactgcagcaggattgttctggtcttccacagaccattcacatggtctttctctccagagaatcattcttagaaagccaggctaaatcagagtagtgctgtttttaaagcaagtatattggatgatggctatagggtaccttaatgctgtgttgaaattggaagcagactgctcttcagcagcacatatactgcaactgaagttagagacagtactgaagacgagggagtagctaaatgctgtggatatttcatgtctgtttggctaatgtcttctcttgaggagtttctatgggtagcaattaaaattagaatttattttaaggtttttattaaaatatatacaatttgccataaattctagattctgatattcttgacaagcactttttgaatatctcaagagtaagttcttgacctggaacatatatagttagtacttgatgtcactaaccaagttgtagaaggagcctgttataattctgcaagatctgtgaatagcattataaatctggggcaggtgcctgtaatcccagcactttgggaagccaaggcaggtggattgcttgagcccaggagttcgacaccaacctgagcaacatggcgaaaccccgtctgtaataaaaatacaaaaaaattagctgggcatggtggcatgtgcctgtaatcccagttactggggaggctgaggcaggagaatcacttgaacctgggagatggagattgcagtgagcagagattgtgccactgcactccagccagagtgacagagcaagactccatctcaaaaaataataataaaaataaacaaatctgtttaaattactgttgcctttcagcattagactttgagtttaataactacaaattgagactgctcacaatattaactttttttgtaggttattttgttgtttagataacttgcctccctagaggagcattcaggagataaagacctagctacatgtaatgatatgatcatttcaaaaatgtgccaagaaagcaaaattcattattgaactctaaatttctgggtgtttttttttttaaagtagcattttctctgggtaaagggaaaggcaatgaatgattgccaacatgtaaactccctgctgcccgccttcccccagtcccctccatctaacataatacagtaaatttgtagccagttgtagagtggaggaatcatggccaaatcaaatatgaattgtttagcttggtcctgttgcagttggctttctgtagtgttctgaaacaagaggacgattccattccttctcaggaacctagaaacaacaccgcttgagcaactggaatatgtttgctgcaagcagaatattttggggagaggaagagtagtttaattcaagtagtttaattgaacatattagtcattggtctgtctgggacgtgcagtgttcatagtagcaatgtatgtaccatttattttatctggttgtgtgtgatgtgtgtgtatgcctatttaatatgtacacatatattcactacatatgtatgtatgatatattcatatatacatgcagtctgcttgattatcagcaaaatggtcagcctttatcagatagtttcttcatgtggagttcatctgcatgtggcccttactctgaagcctcttcctgatctggagccacagtctgtctgtcttccagttcatctcagtcctcgagaaaggccctttaaatatgtcactttcccattttcctttaaccatgggttgtgtgagccagaaagagctttgagaaagatggctgcttccaccagggtggaggcttctaggtctgcatgatgatggggcccgtttctggccagagggtggctctgggagcagttgtgctgcgggcttgctgggggagaactctaactgttgcagaaacagagcttcatggcttgcttaaattacttagctggaatattttaaagtgtcagataatgtgatgtacaaagagagtatgccgatgcatttcattgtttttgcattatctgtatcagtgtttcccattgctagcccgaataatcaagaccagactgtttcttgtcactggattctggaagccttgccctttcaactggatttatgtttgtttctgctgctgtgaaaccccaaagtaatgcagtaggttttaattgaaaattgtttaattctattattgataattatttattgtaataaaagtaaaagagtaatttttaaatccttttaattgttttcagattgtct

SEQ ID NO: 60726 - DNA, 989 bp, Homo sapiens
gctgaggtgatctagaggatcccagttcgacggagactctccccaataacgcttgagcaactggaatatgtttgctgcaagcagaatattttggggagaggaagagtagtttaattcaagtagtttaattgaacatattagtcattggtctgtctgggacgtgcagtgttcatagtagcaatgtatgtaccatttattttatctggttgtgtgtgatgtgtgtgtatgcctatttaatatgtacacatatattcactacatatgtatgtatgatatattcatatatacatgcagtctgcttgattatcagcaaaatggtcagcctttatcagatagtttcttcatgtggagttcatctgcatgtggcccttactctgaagcctcttcctgatctggagccacagtctgtctgtcttccagttcatctcagtcctcgagaaaggccctttaaatatgtcactttcccattttcctttaaccatgggttgtgtgagccagaaagagctttgagaaagatggctgcttccaccagggtggaggcttctaggtctgcatgatgatggggcccgtttctggccagagggtggctctgggagcagttgtgctgcgggcttgctgggggagaactctaactgttgcagaaacagagcttcatggcttgcttaaattacttagctggaatattttaaagtgtcagataatgtgatgtacaaagagagtatgccgatgcatttcattgtttttgcattatctgtatcagtgtttcccattgctagcccgaataatcaagaccagactgtttcttgtcactggattctggaagccttgccctttcaactggatttatgtttgtttctgctgctgtgaaaccccaaagtaatgcagtaggttttaattgaaaattgtttaattctattattgataattatttattgtaataaaagtaaaagagtaatttttaaatccttttaattgttttcagattgtct

SEQ ID NO: 60727 - DNA, 4086 bp, Homo sapiens
  misc_feature (1019)..(1019): n is a, c, g, or t
gctctcctaccttctcgggcagcccagtctttgccatccttgcccagccggtgtggtgcttgtgtgtcacagccttgtagccgggagtcgctgccgagtgggcgctcagttttcgggtcgtcatggctggctacgaatacgtgagcccggagcagctggctggctttgataagtacaagtacagtgctgtggataccaatccactttctctgtatgtcatgcatccattctggaacactatagtaaaggtatttcctacttggctggcgcccaatctgataactttttctggctttctgctggtcgtattcaattttctgctaatggcatactttgatcctgacttttatgcctcagcaccaggtcacaagcacgtgcctgactgggtttggattgtagtgggcatcctcaacttcgtagcctacactctagatggtgtggacggaaagcaagctcgcagaaccaattctagcactcccttaggggagctttttgatcatggcctggatagttggtcatgtgtttactttgttgtgactgtttattccatctttggaagaggatcaactggtgtcagtgtttttgttctttatctcctgctatgggtagttttgttttctttcatcctgtcccactgggaaaagtataacacagggattcttttcctgccatggggatatgacattagccaggtgactatttcttttgtctacatagtgactgcagttgtgggagttgaggcctggtatgaacctttcctgtttaatttcttatatagagacctattcactgcaatgattattggttgtgcattatgtgtgactcttccaatgagtttattaaactttttcagaagctataaaaataacaccttgaaactcaattcagtctatgaagctatggttcccttattttctccatgcttgctgttcattttgtctacagcgtggatcctttggtcaccttcagatattttagagctacatcctagagtattctactttatggttggaacagcntttgccaacagtacatgtcagctgattgtttgccaaatgagtagtacccggtgtccaactttgaattggttgctggttcctctcttcttggttgtcttagtggtaaacctaggagtagcctcttacgttgagagcattctcctgtatacattaacaactgcttttactctggcccacatccattatggagtacgagtggtaaagcagctgagcagccattttcagatttaccccttctcattgaggaaaccaaactcagattgactaggaatggaagaaaagaatattggcctgtaataatctttctttgggcacaaagaagtactgtaaataaatgcttgtaaatatttcctccatcaccattgaactagactgatctgcttgacagacgtgggatctcagtatggtacttggacagcaggaatgatacatataatctgaacttgggaaattttggacctactaactctaagcctattttattttttataaaactatgtgacattttggttgagcagaatgtacgttagaccagcaaaatgttcctaatggttctaacttcgtgagtttacaatgttgtgattcatgcagggttaaagatgctttgtttttattttttaagtaccaaaattggtttcagaacactgataacactcagaaaaccacagtgtgttttcatatttggaactttgtaatagcgggagtagcagtagtccaaacctagtatagggaaaggataaaaataagtcaccttcaccaagagatgccaatgattaccaaacaacagacagttgccaaatactggtttctctttcccctgaaaatggcttttgttctcaaatgataagagagctaatacatttagctaatattctagctctctttattatggaacagatcttgatagatggtttaattttctcctaaagagaaataatcagttgagaatttgagaatgggttgtaattatcgctcacccattgggatggttcattgtttaaatatggcattttccccccttcagctgcaggttcctgagatttggtgcctgtgagctctgattgtaggaatgcatgtgacagtcccagtcctatggtaatgacttaggaggaatgcagataaaagtaccttgtaagataaatataaattggagttaggaatttcatgaacctcactatgaccaaaattaattttttgattcagtttgtctgtctgtctgtccttcccctctcttcttttttcagggtgaggtgctgtgtttcttatttcatacgagataaaacagagagaagttctctcttctccagcttgtccatttccccacttgaagaaaacttttgatatatatgccttactgagtacatgccccctttaatgttaatatgacttggagtaatttctgaggtttactgacaaacataaaaatccctttaattgtagtgtagttgttctataaaccatattttttcatgatgtggatattttcttctatttctttgtcttcatttaatttggtggtggtgaactttacttgctgattttcttttatttttcactgaatgaagtttgtgcttgaatgaagagtgtatcttaaaccccctttttttggacaggctgcacttggataaaataggcaccactgtgttgatatgtaattaaattcataactatttatgaatgtgaccattgttaaatttaattatagtgtatttctttcttgaatttcagtctgctgctttgtaaaaaataactgtaattgatatttcatttttaaaatttataaattccaatcattgtcattcaagttattagaaatgagtcacggcactaactcatggttctatactcattttaagaaattgtaaaggttgaggtgtatttggtgactttctctgagacacagatgaacgttggaaatagatgagaaatggatgcagaataatgcagatagtgatcccatgtttgttaattgccatcatggaagtcagagaattaaccaattaagtgacggtaactattttttgtataccttgttctttgtgatctataaaattaaactggataaaatgttaattgggggtagggaaaaagctttgttttaagatttctaagctaattattttaccgttttgttgaccttgtacacaagaatgagattaatctgtattatataagaaaagaactgataaatatttataaaatgacaaacttggaccacaggctttcttgaccttgtacagtatagtaaaaataccctttacttctgacattaaggtcacgtcctatagtttgggggctcttttacttcaaaggtgtgtttctgccctcttttggttgtatcaaatttatttgaaaattgttttgtgctgtactttatgacttgtttccctatggtggtaaagaatgatgccatagtcagttttattgacattgttagatgaaagaaaagtagctgtcaacaaggggaaagtgaaattgagcaattcactgtttcaggatacttgaggatctttagtgtactgctgactctttttcttgttttgtctgccattcttgaaagtgcatcttgagagcccccatttgttgtgtagagatatagcagctgaagcaggacttcattccagatagctgtgtgcatttatgtcatgccaattactataacatttccaaagtatgaaaggtctttcaggcttatgcatgatattgtgggtgacttcatgccccagcctttctccccagcatacagtgagctgccttttggggagcaatgccatgataaggagcatacgtgcatgttttccgtactttcagaatagagtgccttagctaggccagaggctcgtattgtgtttctgctgaccaaagttgcatacacctgtaagaagtgtctttttaggttatggtattaaaaaaagtcgtttcaggcttatcagataataattctcctatatttgaggggggcatgggataaaaagatttaataatacctggatagagaatgctaatgctgccttttgtgatcctttaatattatccatgcttttataaagtgcagtacacattttga

SEQ ID NO: 60728 - DNA, 1504 bp, Homo sapiens
ttaaacaatgggctaatgatcgatgccgtggtttgaatgcaggtgtgttaagctgtagcggatgtgcgatgcgtcatcgggtcgtcatgtgacgatcgtaccacatgtgtgatagtacagtaagttgtatacctcactttctctgtatgtcatgcatccattctggaacactatagtaaaggtatttcctacttggctggcgcccaatctgataactttttctggctttctgctggtcgtattcaattttctgctaatggcatactttgatcctgacttttatgcctcagcaccaggtcacaagcacgtgcctgactgggtttggattgtagtgggcatcctcaacttcgtagcctacactctagatggtgtggacggaaagcaagctcgcagaaccaattctagcactcccttaggggagctttttgatcatggcctggatagttggtcatgtgtttactttgttgtgactgtttattccatctttggaagaggatcaactggtgtcagtgtttttgttctttatctcctgctatgggtagttttgttttctttcatcctgtcccactgggaaaagtataacacagggattcttttcctgccatggggatatgacattagccaggtggtaagtatgtgttctaccttaaattttcagtattaccatgatacttttggaaagcttttgtcattgcttatttattgctcttaggcttttttgattagaattgatatgtacttaaaaattttttatttttatttatggaaaatttcaaaaatagaatagtatagtgaatagtaaagtagagagaatatttaggaaaaagtagagagaatagaccctaatgtacccattgctgaggctgaggcctcccgagtagctgagattacaggtgcccactatcacgcctggctaatttttatatttttagtagagacagggtttcactatgttggctgggctggtctctaactcctgacctcaagtgatcttcctgccttggcttcccgaagtgttaggattacaggcatgagccaccgtgctcgacccttctcaattattttaaaggaaatttctgatattatatgataaatacttcgctatatatctctaaatgataaaagcttcctttaaaaaaacaatcacaatgccagtattacaccaaaaatttaaccatttcttaatgttattgcatgttcatttgaactcttgattttggaaagaaagatatgcacatataattgaatggttggctttttgtgttcattgccaccttttcagtgtgtagagagatttcttttttcttactttaatggccttgctattaactctccctgccttgaatcccagctttttgtgttgccattttgcccatttgcacctaagtctccagtaaagaaatcagaagttggagtgtttgttgaagtggttgggtgggtaaatttggatcatcttacaacttaaccaatttatgagttgctgttaaagtgctccaaatgatgg

SEQ ID NO: 60729 - DNA, 383 bp, Homo sapiens
gcgtggctccgggcgggctggcgggcgttcctccggaggtcctgcgggtcctggggattgggggtcggggagcgtgggagcatcctaagcccgccgcccgtagtcggcaccccccgggagatttccttttccttaggagagcgctcagtgatcatggagcgagggaattcccttcctattttttttaaacttattattttcgtaagcccccgaaaggatggagttccttctgttgtgtcaatcgccttcattttagtgaagtttccactcgcctgtcatgcatacaacttcggaggaggagatgatcgtttggcagatgaggcccgggaggggagcgacttgccgatgccatcctgctgatgtctccacttctgctcccggca

SEQ ID NO: 60730 - DNA, 369 bp, Homo sapiens
ctccccaacaggcttaaagaaagaatccatcagcttcacagaaatgtcctttgagctcatgtggagcaaaggcagacgccttgttatacttcctgcccatgtggaaactctgatgggtcttgttttcccatctctcttcctatcttgtgtagttaacttgcacaccctccttagcaaactgcacaactttttaggataaataaaagtcctctttgtacttggcaaaagtcaagctgcctgccatagcctttgtatagaacacaggaaggggatgaccagtcagccgacaagcactgtacttcttgacaactgtccacgtattcaggtgtaaaatgatgatatggaaattcaaaggacgctatgtgggaa

SEQ ID NO: 60731 - DNA, 2955 bp, Homo sapiens
  misc_feature (914)..(914): n is a, c, g, or t
  misc_feature (1628)..(1628): n is a, c, g, or t
ctcttcagccagagacccctcagcccaggaggagtgaggccgggccagcagcgggggcccgggaagccccatgtcttgggacctgctggggcagggccccctggatgtcaggctgcaggtccggcagctggggaggggatgagggcctcccaccagctctgcccatcagccagatccctgggagaggcagcacttgctggccacagagtcggccccagtctcacctggctcccctcccccaccagctgggccctgcactgccccagcccacgcggcgcctcacccctccttgacagaacagtatctctgggacggacaagttaatccaagacccacagtagccctggatcccctgggagaggtggctgcccagctccagggccagcttggaggagccaacttcaaaagcctccgcctggcctgcccctctgcagtcctccaggcagcctgtccagggaagcggttggctggtgttggacctggtgcggcagtgcacaccctgcccaaggaccccaggatcatgtgcgtggcctgctggcgggagtgagggagggcaagaccctgaaaggcccatggtgagcagctgtgggcctcctctagggagggggcttacttgggtggaggggctgggggtacacacagctcaggagacactgcttgttcccctgagccccaccaggaaatctccggttggctctggtcactgcgtccctgtgggtggcactgggtgcatgtgccctggcttctggcagttgggggaggggggctcctgggtgccgggcaaccctgttctaagctgggctgaggcttgagcctggaagtggtactaacaggccagttgggactcccagggcagccagtctgccccacctgggtgggacacagcaggtgctggacatccttgcagctccagntggcctgctcaggagtcaggctctggttctcgctatgacctctgacccagagcaggcagagggaatgacgtggcaattctgagcccaccaagttggctgtggcgtgtgtggttgggggggtcaggtttcaggaaggggccacagcaagccatctgctcttccagccattgctgctttgtgctctgagcaggagctgccaccgcccaccaggcccccagctctatgcaagggttggggtgctgcttgttcaggctcccctgacagggctaggaagccgagtcgagtcctcttatcttggttgggttcgcatgattaatttccagccctagatctgctgtctgactccatcctgggggcccaggggaagggttggggctggccccttttgggtggctgggaacctgggggccgtcagctgtctccttgatgtttgggctttatccctgcgggcgcaggccctccattttgggtcgggggaggcctgtggcacaggctgcccggagggatggcgtggggcggctggtacaggcagaggggccttttgcgactgttggttggggctggatgtggtggctccttcctcctctatagcttctgggtgtccccctagctttccccttccaatagggtgtggcttggagctctgagcccctgccccagttgggttgggggtacaaggagtccccagttcccacgtctctgtgagctaacccngagggcgccagtatgggaggtgtggagttgaatgggcatggccatgagtgagacaggctgtactgggacaacttcctactgtacccccaagagcctgcagaccagccccactagagctgtacggggctggtggggggccctgctctgtgcggtcctgagggtgctccaccccttgctggccccactcccacgtggaccacagagccaggctctcctgactctgggcctgccccctctatctcctgatgggttcttcaggactcagtgacatcgcctcccagccgacatcactcacccctttcacatctttgcagggagcatagaactgtctggtttgcagacctatctcttgtgtctcctgatttatcccgccaggcctgtgcctacagcctttcttgattggtgacacgtccatttcattcgctcagagatcccgtggggtggggcagggggtggggcttctacggaaacaaagtgcaggtgggctggctgctccctgtgctgggaacaccccccaggcctaaccccaacctgctgtctcctccaggtaccccctaagcctgcactctgggcgctcctgctggcgctgctggggaccgcgccaagccgcgcctattccccggcctgcagcgtccccgacgtgctccgccactatcgcgccatcatcttcgaggatctgcaggccgccgtgaagtggggcggggcgggggccgaaaagaccaggccaggctccagacactttcatttcatacagaaaaacctgactagacccgggagctcgggacggcggggacggcctcgggcctcctgtggcgcccagaagggccgccgcgcgtcccggggctccacggccctaggctgaagtcgggctgggtcgcgtctcccttcccgggccgggccgggcgcgggggccgtgcgcattcgctgaccgccctgtccccgacagcggagccggcggcccaagatgcgccctgcccggcgtcgcggcggccgaaggcagctcctgctgcgcgccctggacgccgtcgccacctgctgggagaagctcttcgcgctgcgcgccccggcctccagggactcctagcgcggcccgtcctggccctgcgcggggaggagaaccagcggggccgcggtagagcctggagacgcgcctcgttctgtagacttgttggtgacctcggcccctcgctcgacgcagcccgcgctccccggagggcccaggacttggagaagggagcgcgcctggccgccgctgggtcacggaggaggcccgccctccacgcgccgaaggcctcaataaacggagctggcgctgcgggtccggcaa

SEQ ID NO: 60732 - DNA, 311 bp, Homo sapiens
caggtaccccctaagcctgcactctgggcgctcctgctggcgctgctggggaccgcgccaagccgcgcctattccccggcctgcagcgtccccgacgtgctccgccactatcgcgccatcatcttcgaggatctgcaggccgccgtgaagtggggcggggcgggggccgaaaagaccaggccaggctccagacactttcatttcatacagaaaaacctgactagacccgggagctcgggacggcggggacggcctcgggcctcctgtggcgcccagaaggtatggaggaggcgcccctacccaagctcgcc

SEQ ID NO: 60733 - DNA, 601 bp, Homo sapiens
catcgccggggagcccgccaggtggaccggcccgcgctccgcccccagcgagccggggacccacccaccaccccccgcaccgccgacgccgcctcgttcgtccggcccagcctgaccaatgccgcggtggaaacgggcttggagctggccccataagggctggcggcttcctccgacgccgcccctccccacagcttctcgactgcagtggggcggggggcaccaacacttggagatttttccggaggggagaggattttctaagggcacagagaatccattttctacacattaacttgagctgctggagggacactgctggcaaacggagacctatttttgtacaaagaacccttgacctggggcgtaataaagatgacctggacccctgcccccactatctggagttttccatgctggccaagatctggacacgagcagtccctgaggggcggggtccctggcgtgaggcccccgtgacagcccaccctggggtgggtttgtgggcactgctgctctgctagggagaagcctgtgtggggcacacctcttcaagggagcgtgaactttataaataaatcagttctgtttaccaaaaaaa

SEQ ID NO: 60734 - DNA, 527 bp, Homo sapiens
gattcaaacctgactccattaggtgctgctcattgccttggaggctgctgctcctgtgtgtcagatccacagagatatccgagtttagaaatgagtggaaaaatacccatggtgggcaggaagagaaatccccttgctatattcccattgtgagcagtgccaccctgtgggatagaagcacacccagtgcaaagcacatcccttgttatgaaagaacttcagtaccctgctccagattcattaatcacatgaagaatttctctgaatctcctaaatttcgtagtctacactttctgaattttccaggaagtcaccatggacaggccacacagaaattacagggagctatggttcttcaccttgaagaaaggaggatgatgaggagggctaaatcaaaaacaactatgaaaactcctatcctgttcatcaattgcacaaatagactgaataacagccatcctaacctacagtgtactatattggtcagctttcattacgttatgataataaatcacatcactcccaaa

SEQ ID NO: 60735 - DNA, 856 bp, Homo sapiens
acccagcgagagtgctccagctcccgcggaggaggctgcgggcggcgccccgggatagggaccctgcagctccaggtagacgcagggagcgcgggactcgccccctggcagggtgaggtagagccggaccgtttgctctctgctgctccccgggactccagccgcgcccgtgagaagaggcagcacggcagcaaaggccaaggagcggagggagttgaacttgtcaaattaatgtctacagtgatatgtatgaaacaaagggacgaagaattcttgctaaccatcagaccttttgcaaacaggatgcagaaatccccttgctatattcccattgtgagcagtgccaccctgtgggatagaagcacacccagtgcaaagcacatcccttgttatgaaagaacttcagtaccctgctccagattcattaatcacatgaagaatttctctgaatctcctaaatttcgtagtctacactttctgaattttccagtatttccagaaaggactcaaaattcaatggcgtgtaaaagactacttcatacttgccagtacatagtccccaggtgttctgtaagcacagtttcttttgatgaagaaagctatgaagaattccgttcctctccagcaccatccagtgaaactgatgaggccccattgatttttactgccagaggagaaactgaggagagagccagaggagcacccaagcaggcttggaacagttcatttctggaacaacttggttaaaaaggcctaactgggcacactcagtaaatcctgttcaccttggaggctcagggcatacacatcagtagacacacaagacctaagggccagcccttgagcagtcccagaa

SEQ ID NO: 60736 - DNA, 821 bp, Homo sapiens
acccagcgagagtgctccagctcccgcggaggaggctgcgggcggcgccccgggatagggaccctgcagctccagggagttgaacttgtcaaattaatgtctacagtgatatgtatgaaacaaagggacgaagaattcttgctaaccatcagaccttttgcaaacaggatgcagaaatccccttgctatattcccattgtgagcagtgccaccctgtgggatagaagcacacccagtgcaaagcacatcccttgttatgaaagaacttcagtaccctgctccagattcattaatcacatgaagaatttctctgaatctcctaaatttcgtagtctacactttctgaattttccaggaagtcaccatggacaggccacacagaaattacagggagctatggttcttcaccttgaagagtaaaatagccactatgaggagacctgctgtgagtgcatcagtctgaaactgctcacatattaacgctgactcagacccatgaagtcatcagatgtcaccactcctagaagccctttcctgcacttcctggctcctcaggtttcctgcttcatcctgcacctgccttcttgaaagaaaacaagacatcagatacttattcaaataatggaatagctgatcaactgggtctccacacaaaagagagttatccatgataaaagaacaactttttcatgcattatatgtgacacatgcatgctttctcttaagatttatgaacccatgactattagtattgttaatataatcaaaccttttacagcctcactccaaagcttaaacttattatcaattgccttctagag

SEQ ID NO: 60737 - DNA, 951 bp, Homo sapiens
acccagcgagagtgctccagctcccgcggaggaggctgcgggcggcgccccgggatagggaccctgcagctccaggtagacgcagggagcgcgggactcgccccctggcagggtgaggtagagccggaccgtttgctctctgctgctccccgggactccagccgcgcccgtgagaagaggcagcacggcagcaaaggccaaggagcggagggagttgaacttgtcaaattaatgtctacagtgatatgtatgaaacaaagggacgaagaattcttgctaaccatcagaccttttgcaaacaggatgcagaaatccccttgctatattcccattgtgagcagtgccaccctgtgggatagaagcacacccagtgcaaagcacatcccttgttatgaaagaacttcagtaccctgctccagattcattaatcacatgaagaatttctctgaatctcctaaatttcgtagtctacactttctgaattttccaggaccatttcactgacctgaaaggatatatttaaatgtgcctgtccaatttactacctaagagataatgaagtttttaggacaactgataaagcagtatttccagaaaggactcaaaattcaatggcgtgtaaaagactacttcatacttgccagtacatagtccccaggtgttctgtaagcacagtttcttttgatgaagaaagctatgaagaattccgttcctctccagcaccatccagtgaaactgatgaggccccattgatttttactgccagaggagaaactgaggagagagccagaggagcacccaagcaggcttggaacagttcatttctggaacaacttggttaaaaaggcctaactgggcacactcagtaaatcctgttcaccttggaggctcagggcatacacatcagtagacacacaagacctaagggccagcccttgagcagtcccagaa

SEQ ID NO: 60738 - DNA, 447 bp, Homo sapiens
acccagcgagagtgctccagctcccgcggaggaggctgcgggcggcgccccgggatagggaccctgcagctccaggtagacgcagggagcgcgggactcgccccctggcagggtgaggtagagccggaccgtttgctctctgctgctccccgggactccagccgcgcccgtgagaagaggcagcacggcagcaaaggccaaggagcggagggagttgaacttgtcaaattaatgtctacagtgatatgtatgaaacaaagggacgaagaattcttgctaaccatcagaccttttgcaaacaggatgcagaaatccccttgctatattcccattgtgagcagtgccaccctgtgggatagaagcacacccagtgcaaagatcaagctattgaagcttagggaggtgaagtaattttcctgggatcacatagccagtaaatggtagagg

SEQ ID NO: 60739 - DNA, 653 bp, Homo sapiens
acccagcgagagtgctccagctcccgcggaggaggctgcgggcggcgccccgggatagggaccctgcagctccaggtagacgcagggagcgcgggactcgccccctggcagggtgaggtagagccggaccgtttgctctctgctgctccccgggactccagccgcgcccgtgagaagaggcagcacggcagcaaaggccaaggagcggagggagttgaacttgtcaaattaatgtctacagtgatatgtatgaaacaaagggacgaagaattcttgctaaccatcagaccttttgcaaacaggatgcagaaatccccttgctatattcccattgtgagcagtgccaccctgtgggatagaagcacacccagtgcaaagcctctagtattcatcatcctggaatgcaaacaaatttgactcaacaatttccaccaaggtcctgagccccacttgcctcaaaaccagtagacctggtctggatgcactctcccaagaaacttgccaactaatgaccaaggatctaaaataatggtgtccaaattttaattgcaaatgtctagcaatgataaaaaatttagtgcccatatctcatatacttatagacagatatgtactactccattcattaaaatgttagaaactagattataatg

SEQ ID NO: 60740 - DNA, 277 bp, Homo sapiens
gtgatccaccgacctcggcctcccaaagtgctgggattacaggcatgagctatcacgcccagctgcaatattttaaatatattttagtataaagtgaagggcctctgacgtccatctagtaagaatcgggccacatattcatagactgacagtttcaatctttgcagactttgtcctttgaagtttgctttgctttctcttttcacactttggtagcatctttcagttctctgctgctccagagaggaacattatggcctcttgattggatggataa

SEQ ID NO: 60741 - DNA, 255 bp, Homo sapiens
gatgagagtatagattttgaagtcatctggacctgggttcaaatcttgtcccatttacttatagtgtgatcttgggaaactgggaatgtaacactcttggcttcagtttcctccttgaagggttaatgggaggattagatataaaaataaaagatgtgtaaaatacctaccccatgacttggcacgtggtaagtcttgaaccccaagatgtgtatgtgtagacctcagtccttcagttttagctggacttctgag

SEQ ID NO: 60742 - DNA, 626 bp, Homo sapiens
gcagtggtgtgatcatagctcactgcagccttgacctcgtgggctcaagcgattctccccctctcagcctcccgagtacctgggaccacagacccgtgccaccatgcctggctaattaaaaaaaatttttttttgtagagatgggatctcgctatgttgcccaggctggtcttgaacttcccagttcaagcaatcctcctgccttggcctcttaaagtgttgggattacaggtgtgagccaccttgcctggcccagatgattttgtaatgaggaggcagcttggggtctagaaagccagggccttagcaaggcagggatgggatctgttttgatgcctgctgtatccccagtgcctctgtggtctcttctgcaaagcaggcaacctggccagtaccaggtgggaatgacgaataggcacaggtcgctggctcaggacactggggtttggttacaagcttctgccccaggacagctggtgctccataaatgctcgttgagccactgaatgggtgttaacacctgaatcccagaagctgtagcaggctgtgtgtgtttgtgacgatggcagggtgccctggcatttggagggcgatgcccctaggccccaggcagtccctaggaaggc

SEQ ID NO: 60743 - DNA, 435 bp, Homo sapiens
aaagtatatatataaaagaagacctgggaataatagttataataatataacagagtcagtatatttaatataaaaaatcttactaaaatcaataagaaaagcactaagaccccaatttataaatggggcaaggggctgaatcactactaaacatataaaagcaggttaaccttatttatagccaaagaattataaaataaaatgacaaactttttttactctggcaactattgttataaattgtcataatgcttatgatggtatagtgaagtagcaacctcatacactgttgacagaaatataaattggttgagctttcctaggaagcagtttgtatatatactgaagaatctttcaaatacttaaagttatgctcttcaacagagtaattatagtcctggaaatttaatcagtaagatgggtaaatacttatat

SEQ ID NO: 60744 - DNA, 309 bp, Homo sapiens
ggcgatagtgtgagtccatctcaaattgaaaaaaaaaaaaagagagagagcgagaacaagaaaaatgcacatctgtcagggctcttcctattacatacagttaataccttattgaattttgtactgttattttagtatggctattagagcagtgatctgcagtgtttggcatgcctcaaatgtcagaaaaatccagagacacacctgtgagcatcaagataattttacttccattatttcaatctacagctaatgcttagtaatcacagtatttaaaaatcccctacaataagtctgcacaagtctgtg

SEQ ID NO: 60745 - DNA, 331 bp, Homo sapiens
gctcttgaacgggcagtgagcttgcatgatgctctgattattaagaagctgtaatgttttttccaacccagccatccttcgttattctaattactccttacatatacttttgtatatctctgcttctctcttctcaccctcccaccacattaattctgagcactatatcttaatactctaggtatgattaccccaaagaatcaagttaacttaccacctcccacattctaggcactatacattcattcatataaccatgttttgctgggattatctgggggatgcagaaggggctttataattagcaatgccccttactttgacttgccca

SEQ ID NO: 60746 - DNA, 321 bp, Homo sapiens
gcctcagaaggtccttcccaggcttctcgcaaagcgaaggcactgcctcttcacaccttgtgaaacctttccaggacctcccagtcagaggccgtctggttctcactgtctgcagagcgccctacagcctgtctgtgggtgagcgtgtctgtgaactcttgtccatctcttctgtgatctgtgtgctcctcgaaataactgattttgtctcatacaccttggaatcctgagtccacagaacagaggctcatacaaaggaagctttcaaagagtgctcatcgatttctaggtttcttgaagacaggcaccatgttttgttct

SEQ ID NO: 60747 - DNA, 227 bp, Homo sapiens
tatttttctaaaaaagaaagagtgaatggataaaatggagttttctaattcaggtgtttacttttgagagatagaaattaaatccgtagttcttgcaactttttttttttaaacccaaatcctttctacaattagtaattaaagtgaaatgagaaaagaaagagtagctttgaatctcactcagttgcttaatgctaaaataatctattaaaatttttttttctatg

SEQ ID NO: 60748 - DNA, 470 bp, Homo sapiens
gtgaggctctgtgaggccctgtgatgctccaagaccaggccccgcccactccggcctccaaccagccatggtctccaaaaaggatgggaaaaagaggttggggaaaagagagggccttgactttggctgcctgaagaactgtttttcttaaagtaggctttatatcagtctttttcctcggccacaggagggaagagggtggtgggagtgagtttagtctgactggggctgaagacatcctgttgtttaggactgcagttctccaacgttccagccccggtgcccatttgcttttgttcatgtggattatatctatcatacgtactgcattagagattaaaacagaattaaaaagacatattaattgggcaatttagtaagaataaacccatgacacaatagcaaatcttatttttatgtaaattttattaagacaaaatgtagtgagaagagtggcatcgttttacagt

SEQ ID NO: 60749 - DNA, 2784 bp, Homo sapiens
tctggcaaccatttctgtcagctttctcattcctagattgatgcagattgcttaattccttgagcttaaccagctcgaaaaagcagtggaagcagctcacacatttttcgtggctaaccctgagcacatggaaatgcagcagaacattgagaattacagggcgacagctggtgttgaagcattgcagttggtagacagagaagccaagccacacatggagagttacaatgcaggagttaaacattatgaggctgatgactttgagatggctatcaggcatttcgaacaagccttaagagaatatttcgttgaagatacagaatgccggaccctatgtgaggggcctcagagatttgaagaatatgagtatttagggtataaggctggtctgtatgaagctattgcagatcactacatgcaggtgcttgtttgtcagcatgaatgtgtgagggaacttgccacccgccctggccgcctctctcccatcgagaattttcttcctctgcactatgattacctacagtttgcctactatcgagttggtgagtatgtgaaagccctggagtgtgccaaagcctatcttctatgccatccagatgatgaggatgtcctagacaatgtggattactatgagagtctgctggatgatagcattgacccggcatccattgaggccagagaggatttaacaatgttcgtgaaacgtcataagctggagtctgagctgataaaatcagctgcagaaggtctggggttttcatacactgaaccgaattattggatcagatatggaggacgacaggatgagaatcgggtcccttcaggagtgaacgtagagggagcagaagttcatggattctcaatgggaaaaaagctatcacccaagatagatcgagacctaagagaaggtggtcctctactctatgagaacatcacattcgtctacaactcggagcagctgaacgggactcagcgggttctcctggataacgtcctgtcggaagaacagtgccgggagctccacagcgtggccagtggaatcatgcttgttggtgatggatacagaggaaaaacttcaccccatacacccaatgaaaagtttgaaggtgcaactgtcctgaaagcactcaaatctggttatgaaggtcgagtcccactgaagagcgctcgtctgttttatgacatcagcgaaaaggctcgaaggattgtagaatcttattttatgctgaactcaactctgtatttttcctatacacacatggtctgccgaacagccctgtctggtcagcaggatagaagaaatgacctcagtcatcccatccatgctgacaactgtttgttggatccagaggccaacgaatgctggaaggagcctcctgcttacacatttcgagactatagtgctctcctatatatgaatgatgactttgaaggaggagaattcatattcacagagatggatgctaagactgtgactgcctctataaaaccaaaatgtgggcgcatgatcagcttctcatctggaggagagaaccctcatggggtgaaggcagtcaccaagggaaagaggtgtgctgtggctctgtggttcaccttggacccactttatagagaattggagcgaatacaggctgatgaagtgattgcaattctggatcaagaacagcaagggaagcatgaactgaatatcaaccctaaagatgagctataaaaatgagaaagaatgttctatcaaatatttatttaaattgttaatcttatgagaacctttttatttttgtacagagccatggtataaattaacaggttaatgtcagtcatcagatcttccttctcttcctaaggatgcttgtgttgcctcaatctatcaatctatctttcttgttttgggttgttttctctctctctctctctctctctcttcttagagacatggtctaaccatgttgtctaggatatagggcagtggctattcacagatgtgatgatagcacactggagcctcaaactcttaggctcaggcgatccttcaagcctcccggggagctgggaccacaggcacgtgccaccacacccagctctctttcttggtttttcatcatttcatgtatctatcaaagcccagttcacctcctcccccaaacacacacacacacacacacacacacacacacaattaagttgctgcaaattcaaaagcttagagagaataagcttcttggtggtgaaactacaactctcacgtgtgctccagttctaaaattaacctgtgcctggtctctgaagccctttcttgctctgtgcctttcagccacatccttaggtgctaacggccatgagctccgactctccaaagtgagctccactttgggtctgaggagcccctggcagagtccacgctgcctcaggtatcatgggcgtaatgatcacccaggctccgggagatctcatggatgattactgtatgagacagaggggacttcagtctttccagggccttggtggaatttttggctctggtgttttcgccagacaataaacttacactggaagctttgattcaccctccacagtactccagaaaggactgtcctataagttgtacactttaaaaggtcatgtagaggttgtagtagaatggcttttcaccctggtgactttggaagaaactcttgaatactgcctgcatccgggcaccatggccaggttgcctaggagtggggtccactgatgaaaagaggtgttttgtacttacataagaaaaataaatttctgattgatttt

SEQ ID NO: 60750 - DNA, 3532 bp, Homo sapiens
cctcaagcggcgctagctctctggctggcgctggagtgtgccgcccctggcagccccgccgctgcagcggggagcctgggagagcggctctcggagtctcaggcagcaggaggagcgtgtgagctgtgggcgtccctttaagagcggctggccaggcacggcctccgcctctcagtacgcggagcgccggcggtcacctggggctcgcggagcggccagatcgcggcggagtcggcgcgcttccccgagggaaggtgggagaggggacccggacgcgaggtgccccgaagccctctcgagcgtaaccgtcccgcgcctctctgaggcggaggatgcgggagcgcatctgggcgccgccgctgctgctgctgctgccgctgctactgccgccgccactgtggggcggccccccggacagcccacgccgggagctggagctggagcccgggcctctgcagcccttcgacctgctctacgccagcggcgcggccgcctactacagcggagactacgagcgagcggtgcgcgacttggaagcggcgctgcgcagccaccggcgcctgcgggaaatccgcacgcgctgtgcccgccactgcgcggcgcgccacccgctcccgcccccgccccccggcgagggccccggcgctgagctgccccttttccgctccttgttggggcgggcgcgctgttatcgcagctgtgagacccagcgcctcgggggccccgcatcccgccaccgcgtcagcgaggatgtgcgcagcgacttccagcgcagagtgccctacaactacctgcagcgggcctacatcaagcttaaccagctcgaaaaagcagtggaagcagctcacacatttttcgtggctaaccctgagcacatggaaatgcagcagaacattgagaattacagggcgacagctggtgttgaagcattgcagttggtagacagagaagccaagccacacatggagagttacaatgcaggagttaaacattatgaggctgatgactttgagatggctatcaggcatttcgaacaagccttaagagaatatttcgttgaagatacagaatgccggaccctatgtgaggggcctcagagatttgaagaatatgagtatttagggtataaggctggtctgtatgaagctattgcagatcactacatgcaggtgcttgtttgtcagcatgaatgtgtgagggaacttgccacccgccctggccgcctctctcccatcgagaattttcttcctctgcactatgattacctacagtttgcctactatcgagttggtgagtatgtgaaagccctggagtgtgccaaagcctatcttctatgccatccagatgatgaggatgtcctagacaatgtggattactatgagagtctgctggatgatagcattgacccggcatccattgaggccagagaggatttaacaatgttcgtgaaacgtcataagctggagtctgagctgataaaatcagctgcagaaggtctggggttttcatacactgaaccgaattattggatcagatatggaggacgacaggatgagaatcgggtcccttcaggagtgaacgtagagggagcagaagttcatggattctcaatgggaaaaaagctatcacccaagatagatcgagacctaagagaaggtggtcctctactctatgagaacatcacattcgtctacaactcggagcagctgaacgggactcagcgggttctcctggataacgtcctgtcggaagaacagtgccgggagctccacagcgtggccagtggaatcatgcttgttggtgatggatacagaggaaaaacttcaccccatacacccaatgaaaagtttgaaggtgcaactgtcctgaaagcactcaaatctggttatgaaggtcgagtcccactgaagagcgctcgtctgttttatgacatcagcgaaaaggctcgaaggattgtagaatcttattttatgctgaactcaactctgtatttttcctatacacacatggtctgccgaacagccctgtctggtcagcaggatagaagaaatgacctcagtcatcccatccatgctgacaactgtttgttggatccagaggccaacgaatgctggaaggagcctcctgcttacacatttcgagactatagtgctctcctatatatgaatgatgactttgaaggaggagaattcatattcacagagatggatgctaagactgtgactgcctctataaaaccaaaatgtgggcgcatgatcagcttctcatctggaggagagaaccctcatggggtgaaggcagtcaccaagggaaagaggtgtgctgtggctctgtggttcaccttggacccactttatagagaattggagcgaatacaggctgatgaagtgattgcaattctggatcaagaacagcaagggaagcatgaactgaatatcaaccctaaagatgagctataaaaatgagaaagaatgttctatcaaatatttatttaaattgttaatcttatgagaacctttttatttttgtacagagccatggtataaattaacaggttaatgtcagtcatcagatcttccttctcttcctaaggatgcttgtgttgcctcaatctatcaatctatctttcttgttttgggttgttttctctctctctctctctctctctcttcttagagacatggtctaaccatgttgtctaggatatagggcagtggctattcacagatgtgatgatagcacactggagcctcaaactcttaggctcaggcgatccttcaagcctcccggggagctgggaccacaggcacgtgccaccacacccagctctctttcttggtttttcatcatttcatgtatctatcaaagcccagttcacctcctcccccaaacacacacacacacacacacacacacacacacaattaagttgctgcaaattcaaaagcttagagagaataagcttcttggtggtgaaactacaactctcacgtgtgctccagttctaaaattaacctgtgcctggtctctgaagccctttcttgctctgtgcctttcagccacatccttaggtgctaacggccatgagctccgactctccaaagtgagctccactttgggtctgaggagcccctggcagagtccacgctgcctcaggtatcatgggcgtaatgatcacccaggctccgggagatctcatggatgattactgtatgagacagaggggacttcagtctttccagggccttggtggaatttttggctctggtgttttcgccagacaataaacttacactggaagctttgattcaccctccacagtactccagaaaggactgtcctataagttgtacactttaaaaggtcatgtagaggttgtagtagaatggcttttcaccctggtgactttggaagaaactcttgaatactgcctgcatccgggcaccatggccaggttgcctaggagtggggtccactgatgaaaagaggtgttttgtacttacataagaaaaataaatttctgattgatttt

SEQ ID NO: 60751 - DNA, 2968 bp, Homo sapiens
ctaggggcgagctgctaactcaggggcgagctgctaactcaggggcgagctgctaactcaggggcgagctgcaactcaggggcgagctgccccttttccgctccttgttggggcgggcgcgctgttatcgcagctgtgagacccagcgcctcgggggccccgcatcccgccaccgcgtcagcgaggatgtgcgcagcgacttccagcgcagagtgccctacaactacctgcagcgggcctacatcaagcttaaccagctcgaaaaagcagtggaagcagctcacacatttttcgtggctaaccctgagcacatggaaatgcagcagaacattgagaattacagggcgacagctggtgttgaagcattgcagttggtagacagagaagccaagccacacatggagagttacaatgcaggagttaaacattatgaggctgatgactttgagatggctatcaggcatttcgaacaagccttaagagaatatttcgttgaagatacagaatgccggaccctatgtgaggggcctcagagatttgaagaatatgagtatttagggtataaggctggtctgtatgaagctattgcagatcactacatgcaggtgcttgtttgtcagcatgaatgtgtgagggaacttgccacccgccctggccgcctctctcccatcgagaattttcttcctctgcactatgattacctacagtttgcctactatcgagttggtgagtatgtgaaagccctggagtgtgccaaagcctatcttctatgccatccagatgatgaggatgtcctagacaatgtggattactatgagagtctgctggatgatagcattgacccggcatccattgaggccagagaggatttaacaatgttcgtgaaacgtcataagctggagtctgagctgataaaatcagctgcagaaggtctggggttttcatacactgaaccgaattattggatcagatatggaggacgacaggatgagaatcgggtcccttcaggagtgaacgtagagggagcagaagttcatggattctcaatgggaaaaaagctatcacccaagatagatcgagacctaagagaaggtggtcctctactctatgagaacatcacattcgtctacaactcggagcagctgaacgggactcagcgggttctcctggataacgtcctgtcggaagaacagtgccgggagctccacagcgtggccagtggaatcatgcttgttggtgatggatacagaggaaaaacttcaccccatacacccaatgaaaagtttgaaggtgcaactgtcctgaaagcactcaaatctggttatgaaggtcgagtcccactgaagagcgctcgtctgttttatgacatcagcgaaaaggctcgaaggattgtagaatcttattttatgctgaactcaactctgtatttttcctatacacacatggtctgccgaacagccctgtctggtcagcaggatagaagaaatgacctcagtcatcccatccatgctgacaactgtttgttggatccagaggccaacgaatgctggaaggagcctcctgcttacacatttcgagactatagtgctctcctatatatgaatgatgactttgaaggaggagaattcatattcacagagatggatgctaagactgtgactgcctctataaaaccaaaatgtgggcgcatgatcagcttctcatctggaggagagaaccctcatggggtgaaggcagtcaccaagggaaagaggtgtgctgtggctctgtggttcaccttggacccactttatagagaattggagcgaatacaggctgatgaagtgattgcaattctggatcaagaacagcaagggaagcatgaactgaatatcaaccctaaagatgagctataaaaatgagaaagaatgttctatcaaatatttatttaaattgttaatcttatgagaacctttttatttttgtacagagccatggtataaattaacaggttaatgtcagtcatcagatcttccttctcttcctaaggatgcttgtgttgcctcaatctatcaatctatctttcttgttttgggttgttttctctctctctctctctctctctcttcttagagacatggtctaaccatgttgtctaggatatagggcagtggctattcacagatgtgatgatagcacactggagcctcaaactcttaggctcaggcgatccttcaagcctcccggggagctgggaccacaggcacgtgccaccacacccagctctctttcttggtttttcatcatttcatgtatctatcaaagcccagttcacctcctcccccaaacacacacacacacacacacacacacacacacaattaagttgctgcaaattcaaaagcttagagagaataagcttcttggtggtgaaactacaactctcacgtgtgctccagttctaaaattaacctgtgcctggtctctgaagccctttcttgctctgtgcctttcagccacatccttaggtgctaacggccatgagctccgactctccaaagtgagctccactttgggtctgaggagcccctggcagagtccacgctgcctcaggtatcatgggcgtaatgatcacccaggctccgggagatctcatggatgattactgtatgagacagaggggacttcagtctttccagggccttggtggaatttttggctctggtgttttcgccagacaataaacttacactggaagctttgattcaccctccacagtactccagaaaggactgtcctataagttgtacactttaaaaggtcatgtagaggttgtagtagaatggcttttcaccctggtgactttggaagaaactcttgaatactgcctgcatccgggcaccatggccaggttgcctaggagtggggtccactgatgaaaagaggtgttttgtacttacataagaaaaataaatttctgattgatttt

SEQ ID NO: 60752 - DNA, 3652 bp, Homo sapiens
cctcaagcggcgctagctctctggctggcgctggagtgtgccgcccctggcagccccgccgctgcagcggggagcctgggagagcggctctcggagtctcaggcagcaggaggagcgtgtgagctgtgggcgtccctttaagagcggctggccaggcacggcctccgcctctcagtacgcggagcgccggcggtcacctggggctcgcggagcggccagatcgcggcggagtcggcgcgcttccccgagggaaggtgggagaggggacccggacgcgaggtgccccgaagccctctcgagcgtaaccgtcccgcgcctctctgaggcggaggatgcgggagcgcatctgggcgccgccgctgctgctgctgctgccgctgctactgccgccgccactgtggggcggccccccggacagcccacgccgggagctggagctggagcccgggcctctgcagcccttcgacctgctctacgccagcggcgcggccgcctactacagcggagactacgagcgagcggtgcgcgacttggaagcggcgctgcgcagccaccggcgcctgcgggaaatccgcacgcgctgtgcccgccactgcgcggcgcgccacccgctcccgcccccgccccccggcgagggccccggcgctgagctgccccttttccgctccttgttggggcgggcgcgctgttatcgcagctgtgagacccagcgcctcgggggccccgcatcccgccaccgcgtcagcgaggatgtgcgcagcgacttccagcgcagagtgccctacaactacctgcagcgggcctacatcaagcttaaccagctcgaaaaagcagtggaagcagctcacacatttttcgtggctaaccctgagcacatggaaatgcagcagaacattgagaattacagggcgacagctggtgttgaagcattgcagttggtagacagagaagccaagccacacatggagagttacaatgcaggagttaaacattatgaggctgatgactttgagatggctatcaggcatttcgaacaagccttaagagaatatttcgttgaagatacagaatgccggaccctatgtgaggggcctcagagatttgaagaatatgagtatttagggtataaggctggtctgtatgaagctattgcagatcactacatgcaggtgcttgtttgtcagcatgaatgtgtgagggaacttgccacccgccctggccgcctctctcccatcgagaattttcttcctctgcactatgattacctacagtttgcctactatcgagttggtgagtatgtgaaagccctggagtgtgccaaagcctatcttctatgccatccagatgatgaggatgtcctagacaatgtggattactatgagagtctgctggatgatagcattgacccggcatccattgaggccagagaggatttaacaatgttcgtgaaacgtcataagctggagtctgagctgataaaatcagctgcagaaggtctggggttttcatacactgaaccgaattattggatcagatatggaggacgacaggatgagaatcgggtcccttcaggagtgaacgtagagggagcagaagttcatggattctcaatgggaaaaaagctatcacccaagatagatcgagacctaagagaaggtggtcctctactctatgagaacatcacattcgtctacaactcggagcagctgaacgggactcagcgggttctcctggataacgtcctgtcggaagaacagtgccgggagctccacagcgtggccagtggaatcatgcttgttggtgatggatacagaggaaaaacttcaccccatacacccaatgaaaagtttgaaggtgcaactgtcctgaaagcactcaaatctggttatgaaggtcgagtcccactgaagagcgctcgtctgttttatgacatcagcgaaaaggctcgaaggattgtagaatcttattttatgctgaactcaactctgtatttttcctatacacacatggtctgccgaacagccctgtctggtcagcaggatagaagaaatgacctcagtcatcccatccatgctgacaactgtttgttggatccagaggccaacgaatgctggaaggagcctcctgcttacacatttcgagactatagtgctctcctatatatgaatgatgactttgaaggaggagaattcatattcacagagatggatgctaagactgtgactgcctctataaaaccaaaatgtgggcgcatgatcagcttctcatctggaggagagaaccctcatggggtgaaggcagtcaccaagggaaagaggtgtgctgtggctctgtggttcaccttggacccactttatagagaattggagcgaatacaggctgatgaagtgattgcaattctggatcaagaacagcaagggaagcatgaactgaatatcaaccctaaagatgagctataaaaatgagaaagaatgttctatcaaatatttatttaaattgttaatcttatgagaacctttttatttttgtacagagccatggtataaattaacaggttaatgtcagtcatcagatcttccttctcttcctaaggatgcttgtgttgcctcaatctatcaatctatctttcttgttttgggttgttttctctctctctctctctctctctcttcttagagacatggtctaaccatgttgtctaggatatagggcagtggctattcacagatgtgatgatagcacactggagcctcaaactcttaggctcaggcgatccttcaagcctcccggggagctgggaccacaggcacgtgccaccacacccagctctctttcttggtttttcatcatttcatgtatctatcaaagcccagttcacctcctcccccaaacacacacacacacacacacacacacacacacaattaagttgctgcaaattcaaaagcttagagagaataagcttcttggtggtgaaactacaactctcacgtgtgctccagttctaaaattaacctgtgcctggtctctgaagccctttcttgctctgtgcctttcagccacatccttaggtgctaacggccatgagctccgactctccaaagtgagctccactttgggtctgaggagcccctggcagagtccacgctgcctcaggtatcatgggcgtaatgatcacccaggctccgggagatctcatggatgattactgtatgagacagaggggacttcagtctttccagggccttggtggaatttttggctctggtgttttcgccagacaataaacttacactggaagctttgattcaccctccacagtactccagaaaggactgtcctataagttgtacactttaaaaggtcatgtagaggttgtagtagaatggcttttcaccctggtgactttggaagaaactcttgaatactgcctgcatccgggcaccatggccaggttgcctaggagtggggtccactgatgaaaagaggtgttttgtacttacataagaaaaataaatttctgattgattttaaccgtcatctgcttatattttgggggcccctcctcattgctgctatccagcacacagatttgtgcttgtgttaaccgttataaggagctttactcgcttcgggttttgttctctgttcg

SEQ ID NO: 60753 - DNA, 3393 bp, Homo sapiens
cctcaagcggcgctagctctctggctggcgctggagtgtgccgcccctggcagccccgccgctgcagcggggagcctgggagagcggctctcggagtctcaggcagcaggaggagcgtgtgagctgtgggcgtccctttaagagcggctggccaggcacggcctccgcctctcagtacgcggagcgccggcggtcacctggggctcgcggagcggccagatcgcggcggagtcggcgcgcttccccgagggaaggtgggagaggggacccggacgcgaggtgccccgaagccctctcgagcgtaaccgtcccgcgcctctctgaggcggaggatgcgggagcgcatctgggcgccgccgctgctgctgctgctgccgctgctactgccgccgccactgtggggcggccccccggacagcccacgccgggagctggagctggagcccgggcctctgcagcccttcgacctgctctacgccagcggcgcggccgcctactacagcggagactacgagcgagcggtgcgcgacttggaagcggcgctgcgcagccaccggcgcctgcgggaaatccgcacgcgctgtgcccgccactgcgcggcgcgccacccgctcccgcccccgccccccggcgagggccccggcgctgagctgccccttttccgctccttgttggggcgggcgcgctgttatcgcagctgtgagacccagcgcctcgggggccccgcatcccgccaccgcgtcagcgaggatgtgcgcagcgacttccagcgcagagtgccctacaactacctgcagcgggcctacatcaagcttaaccagctcgaaaaagcagtggaagcagctcacacatttttcgtggctaaccctgagcacatggaaatgcagcagaacattgagaattacagggcgacagctggtgttgaagcattgcagttggtagacagagaagccaagccacacatggagagttacaatgcaggagttaaacattatgaggctgatgactttgagatggctatcaggcatttcgaacaagccttaagagaatatttcgttgaagatacagaatgccggaccctatgtgaggggcctcagagatttgaagaatatgagtatttagggtataaggctggtctgtatgaagctattgcagatcactacatgcaggtgcttgtttgtcagcatgaatgtgtgagggaacttgccacccgccctggccgcctctctcccatcgagaattttcttcctctgcactatgattacctacagtttgcctactatcgagttggtgagtatgtgaaagccctggagtgtgccaaagcctatcttctatgccatccagatgatgaggatgtcctagacaatgtggattactatgagagtctgctggatgatagcattgacccggcatccattgaggccagagaggatttaacaatgttcgtgaaacgtcataagctggagtctgagctgataaaatcagctgcagaaggtctggggttttcatacactgaaccgaattattggatcagatatggaggacgacaggatgagaatcgggtcccttcaggagtgaacgtagagggagcagaagttcatggattctcaatgggaaaaaagctatcacccaagatagatcgagacctaagagaaggtggtcctctactctatgagaacatcacattcgtctacaactcggagcagctgaacgggactcagcgggttctcctggataacgtcctgtcggaagaacagtgccgggagctccacagcgtggccagtggaatcatgcttgttggtgatggatacagaggaaaaacttcaccccatacacccaatgaaaagtttgaaggtgcaactgtcctgaaagcactcaaatctggttatgaaggtcgagtcccactgaagagcgctcgtctgttttatgacatcagcgaaaaggctcgaaggattgtagaatcttattttatgctgaactcaactctgtatttttcctatacacacatggtctgccgaacagccctgtctggtcagcaggatagaagaaatgacctcagtcatcccatccatgctgacaactgtttgttggatccagaggccaacgaatgctggaaggagcctcctgcttacacatttcgagactatagtgctctcctatatatgaatgatgactttgaaggaggagaattcatattcacagagatggatgctaagactgtgactgcctctataaaaccaaaatgtgggcgcatgatcagcttctcatctggaggagagaaccctcatggggtgaaggcagtcaccaagggaaagaggtgtgctgtggctctgtggttcaccttggacccactttatagagaattggagcgaatacaggctgatgaagtgattgcaattctggatcaagaacagcaagggaagcatgaactgaatatcaaccctaaagatgagctataaaaatgagaaagaatgttctatcaaatatttatttaaattgttaatcttatgagaacctttttatttttgtacagagccatggtataaattaacaggttaatgtcagtcatcagatcttccttctcttcctaaggatgcttgtgttgcctcaatctatcaatctatctttcttgttttgggttgttttctctctctctctctctctctctcttcttagagacatggtctaaccatgttgtctaggatatagggcagtggctattcacagatgtgatgatagcacactggagcctcaaactcttaggctcaggcgatccttcaagcctcccggggagctgggaccacaggcacgtgccaccacacccagctctctttcttggtttttcatcatttcatgtatctatcaaagcccagttcacctcctcccccaaacacacacacacacacacacacacacacacacaattaagttgctgcaaattcaaaagcttagagagaataagcttcttggtggtgaaactacaactctcacgtgtgctccagttctaaaattaacctgtgcctggtctctgaagccctttcttgctctgtgcctttcagccacatccttaggtgctaacggccatgagctccgactctccaaagtgagctccactttgggtctgaggagcccctggcagagtccacgctgcctcaggtatcatgggcgtaatgatcacccaggctccgggagatctcatggatgattactgtatgagacagaggggacttcagtctttccagggccttggtggaatttttggctctggtgttttcgccagacaataaacttacactggaagctttgattcaccctccacagtactccagaaaggactgtcctataagttgtacactttagatactcttgatacttgctgcattccgggcacct

SEQ ID NO: 60754 - DNA, 3598 bp, Homo sapiens
cctcaagcggcgctagctctctggctggcgctggagtgtgccgcccctggcagccccgccgctgcagcggggagcctgggagagcggctctcggagtctcaggcagcaggaggagcgtgtgagctgtgggcgtccctttaagagcggctggccaggcacggcctccgcctctcagtacgcggagcgccggcggtcacctggggctcgcggagcggccagatcgcggcggagtcggcgcgcttccccgagggaaggtgggagaggggacccggacgcgaggtgccccgaagccctctcgagcgtaaccgtcccgcgcctctctgaggcggaggatgcgggagcgcatctgggcgccgccgctgctgctgctgctgccgctgctactgccgccgccactgtggggcggccccccggacagcccacgccgggagctggagctggagcccgggcctctgcagcccttcgacctgctctacgccagcggcgcggccgcctactacagcggagactacgagcgagcggtgcgcgacttggaagcggcgctgcgcagccaccggcgcctgcgggaaatccgcacgcgctgtgcccgccactgcgcggcgcgccacccgctcccgcccccgccccccggcgagggccccggcgctgagctgccccttttccgctccttgttggggcgggcgcgctgttatcgcagctgtgagacccagcgcctcgggggccccgcatcccgccaccgcgtcagcgaggatgtgcgcagcgacttccagcgcagagtgccctacaactacctgcagcgggcctacatcaagcttaaccagctcgaaaaagcagtggaagcagctcacacatttttcgtggctaaccctgagcacatggaaatgcagcagaacattgagaattacagggcgacagctggtgttgaagcattgcagttggtagacagagaagccaagccacacatggagagttacaatgcaggagttaaacattatgaggctgatgactttgagatggctatcaggcatttcgaacaagccttaagagaatatttcgttgaagatacagaatgccggaccctatgtgaggggcctcagagatttgaagaatatgagtatttagggtataaggctggtctgtatgaagctattgcagatcactacatgcaggtgcttgtttgtcagcatgaatgtgtgagggaacttgccacccgccctggccgcctctctcccatcgagaattttcttcctctgcactatgattacctacagtttgcctactatcgagttggtgagtatgtgaaagccctggagtgtgccaaagcctatcttctatgccatccagatgatgaggatgtcctagacaatgtggattactatgagagtctgctggatgatagcattgacccggcatccattgaggccagagaggatttaacaatgttcgtgaaacgtcataagctggagtctgagctgataaaatcagctgcagaaggtctggggttttcatacactgaaccgaattattggatcagatatggaggacgacaggatgagaatcgggtcccttcaggagtgaacgtagagggagcagaagttcatggattctcaatgggaaaaaagctatcacccaagatagatcgagacctaagagaaggtggtcctctactctatgagaacatcacattcgtctacaactcggagcagctgaacgggactcagcgggttctcctggataacgtcctgtcggaagaacagtgccgggagctccacagcgtggccagtggaatcatgcttgttggtgatggatacagaggaaaaacttcaccccatacacccaatgaaaagtttgaaggtgcaactgtcctgaaagcactcaaatctggttatgaaggtcgagtcccactgaagagcgctcgtctgttttatgacatcagcgaaaaggctcgaaggattgtagaatcttattttatgctgaactcaactctgtatttttcctatacacacatggtctgccgaacagccctgtctggtcagcaggatagaagaaatgacctcagtcatcccatccatgctgacaactgtttgttggatccagaggccaacgaatgctggaaggagcctcctgcttacacatttcgagactatagtgctctcctatatatgaatgatgactttgaaggaggagaattcatattcacagagatggatgctaagactgtgactgcctctataaaaccaaaatgtgggcgcatgatcagcttctcatctggaggagagaaccctcatggggtgaaggcagtcaccaagggaaagaggtgtgctgtggctctgtggttcaccttggacccactttatagagaattggagcgaatacaggctgatgaagtgattgcaattctggatcaagaacagcaagggaagcatgaactgaatatcaaccctaaagatgagctataaaaatgagaaagaatgttctatcaaatatttatttaaattgttaatcttatgagaacctttttatttttgtacagagccatggtataaattaacaggttaatgtcagtcatcagatcttccttctcttcctaaggatgcttgtgttgcctcaatctatcaatctatctttcttgttttgggttgttttctctctctctctctctctctctcttcttagagacatggtctaaccatgttgtctaggatatagggcagtggctattcacagatgtgatgatagcacactggagcctcaaactcttaggctcaggcgatccttcaagcctcccggggagctgggaccacaggcacgtgccaccacacccagctctctttcttggtttttcatcatttcatgtatctatcaaagcccagttcacctcctcccccaaacacacacacacacacacacacacacacacacaattaagttgctgcaaattcaaaagcttagagagaataagcttcttggtggtgaaactacaactctcacgtgtgctccagttcccacatccttaggtgctaacggccatgagctccgactctccaaagtgagctccactttgggtctgaggagcccctggcagagtccacgctgcctcaggtatcatgggcgtaatgatcacccaggctccgggagatctcatggatgattactgtatgagacagaggggacttcagtctttccagggccttggtggaatttttggctctggtgttttcgccagacaataaacttacactggaagctttgattcaccctccacagtactccagaaaggactgtcctataagttgtacactttaaaaggtcatgtagaggttgtagtagaatggcttttcaccctggtgactttggaagaaactcttgaatactgcctgcatccgggcaccatggccaggttgcctaggagtggggtccactgatgaaaagaggtgttttgtacttacataagaaaaataaatttctgattgattttaaccgtcatctgcttatattttgggggcccctcctcattgctgctatccagcacacagatttgtgcttgtgttaaccgttataaggagctttactcgcttcgggttttgttctctgttcg

SEQ ID NO: 60755 - DNA, 396 bp, Homo sapiens
aggcaaatgatttcaaaaacacagtcttgcatgtgctaaggaaaaaaacgacattgactgatcacatagcaatctatttgctcagtaagacccctctcacttacaagcatttgaagccaggaatgttgttctttatctcccagtgcaacccttctttatccctccgcagcagaagcatccagtaccccatctacctagatgatcctgagtcaacaaaaacccttctctttgaaaataagggtttttttgtttgtttgtttgtttgtttgtttgtttgttttttcttgtctgtttcattacaggagagttacaatgcaggagttaaacattatgaggctgatgactttgagatggctatcaggcatttcgaacaagccttaagagaatatttcgttg

SEQ ID NO: 60756 - DNA, 789 bp, Homo sapiens
atcatttcatgtatctatcaaagcccagttcacctcctcccccaaacacacacacacacacacacacacacacacacaattaagttgctgcaaattcaaaagcttagagagaataagcttcttggtggtgaaactacaactctcacgtgtgctccagttctaaaattaacctgtgcctggtctctgaagccctttcttgctctgtgcctttcagccacatccttaggtgctaacggccatgagctccgactctccaaagtgagctccactttgggtctgaggagcccctggcagagtccacgctgcctcaggtatcatgggcgtaatgatcacccaggctccgggagatctcatggatgattactgtatgagacagaggggacttcagtctttccagggccttggtggaatttttggctctggtgttttcgccagacaataaacttacactggaagctttgattcaccctccacagtactccagaaaggactgtcctataagttgtacactttaaaaggtcatgtagaggttgtagtagaatggcttttcaccctggtgactttggaagaaactcttgaatactgcctgcatccgggcaccatggccaggttgcctaggagtggggtccactgatgaaaagaggtgttttgtacttacataagaaaaataaatttctgattgattttaaccgtcatctgcttatattttgggggcccctcctcattgctgctatccagcacacagatttgtgcttgtgtctgatttgtttaataaagggaggcttattt

SEQ ID NO: 60757 - DNA, 165 bp, Homo sapiens
aaaaaaaaaaagccttggattcagtctacccattcgctaaagagagtttgatctccatgtgatcattttcaaagcaaactttaaccctgctctgatagaaaagaattaccagatgagtcttaaaacaaaaatttctggttgtttaatgaaagttgcattaataaa

SEQ ID NO: 60758 - DNA, 325 bp, Homo sapiens
tagctcagaggacatgaaatttatttccataaataaaaatgttatgtttcttcacattattcactttccccaaacagaaattcacacttcaaaaaattagcttttggttttagaattcagtcaattctgcatactcgactctaatattatgatttttaaaaatgtacatctacgacccagcaattccacacttaggaatattcccaagagaactgcgtatatgtgttcactggaagatatgcattagaatggctctagcagcattattcataatagctctaaattggaaattctccaattgcacatcaacagtggaacggataaa

SEQ ID NO: 60759 - DNA, 6203 bp, Homo sapiens
  misc_feature (6194)..(6194): n is a, c, g, or t
  misc_feature (6196)..(6201): n is a, c, g, or t
  misc_feature (6203)..(6203): n is a, c, g, or t
ggtttttaggcctggccgccatggcgtctccttctagaaactcccagagccgacgccggtgcaaggagccgctccgatacagctacaaccccgaccagttccacaacatggacctcaggggcggcccccacgatggcgtcaccattccccgctccaccagcgacactgacctggtcacctcggacagccgctccacgctcatggtcagcagctcctactattccatcgggcactctcaggacctggtcatccactgggacataaaggaggaagtggacgctggggactggattggcatgtacctcattgatgaggtcttgtccgaaaactttctggactataaaaaccgtggagtcaatggttctcatcggggccagatcatctggaagatcgatgccagctcgtactttgtggaacctgaaactaagatctgcttcaaatactaccatggagtgagtggggccctgcgagcaaccacccccagtgtcacggtcaaaaactcggcagctcctatttttaaaagcattggtgctgatgagaccgtccaaggacaaggaagtcggaggctgatcagcttctctctctcagatttccaagccatggggttgaagaaagggatgtttttcaacccagacccttatctgaagatttccattcagcctgggaaacacagcatcttccccgccctccctcaccatggacaggagaggagatccaagatcataggcaacaccgtgaaccccatctggcaggccgagcaattcagttttgtgtccttgcccactgacgtgctggaaattgaggtgaaggacaagtttgccaagagccgccccatcatcaagcgcttcttgggaaagctgtcgatgcccgttcaaagactcctggagagacacgccataggggatagggtggtcagctacacacttggccgcaggcttccaacagatcatgtgagtggacagctgcaattccgatttgagatcacttcctccatccacccagcagatgatgaggagatttccctgagtaccgagcctgagtcagcccaaattcaggacagccccatgaacaacctgatggaaagcggcagtggggaacctcggtctgaggcaccagagtcctctgagagctggaagccagagcagctgggtgagggcagtgtccccgatcgtccagggaaccaaagcatagagctttccagaccagctgaggaagcagcagtcatcacggaggcaggagaccagggcatggtctctgtgggacctgaaggggctggggagctcctggcccaggtgcaaaaggacatccagcctgcccccagtgcagaagagctggccgagcagctggacctgggtgaggaggcatcagcactgctgctggaagacggtgaagccccagccagcaccaaggaggagcccttggaggaggaagcaacgacccagagccgggctggaagggaagaagaggagaaggagcaggaggaggagggagatgtgtccaccctggagcagggagagggcaggctgcagctgcgggcctcggtgaagagaaaaagcaggccctgctccttgcctgtgtccgagctggagacggtgatcgcgtcagcctgcggggaccccgagaccccgcggacacactacatccgcatccacaccctgctgcacagcatgccctccgcccagggcggcagcgcggcagaggaggaggacggcgcggaggaggagtccaccctcaaggactcctcggagaaggatgggctcagcgaggtggacacggtggccgctgacccgtctgccctggaagaggacagagaagagcccgagggggctactccaggcacggcgcaccctggccactccgggggccacttccccagcctggccaatggcgcggcccaggatggcgacacgcaccccagcaccgggagcgagagcgactccagccccaggcaaggcggggaccacagttgcgagggctgtgacgcgtcctgctgcagcccctcgtgctacagctcctcgtgctacagcacgtcctgctacagcagctcgtgctacagcgcctcgtgctacagcccctcctgctacaacggcaacaggttcgccagccacacgcgcttctcctccgtggacagcgccaagatctccgagagcacggtcttctcctcgcaagacgacgaggaggaggagaacagcgcgttcgagtcggtacccgactccatgcagagccctgagctggacccggagtccacgaacggcgctgggccgtggcaagacgagctggccgcccctagcgggcacgtggaaagaagcccggaaggtctggaatcccccgtggcaggtccaagcaatcggagagaaggtgaatgtcctatactccataattcccagccagtaagccagcttccttccctgaggcctgaacatcatcactacccaacaatcgatgagcctcttccaccaaactgggaagctcgaattgacagccacgggcgggtcttttatgtggaccacgtgaaccgcacaaccacctggcagcgtccgacggcagcagccaccccggatggcatgcggagatcggggtccatccagcagatggagcaactcaacaggcggtatcaaaacattcagcgaaccattgcaacagagaggtccgaagaagattctggcagccaaagctgcgagcaagccccagcaggaggaggcggaggtggagggagtgactcagaagccgaatcttcccagtccagcttagatctaaggagagaggggtcactttctccagtgaactcacaaaaaatcaccttgctgctgcagtccccagcggtcaagttcatcaccaaccccgagttcttcactgtgctacatgccaattatagtgcctaccgagtcttcaccagtagcacctgcttaaagcacatgattctgaaagtccgacgggatgctcgcaattttgaacgctaccagcacaaccgggacttggtgaatttcatcaacatgttcgcagacactcggctggaactgccccggggctgggagatcaaaacggaccagcagggaaagtcttttttcgtggaccacaacagtcgagctaccactttcattgacccccgaatccctcttcagaacggtcgtcttcccaatcatctaactcaccgacagcacctccagaggctccgaagttacagcgctggagaggcctcagaagtttctagaaacagaggagcctctttactggccaggccaggacacagcttagtagctgctattcgaagccaacatcaacatgagtcattgccactggcatataatgacaagattgtggcatttcttcgccagccaaacatttttgaaatgctgcaagagcgtcagccaagcttagcaagaaaccacacactcagggagaaaatccattacattcggactgagggtaatcacgggcttgagaagttgtcctgtgatgcggatctggtcattttgctgagtctctttgaagaagagattatgtcctacgtccccctgcaggctgccttccaccctgggtatagcttctctccccgctgttcaccctgttcttcacctcagaactccccaggtttacagagagccagtgcaagagccccttccccctaccgaagagactttgaggccaagctccgcaatttctacagaaaactggaagccaaaggatttggtcagggtccggggaaaattaagctcattattcgccgggatcatttgttggagggaaccttcaatcaggtgatggcctattcgcggaaagagctccagcgaaacaagctctacgtcacctttgttggagaggagggcctggactacagtggcccctcgcgggagttcttcttccttctgtctcaggagctcttcaacccttactatggactctttgagtactcggcaaatgatacttacacggtgcagatcagccccatgtccgcatttgtagaaaaccatcttgagtggttcaggtttagcggtcgcatcctgggtctggctctgatccatcagtaccttcttgacgctttcttcacgaggcccttctacaaggcactcctgagactgccctgtgatttgagtgacctggaatatttggatgaggaattccaccagagtttgcagtggatgaaggacaacaacatcacagacatcttagacctcactttcactgttaatgaagaggtttttggacaggtcacggaaagggagttgaagtctggaggagccaacacacaggtgacggagaaaaacaagaaggagtacatcgagcgcatggtgaagtggcgggtggagcgcggcgtggtacagcagaccgaggcgctggtgcgcggcttctacgaggttgtagactcgaggctggtgtccgtgtttgatgccagggagctggagctggtgatagctggcaccgcggaaatcgacctaaatgactggcggaataacactgagtaccggggaggttaccacgatgggcatcttgtgatccgctggttctgggctgcggtggagcgcttcaataatgagcagaggctgagattactgcagtttgtcacgggaacatccagcgtgccctacgaaggcttcgcagccctccgtgggagcaatgggcttcggcgcttctgcatagagaaatgggggaaaattacttctctccccagggcacacacatgcttcaaccgactggatcttccaccgtatccctcgtactccatgttgtatgaaaagctgttaacagcagtagaggaaaccagcacctttggacttgagtgaggacatggaacctcgcctgacattttcctggccagtgacatcacccttcctgggatgatccccttttccctttcccttaatcaactctcctttgattttggtattccatgatttttattttcaaaccaaatcaggattgacaaaagctgtgcatgaagaactgccttcttctaagatctaaccttcaggcttctctcctctgttttcaatgaactgctagcctgtatgcaatattaaaaaacagctgtctcaaggtctgtgtatatctccacatacctccattactaacaatgaaatatgaatgcaagttaagctacacttgaccaaatggtaataaatgtttacttccatttctatcattgaagggaaaatgtgagcattaagcactccaggctttcatatgcccatgtcttctgagcagagccaccattttttataatttctaataaccaactccagaactaggagctgatcaactctttgttttcctctccatctacttttccctgtgcataatatccatccaaaggacaacagtggcaaagctgaaatttttatacattcaactcatgattcacatgtggcatcagtcccatcagccggaactagcctagacatacggtgcaaatatgacacttctaacgattaacaacagcaagaaaacacctgctgctgatgcaatgcaatgcatcccaatggttgtggggattgtgggctcaactcaagagaagtttaggagggggagcatccctagtgaatactcacaccacaagaaggacaaacttgtgcacatgtccaagaaagaaagcttcttgattgaggtagcatgaaggatgaggcttcagcccccattgtcttatgtagaatgtggcaatgccaactggagaaagggaagaaggacatattaccttggtttgaatccctgagttctgtactgttctgttttgtttagtctagccacagttcttcacaaaggaaaaaaaaatgtgtagatgataccatgacttttgttaaagccatgacttttgtttgcttggcagacaaaccctttttttaaaactttgatatttttttttcacattttttttccttttcctttcttaatcatggagttcaagttcctttgcattcgattgtccatcgggaccacactaggaagctgcagagagtgatggtgcttgttagggatcaagggcaacatagtacttctccttcacccatagtaatcctcctggggcagaaacataacaccccaaaggcacgttgatttgtatcaaaataaatatccagtttcttttagcattcagtgaaaacatatctcagaaaacttcatgttgtcagaaaaacagctgcaggctccaaagacagcctaacctctcaactacatttgaaataaacccaaccataatggtnannnnnnan

SEQ ID NO: 60760 - DNA, 2888 bp, Homo sapiens
  misc_feature (948)..(948): n is a, c, g, or t
  misc_feature (1862)..(1862): n is a, c, g, or t
  misc_feature (2367)..(2367): n is a, c, g, or t
aatcaatagttgcccagtgaaatcactgtcttcgttgcctgtagctgatttttaaaagcattggtgctgatgagaccgtccaaggacaaggaagtcggaggctgatcagcttctctctctcagatttccaagccatggggttgaagaaagggatgtttttcaacccagacccttatctgaagatttccattcagcctgggaaacacagcatcttccccgccctccctcaccatggacaggagaggagatccaagatcataggcaacaccgtgaaccccatctggcaggccgagcaattcagttttgtgtccttgcccactgacgtgctggaaattgaggtgaaggacaagtttgccaagagccgccccatcatcaagcgcttcttgggaaagctgtcgatgcccgttcaaagactcctggagagacacgccatagggtaaacctgtgactgagatcttactatcactaggttcccaccaacaggtcgtgcccaaaggtggcctgtaggctgcaatagtatagtctcacagagagtcaaaatggtatcattatatttcctttgtttttcctactaattatgttgcctgagccaacataagtgtttgttatattaaacaaacccatcccttttcacttgatgtgtaacactggttacttacccaagagagtaaaaaatcctattaaaaatattaaacagtattaaaagaagccctcaatggggcatttttctgtacaggtagaaactaaagtttgttttactatgaagaatattatttcattcatatgccagtctggtatgtaagatttaatcatatgtgacatttccataacaagatggaatactgggtaactactgtagagtttcttacttagaagacactagtatctgcagatgctagataacatggataagaatttgaaagcatgattctcatggaatgacagcanttaagatgctcacagaattcaattgtatatgagaatgggtttctgttttgtctcttttacattcatgtccactcatggttctcattaaagtggactatgaccagataacagccctatgtataatatgtatttctttaggtaacagggactacatttgaaaacactaaataaagctttctattgataaacatatacttatatacaatgtaacccttacaaagatagcaaaagaatgagaaaaaaatatgcagaatttccaagtgtcttaatttaaagttctttggattatcagaaggactttggaatcacggataattatcataaagacatttattattaattggaaccttatggtgtgtaggcagcagggtgcacagagacctgccactaactctccagccaaagggagctgagtttatggagctgcagtcacgtgtcacatgcagtgtttgcacttgccattcatggttgtgaggattaaacagacaaaaagtgtacataaagaacctagcacggccactggcacgtagtaggaacacaaaagaaaatggtattccttgtgatcttttttatttcatttagtcctcataatgcttctgtgacagcattatcaccattcctgcacgaggaaacaaggcttcaaaaggatcaataattatgtaaacccaaggcttgtgggtggcagagatccggccggaattcagactcacacctgtgtctctccaaagtccgagggccatccccacacaacaggcttctctcagggttcctaggactgattctgtagtttattgtgggccatgcttttcatttctctccttctctgccctactggctgctctcacagctgttagcacctctgccagggggtgggctggagaacaaaaacaggggctgtgtgggattctttctancccagcacccagtgcactgccgcccagcatgcattagatagataccagttcgtacgtaaggaacagaacttctctctccagctcgctgcagccgcagagcccctctgccctcccatgctgagttctctcctaagtccaagctgccggctcctatcttcttagcactgtcccgccctccaagcctcccactgtggaaaggcacatccccagctgaaagcaagtacctgaggtggaaaagggtgtccccgaccaaaagaaggttagctatgattttcccagtgttcttgccacccagggaaatggagagcacagatcgagtgtgattgagcttacacctctccaagaggcaacaacagcaagccatggaggcgtttttcctcccaccctctttgatgggatgatagactgccccctggtggcggcgcagagcagctcctcctccaaagccttctgcttccacagcccctgggggccacttctgcagtgctgcctcctccggaggtgncccaccgtggttaggagcagagtgttggggtgatggccatggaagcagtggccatgcagcctgagccatggcagaaccccagagtgcacccacaacaaaagtgaatccactttgcaccgcagcttccctctgccctcagcacatgctctccccataaagccccctgcatccgtggtttctgaaacgtttggctccacctgtactggctgcctccctgccctgagatatttgcacctttcccccctgggcacacatgcactctcatttccaatcctccttcgattccttggcctgtaaaatcccaggcttctgttggctgtctgcctgtaactctaaccatctcaccttcgcattgaagtgtcactggctgtcttgaaccattatttagtggtcctaccttatgcccccagctggacataagctatttaaaggcaggggcgatgtatgacatgctttgtatcaactgcagcacctttcacatggcaggggctcaaaaaatatttgttaagtgggtgaaaagc

SEQ ID NO: 60761 - DNA, 5270 bp, Homo sapiens
  misc_feature (5261)..(5261): n is a, c, g, or t
  misc_feature (5263)..(5268): n is a, c, g, or t
  misc_feature (5270)..(5270): n is a, c, g, or t
gtccagaagccagtgatctattctggaagccaggttgctgtccccctgatagagaagctcctcttcattcagatgatgaggagatttccctgagtaccgagcctgagtcagcccaaattcaggacagccccatgaacaacctgatggaaagcggcagtggggaacctcggtctgaggcaccagagtcctctgagagctggaagccagagcagctgggtgagggcagtgtccccgatcgtccagggaaccaaagcatagagctttccagaccagctgaggaagcagcagtcatcacggaggcaggagaccagggcatggtctctgtgggacctgaaggggctggggagctcctggcccaggtgcaaaaggacatccagcctgcccccagtgcagaagagctggccgagcagctggacctgggtgaggaggcatcagcactgctgctggaagacggtgaagccccagccagcaccaaggaggagcccttggaggaggaagcaacgacccagagccgggctggaagggaagaagaggagaaggagcaggaggaggagggagatgtgtccaccctggagcagggagagggcaggctgcagctgcgggcctcggtgaagagaaaaagcaggccctgctccttgcctgtgtccgagctggagacggtgatcgcgtcagcctgcggggaccccgagaccccgcggacacactacatccgcatccacaccctgctgcacagcatgccctccgcccagggcggcagcgcggcagaggaggaggacggcgcggaggaggagtccaccctcaaggactcctcggagaaggatgggctcagcgaggtggacacggtggccgctgacccgtctgccctggaagaggacagagaagagcccgagggggctactccaggcacggcgcaccctggccactccgggggccacttccccagcctggccaatggcgcggcccaggatggcgacacgcaccccagcaccgggagcgagagcgactccagccccaggcaaggcggggaccacagttgcgagggctgtgacgcgtcctgctgcagcccctcgtgctacagctcctcgtgctacagcacgtcctgctacagcagctcgtgctacagcgcctcgtgctacagcccctcctgctacaacggcaacaggttcgccagccacacgcgcttctcctccgtggacagcgccaagatctccgagagcacggtcttctcctcgcaagacgacgaggaggaggagaacagcgcgttcgagtcggtacccgactccatgcagagccctgagctggacccggagtccacgaacggcgctgggccgtggcaagacgagctggccgcccctagcgggcacgtggaaagaagcccggaaggtctggaatcccccgtggcaggtccaagcaatcggagagaaggtgaatgtcctatactccataattcccagccagtaagccagcttccttccctgaggcctgaacatcatcactacccaacaatcgatgagcctcttccaccaaactgggaagctcgaattgacagccacgggcgggtcttttatgtggaccacgtgaaccgcacaaccacctggcagcgtccgacggcagcagccaccccggatggcatgcggagatcggggtccatccagcagatggagcaactcaacaggcggtatcaaaacattcagcgaaccattgcaacagagaggtccgaagaagattctggcagccaaagctgcgagcaagccccagcaggaggaggcggaggtggagggagtgactcagaagccgaatcttcccagtccagcttagatctaaggagagaggggtcactttctccagtgaactcacaaaaaatcaccttgctgctgcagtccccagcggtcaagttcatcaccaaccccgagttcttcactgtgctacatgccaattatagtgcctaccgagtcttcaccagtagcacctgcttaaagcacatgattctgaaagtccgacgggatgctcgcaattttgaacgctaccagcacaaccgggacttggtgaatttcatcaacatgttcgcagacactcggctggaactgccccggggctgggagatcaaaacggaccagcagggaaagtcttttttcgtggaccacaacagtcgagctaccactttcattgacccccgaatccctcttcagaacggtcgtcttcccaatcatctaactcaccgacagcacctccagaggctccgaagttacagcgctggagaggcctcagaagtttctagaaacagaggagcctctttactggccaggccaggacacagcttagtagctgctattcgaagccaacatcaacatgagtcattgccactggcatataatgacaagattgtggcatttcttcgccagccaaacatttttgaaatgctgcaagagcgtcagccaagcttagcaagaaaccacacactcagggagaaaatccattacattcggactgagggtaatcacgggcttgagaagttgtcctgtgatgcggatctggtcattttgctgagtctctttgaagaagagattatgtcctacgtccccctgcaggctgccttccaccctgggtatagcttctctccccgctgttcaccctgttcttcacctcagaactccccaggtttacagagagccagtgcaagagccccttccccctaccgaagagactttgaggccaagctccgcaatttctacagaaaactggaagccaaaggatttggtcagggtccggggaaaattaagctcattattcgccgggatcatttgttggagggaaccttcaatcaggtgatggcctattcgcggaaagagctccagcgaaacaagctctacgtcacctttgttggagaggagggcctggactacagtggcccctcgcgggagttcttcttccttctgtctcaggagctcttcaacccttactatggactctttgagtactcggcaaatgatacttacacggtgcagatcagccccatgtccgcatttgtagaaaaccatcttgagtggttcaggtttagcggtcgcatcctgggtctggctctgatccatcagtaccttcttgacgctttcttcacgaggcccttctacaaggcactcctgagactgccctgtgatttgagtgacctggaatatttggatgaggaattccaccagagtttgcagtggatgaaggacaacaacatcacagacatcttagacctcactttcactgttaatgaagaggtttttggacaggtcacggaaagggagttgaagtctggaggagccaacacacaggtgacggagaaaaacaagaaggagtacatcgagcgcatggtgaagtggcgggtggagcgcggcgtggtacagcagaccgaggcgctggtgcgcggcttctacgaggttgtagactcgaggctggtgtccgtgtttgatgccagggagctggagctggtgatagctggcaccgcggaaatcgacctaaatgactggcggaataacactgagtaccggggaggttaccacgatgggcatcttgtgatccgctggttctgggctgcggtggagcgcttcaataatgagcagaggctgagattactgcagtttgtcacgggaacatccagcgtgccctacgaaggcttcgcagccctccgtgggagcaatgggcttcggcgcttctgcatagagaaatgggggaaaattacttctctccccagggcacacacatgcttcaaccgactggatcttccaccgtatccctcgtactccatgttgtatgaaaagctgttaacagcagtagaggaaaccagcacctttggacttgagtgaggacatggaacctcgcctgacattttcctggccagtgacatcacccttcctgggatgatccccttttccctttcccttaatcaactctcctttgattttggtattccatgatttttattttcaaaccaaatcaggattgacaaaagctgtgcatgaagaactgccttcttctaagatctaaccttcaggcttctctcctctgttttcaatgaactgctagcctgtatgcaatattaaaaaacagctgtctcaaggtctgtgtatatctccacatacctccattactaacaatgaaatatgaatgcaagttaagctacacttgaccaaatggtaataaatgtttacttccatttctatcattgaagggaaaatgtgagcattaagcactccaggctttcatatgcccatgtcttctgagcagagccaccattttttataatttctaataaccaactccagaactaggagctgatcaactctttgttttcctctccatctacttttccctgtgcataatatccatccaaaggacaacagtggcaaagctgaaatttttatacattcaactcatgattcacatgtggcatcagtcccatcagccggaactagcctagacatacggtgcaaatatgacacttctaacgattaacaacagcaagaaaacacctgctgctgatgcaatgcaatgcatcccaatggttgtggggattgtgggctcaactcaagagaagtttaggagggggagcatccctagtgaatactcacaccacaagaaggacaaacttgtgcacatgtccaagaaagaaagcttcttgattgaggtagcatgaaggatgaggcttcagcccccattgtcttatgtagaatgtggcaatgccaactggagaaagggaagaaggacatattaccttggtttgaatccctgagttctgtactgttctgttttgtttagtctagccacagttcttcacaaaggaaaaaaaaatgtgtagatgataccatgacttttgttaaagccatgacttttgtttgcttggcagacaaaccctttttttaaaactttgatatttttttttcacattttttttccttttcctttcttaatcatggagttcaagttcctttgcattcgattgtccatcgggaccacactaggaagctgcagagagtgatggtgcttgttagggatcaagggcaacatagtacttctccttcacccatagtaatcctcctggggcagaaacataacaccccaaaggcacgttgatttgtatcaaaataaatatccagtttcttttagcattcagtgaaaacatatctcagaaaacttcatgttgtcagaaaaacagctgcaggctccaaagacagcctaacctctcaactacatttgaaataaacccaaccataatggtnannnnnnan

SEQ ID NO: 60762 - DNA, 5216 bp, Homo sapiens
  misc_feature (5207)..(5207): n is a, c, g, or t
  misc_feature (5209)..(5214): n is a, c, g, or t
  misc_feature (5216)..(5216): n is a, c, g, or t
gtccagaagccagtgatctattctggaagccaggttgctgtccccctgatagagaagctcctcttcattcagatgatgaggagatttccctgagtaccgagcctgagtcagcccaaattcaggacagccccatgaacaacctgatggaaagcggcagtggggaacctcggtctgaggcaccagagtcctctgagagctggaagccagagcagctgggtgagggcagtgtccccgatcgtccagggaaccaaagcatagagctttccagaccagctgaggaagcagcagtcatcacggaggcaggagaccagggcatggtctctgtgggacctgaaggggctggggagctcctggcccaggtgcaaaaggacatccagcctgcccccagtgcagaagagctggccgagcagctggacctgggtgaggaggcatcagcactgctgctggaagacggtgaagccccagccagcaccaaggaggagcccttggaggaggaagcaacgacccagagccgggctggaagggaagaagaggagaaggagcaggaggaggagggagatgtgtccaccctggagcagggagagggcaggctgcagctgcgggcctcggtgaagagaaaaagcaggccctgctccttgcctgtgtccgagctggagacggtgatcgcgtcagcctgcggggaccccgagaccccgcggacacactacatccgcatccacaccctgctgcacagcatgccctccgcccagggcggcagcgcggcagaggaggaggacggcgcggaggaggagtccaccctcaaggactcctcggagaaggatgggctcagcgaggtggacacggtggccgctgacccgtctgccctggaagaggacagagaagagcccgagggggctactccaggcacggcgcaccctggccactccgggggccacttccccagcctggccaatggcgcggcccaggatggcgacacgcaccccagcaccgggagcgagagcgactccagccccaggcaaggcggggaccacagttgcgagggctgtgacgcgtcctgctgcagcccctcgtgctacagctcctcgtgctacagcacgtcctgctacagcagctcgtgctacagcgcctcgtgctacagcccctcctgctacaacggcaacaggttcgccagccacacgcgcttctcctccgtggacagcgccaagatctccgagagcacggtcttctcctcgcaagacgacgaggaggaggagaacagcgcgttcgagtcggtacccgactccatgcagagccctgagctggacccggagtccacgaacggcgctgggccgtggcaagacgagctggccgcccctagcgggcacgtggaaagaagcccggaaggtctggaatcccccgtggcaggtccaagcaatcggagagaaggtgaatgtcctatactccataattcccagccagtaagccagcttccttccctgaggcctgaacatcatcactacccaacaatcgatgagcctcttccaccaaactgggaagctcgaattgacagccacgggcgggtcttttatgtggaccacgtgaaccgcacaaccacctggcagcgtccgacggcagcagccaccccggatggcatgcggagatcggggtccatccagcagatggagcaactcaacaggcggtatcaaaacattcagcgaaccattgcaacagagaggtccgaagaagattctggcagccaaagctgcgagcaagccccagcaggaggaggcggaggtggagggagtgactcagaagccgaatcttcccagtccagcttagatctaaggagagaggggtcactttctccagtgaactcacaaaaaatcaccttgctgctgcagtccccagcggtcaagttcatcaccaaccccgagttcttcactgtgctacatgccaattatagtgcctaccgagtcttcaccagtagcacctgcttaaagcacatgattctgaaagtccgacgggatgctcgcaattttgaacgctaccagcacaaccgggacttggtgaatttcatcaacatgttcgcagacactcggctggaactgccccggggctgggagatcaaaacggaccagcagggaaagtcttttttcgtggaccacaacagtcgagctaccactttcattgacccccgaatccctcttcagaacggtcgtcttcccaatcatctaactcaccgacagcacctccagaggctccgaagttacagcgctggagaggcctcagaagtttctagaaacagaggagcctctttactggccaggccaggacacagcttagtagctgctattcgaagccaacatcaacatgagtcattgccactggcatataatgacaagattgtggcatttcttcgccagccaaacatttttgaaatgctgcaagagcgtcagccaagcttagcaagaaaccacacactcagggagaaaatccattacattcggactgagggtaatcacgggcttgagaagttgtcctgtgatgcggatctggtcattttgctgagtctctttgaagaagagattatgtcctacgtccccctgcaggctgccttccaccctgggtatagcttctctccccgctgttcaccctgttcttcacctcagaactccccaggtttacagagagccagtgcaagagccccttccccctaccgaagagactttgaggccaagctccgcaatttctacagaaaactggaagccaaaggatttggtcagggtccggggaaaattaagctcattattcgccgggatcatttgttggagggaaccttcaatcaggtgatggcctattcgcggaaagagctccagcgaaacaagctctacgtcacctttgttggagaggagggcctggactacagtggcccctcgcgggagttcttcttccttctgtctcaggagctcttcaacccttactatggactctttgagtactcggcaaatgatacttacacggtgcagatcagccccatgtccgcatttgtagaaaaccatcttgagtggttcaggtttagcggtcgcatcctgggtctggctctgatccatcagtaccttcttgacgctttcttcacgaggcccttctacaaggcactcctgagactgccctgtgatttgagtgacctggaatatttggatgaggaattccaccagagtttgcagtggatgaaggacaacaacatcacagacatcttagacctcactttcactgttaatgaagaggtttttggacaggtcacggaaagggagttgaagtctggaggagccaacacacaggtgacggagaaaaacaagaaggagtacatcgagcgcatggtgaagtggcgggtggagcgcggcgtggtacagcagaccgaggcgctggtgcgcggcttctacgaggttgtagactcgaggctggtgtccgtgtttgatgccagggagctggagctggtgatagctggcaccgcggaaatcgacctaaatgactggcggaataacactgagtaccggggaggttaccacgatgggcatcttgtgatccgctggttctgggctgcggtggagcgcttcaataatgagcagaggctgagattactgcagtttgtcacgggaacatccagcgtgccctacgaaggcttcgcagccctccgtgggagcaatgggcttcggcgcttctgcatagagaaatgggggaaaattacttctctccccagggcacacacatgcttcaaccgactggatcttccaccgtatccctcgtactccatgttgtatgaaaagctgttaacagcagtagaggaaaccagcacctttggacttgagtgaggacatggaacctcgcctgacattttcctggccagtgacatcacccttcctgggatgatccccttttccctttcccttaatcaactctcctttgattttggtattccatgatttttattttcaaaccaaatcaggattgacaaaagctgtgcatgaagaactgccttcttctaagatctaaccttcaggcttctctcctctgttttcaatgaactgctagcctgtatgcaatattaaaaaacagctgtctcaaggtctgtgtatatctccacatacctccattactaacaatgaaatatgaatgcaagttaagctacacttgaccaaatggtaataaatgtttacttccatttctatcattgaagggaaaatgtgagcattaagcactccaggctttcatatgcccatgtcttctgagcagagccaccattttttataatttctaataaccaactccagaactaggagctgatcaactctttgttttcctctccatctacttttccctgtgcataatatccatccaaaggacaacagtggcaaagctgaaatttttatacattcaactcatgattcacatgtggcatcagtcccatcagccggaactagcctagacatacggtgcaaatatgacacttctaacgattaacaacagcaagggctcaactcaagagaagtttaggagggggagcatccctagtgaatactcacaccacaagaaggacaaacttgtgcacatgtccaagaaagaaagcttcttgattgaggtagcatgaaggatgaggcttcagcccccattgtcttatgtagaatgtggcaatgccaactggagaaagggaagaaggacatattaccttggtttgaatccctgagttctgtactgttctgttttgtttagtctagccacagttcttcacaaaggaaaaaaaaatgtgtagatgataccatgacttttgttaaagccatgacttttgtttgcttggcagacaaaccctttttttaaaactttgatatttttttttcacattttttttccttttcctttcttaatcatggagttcaagttcctttgcattcgattgtccatcgggaccacactaggaagctgcagagagtgatggtgcttgttagggatcaagggcaacatagtacttctccttcacccatagtaatcctcctggggcagaaacataacaccccaaaggcacgttgatttgtatcaaaataaatatccagtttcttttagcattcagtgaaaacatatctcagaaaacttcatgttgtcagaaaaacagctgcaggctccaaagacagcctaacctctcaactacatttgaaataaacccaaccataatggtnannnnnnan

SEQ ID NO: 60763 - DNA, 3844 bp, Homo sapiens
  misc_feature (3835)..(3835): n is a, c, g, or t
  misc_feature (3837)..(3842): n is a, c, g, or t
  misc_feature (3844)..(3844): n is a, c, g, or t
ttggacgaggaatccaccagacgtttgcagtggataaggacaacaacatcacagacatcttagacctcactttcactgttaatgaagaggttttcggacagactgggaagctcgaattgacagccacgggcgggtcttttatgtggaccacgtgaaccgcacaaccacctggcagcgtccgacggcagcagccaccccggatggcatgcggagatcggggtccatccagcagatggagcaactcaacaggcggtatcaaaacattcagcgaaccattgcaacagagaggtccgaagaagattctggcagccaaagctgcgagcaagccccagcaggaggaggcggaggtggagggagtgactcagaagccgaatcttcccagtccagcttagatctaaggagagaggggtcactttctccagtgaactcacaaaaaatcaccttgctgctgcagtccccagcggtcaagttcatcaccaaccccgagttcttcactgtgctacatgccaattatagtgcctaccgagtcttcaccagtagcacctgcttaaagcacatgattctgaaagtccgacgggatgctcgcaattttgaacgctaccagcacaaccgggacttggtgaatttcatcaacatgttcgcagacactcggctggaactgccccggggctgggagatcaaaacggaccagcagggaaagtcttttttcgtggaccacaacagtcgagctaccactttcattgacccccgaatccctcttcagaacggtcgtcttcccaatcatctaactcaccgacagcacctccagaggctccgaagttacagcgctggagaggcctcagaagtttctagaaacagaggagcctctttactggccaggccaggacacagcttagtagctgctattcgaagccaacatcaacatgagtcattgccactggcatataatgacaagattgtggcatttcttcgccagccaaacatttttgaaatgctgcaagagcgtcagccaagcttagcaagaaaccacacactcagggagaaaatccattacattcggactgagggtaatcacgggcttgagaagttgtcctgtgatgcggatctggtcattttgctgagtctctttgaagaagagattatgtcctacgtccccctgcaggctgccttccaccctgggtatagcttctctccccgctgttcaccctgttcttcacctcagaactccccaggtttacagagagccagtgcaagagccccttccccctaccgaagagactttgaggccaagctccgcaatttctacagaaaactggaagccaaaggatttggtcagggtccggggaaaattaagctcattattcgccgggatcatttgttggagggaaccttcaatcaggtgatggcctattcgcggaaagagctccagcgaaacaagctctacgtcacctttgttggagaggagggcctggactacagtggcccctcgcgggagttcttcttccttctgtctcaggagctcttcaacccttactatggactctttgagtactcggcaaatgatacttacacggtgcagatcagccccatgtccgcatttgtagaaaaccatcttgagtggttcaggtttagcggtcgcatcctgggtctggctctgatccatcagtaccttcttgacgctttcttcacgaggcccttctacaaggcactcctgagactgccctgtgatttgagtgacctggaatatttggatgaggaattccaccagagtttgcagtggatgaaggacaacaacatcacagacatcttagacctcactttcactgttaatgaagaggtttttggacaggtcacggaaagggagttgaagtctggaggagccaacacacaggtgacggagaaaaacaagaaggagtacatcgagcgcatggtgaagtggcgggtggagcgcggcgtggtacagcagaccgaggcgctggtgcgcggcttctacgaggttgtagactcgaggctggtgtccgtgtttgatgccagggagctggagctggtgatagctggcaccgcggaaatcgacctaaatgactggcggaataacactgagtaccggggaggttaccacgatgggcatcttgtgatccgctggttctgggctgcggtggagcgcttcaataatgagcagaggctgagattactgcagtttgtcacgggaacatccagcgtgccctacgaaggcttcgcagccctccgtgggagcaatgggcttcggcgcttctgcatagagaaatgggggaaaattacttctctccccagggcacacacatgcttcaaccgactggatcttccaccgtatccctcgtactccatgttgtatgaaaagctgttaacagcagtagaggaaaccagcacctttggacttgagtgaggacatggaacctcgcctgacattttcctggccagtgacatcacccttcctgggatgatccccttttccctttcccttaatcaactctcctttgattttggtattccatgatttttattttcaaaccaaatcaggattgacaaaagctgtgcatgaagaactgccttcttctaagatctaaccttcaggcttctctcctctgttttcaatgaactgctagcctgtatgcaatattaaaaaacagctgtctcaaggtctgtgtatatctccacatacctccattactaacaatgaaatatgaatgcaagttaagctacacttgaccaaatggtaataaatgtttacttccatttctatcattgaagggaaaatgtgagcattaagcactccaggctttcatatgcccatgtcttctgagcagagccaccattttttataatttctaataaccaactccagaactaggagctgatcaactctttgttttcctctccatctacttttccctgtgcataatatccatccaaaggacaacagtggcaaagctgaaatttttatacattcaactcatgattcacatgtggcatcagtcccatcagccggaactagcctagacatacggtgcaaatatgacacttctaacgattaacaacagcaagaaaacacctgctgctgatgcaatgcaatgcatcccaatggttgtggggattgtgggctcaactcaagagaagtttaggagggggagcatccctagtgaatactcacaccacaagaaggacaaacttgtgcacatgtccaagaaagaaagcttcttgattgaggtagcatgaaggatgaggcttcagcccccattgtcttatgtagaatgtggcaatgccaactggagaaagggaagaaggacatattaccttggtttgaatccctgagttctgtactgttctgttttgtttagtctagccacagttcttcacaaaggaaaaaaaaatgtgtagatgataccatgacttttgttaaagccatgacttttgtttgcttggcagacaaaccctttttttaaaactttgatatttttttttcacattttttttccttttcctttcttaatcatggagttcaagttcctttgcattcgattgtccatcgggaccacactaggaagctgcagagagtgatggtgcttgttagggatcaagggcaacatagtacttctccttcacccatagtaatcctcctggggcagaaacataacaccccaaaggcacgttgatttgtatcaaaataaatatccagtttcttttagcattcagtgaaaacatatctcagaaaacttcatgttgtcagaaaaacagctgcaggctccaaagacagcctaacctctcaactacatttgaaataaacccaaccataatggtnannnnnnan

SEQ ID NO: 60764 - DNA, 4583 bp, Homo sapiens
  misc_feature (4574)..(4574): n is a, c, g, or t
  misc_feature (4576)..(4581): n is a, c, g, or t
  misc_feature (4583)..(4583): n is a, c, g, or t
gtccagaagccagtgatctattctggaagccaggttgctgtccccctgatagagaagctcctcttcattcagatgatgaggagatttccctgagtaccgagcctgagtcagcccaaattcaggacagccccatgaacaacctgatggaaagcggcagtggggaacctcggtctgaggcaccagagtcctctgagagctggaagccagagcagctgggtgagggcagtgtccccgatcgtccagggaaccaaagcatagagctttccagaccagctgaggaagcagcagtcatcacggaggcaggagaccagggcatggtctctgtgggacctgaaggggctggggagctcctggcccaggtgcaaaaggacatccagcctgcccccagtgcagaagagctggccgagcagctggacctgggtgaggaggcatcagcactgctgctggaagacggtgaagccccagccagcaccaaggaggagcccttggaggaggaagcaacgacccagagccgggctggaagggaagaagaggagaaggagcaggaggaggagggagatgtgtccaccctggagcagggagagggcaggctgcagctgcgggcctcggtgaagagaaaaagcaggccctgctccttgcctgtgtccgagctggagacggtgatcgcgtcagcctgcggggaccccgagaccccgcggacacactacatccgcatccacaccctgctgcacagcatgccctccgcccagggcggcagcgcggcagaggaggaggacggcgcggaggaggagtccaccctcaaggactcctcggagaaggatgggctcagcgaggtggacacggtggccgctgacccgtctgccctggaagaggacagagaagagcccgagggggctactccaggcacggcgcaccctggccactccgggggccacttccccagcctggccaatggcgcggcccaggatggcgacacgcaccccagcaccgggagcgagagcgactccagccccaggcaaggcggggaccacagttgcgagggctgtgacgcgtcctgctgcagcccctcgtgctacagctcctcgtgctacagcacgtcctgctacagcagctcgtgctacagcgcctcgtgctacagcccctcctgctacaacggcaacaggttcgccagccacacgcgcttctcctccgtggacagcgccaagatctccgagagcacggtcttctcctcgcaagacgacgaggaggaggagaacagcgcgttcgagtcggtacccgactccatgcagagccctgagctggacccggagtccacgaacggcgctgggccgtggcaagacgagctggccgcccctagcgggcacgtggaaagaagcccggaaggtctggaatcccccgtggcaggtccaagcaatcggagagaaggtgaatgtcctatactccataattcccagccagtaagccagcttccttccctgaggcctgaacatcatcactacccaacaatcgatgagcctcttccaccaaactgggaagctcgaattgacagccacgggcgggtcttttatgtggaccacgtgaaccgcacaaccacctggcagcgtccgacggcagcagccaccccggatggcatgcggagatcggggtccatccagcagatggagcaactcaacaggcggtatcaaaacattcagcgaaccattgcaacagagaggtccgaagaagattctggcagccaaagctgcgagcaagccccagcaggaggaggcggaggtggagggagtgactcagaagccgaatcttcccagtccagcttagatctaaggagagaggggtcactttctccagtgaactcacaaaaaatcaccttgctgctgcagtccccagcggtcaagttcatcaccaaccccgagttcttcactgtgctacatgccaattatagtgcctaccgagtcttcaccagtagcacctgcttaaagcacatgattctgaaagtccgacgggatgctcgcaattttgaacgctaccagcacaaccgggacttggtgaatttcatcaacatgttcgcagacactcggctggaactgccccggggctgggagatcaaaacggaccagcagggaaagtcttttttcgtggaccacaacagtcgagctaccactttcattgacccccgaatccctcttcagaacggtcgtcttcccaatcatctaactcaccgacagcacctccagaggctccgaagttacagcgctggagaggctagagtgcaatggtgcgatcttggctcactgcaacctcctcctcccaggttcaagcaattctcctgcctcagcctctcaagtagctgggattacaggttcaggtttagcggtcgcatcctgggtctggctctgatccatcagtaccttcttgacgctttcttcacgaggcccttctacaaggcactcctgagactgccctgtgatttgagtgacctggaatatttggatgaggaattccaccagagtttgcagtggatgaaggacaacaacatcacagacatcttagacctcactttcactgttaatgaagaggtttttggacaggtcacggaaagggagttgaagtctggaggagccaacacacaggtgacggagaaaaacaagaaggagtacatcgagcgcatggtgaagtggcgggtggagcgcggcgtggtacagcagaccgaggcgctggtgcgcggcttctacgaggttgtagactcgaggctggtgtccgtgtttgatgccagggagctggagctggtgatagctggcaccgcggaaatcgacctaaatgactggcggaataacactgagtaccggggaggttaccacgatgggcatcttgtgatccgctggttctgggctgcggtggagcgcttcaataatgagcagaggctgagattactgcagtttgtcacgggaacatccagcgtgccctacgaaggcttcgcagccctccgtgggagcaatgggcttcggcgcttctgcatagagaaatgggggaaaattacttctctccccagggcacacacatgcttcaaccgactggatcttccaccgtatccctcgtactccatgttgtatgaaaagctgttaacagcagtagaggaaaccagcacctttggacttgagtgaggacatggaacctcgcctgacattttcctggccagtgacatcacccttcctgggatgatccccttttccctttcccttaatcaactctcctttgattttggtattccatgatttttattttcaaaccaaatcaggattgacaaaagctgtgcatgaagaactgccttcttctaagatctaaccttcaggcttctctcctctgttttcaatgaactgctagcctgtatgcaatattaaaaaacagctgtctcaaggtctgtgtatatctccacatacctccattactaacaatgaaatatgaatgcaagttaagctacacttgaccaaatggtaataaatgtttacttccatttctatcattgaagggaaaatgtgagcattaagcactccaggctttcatatgcccatgtcttctgagcagagccaccattttttataatttctaataaccaactccagaactaggagctgatcaactctttgttttcctctccatctacttttccctgtgcataatatccatccaaaggacaacagtggcaaagctgaaatttttatacattcaactcatgattcacatgtggcatcagtcccatcagccggaactagcctagacatacggtgcaaatatgacacttctaacgattaacaacagcaagaaaacacctgctgctgatgcaatgcaatgcatcccaatggttgtggggattgtgggctcaactcaagagaagtttaggagggggagcatccctagtgaatactcacaccacaagaaggacaaacttgtgcacatgtccaagaaagaaagcttcttgattgaggtagcatgaaggatgaggcttcagcccccattgtcttatgtagaatgtggcaatgccaactggagaaagggaagaaggacatattaccttggtttgaatccctgagttctgtactgttctgttttgtttagtctagccacagttcttcacaaaggaaaaaaaaatgtgtagatgataccatgacttttgttaaagccatgacttttgtttgcttggcagacaaaccctttttttaaaactttgatatttttttttcacattttttttccttttcctttcttaatcatggagttcaagttcctttgcattcgattgtccatcgggaccacactaggaagctgcagagagtgatggtgcttgttagggatcaagggcaacatagtacttctccttcacccatagtaatcctcctggggcagaaacataacaccccaaaggcacgttgatttgtatcaaaataaatatccagtttcttttagcattcagtgaaaacatatctcagaaaacttcatgttgtcagaaaaacagctgcaggctccaaagacagcctaacctctcaactacatttgaaataaacccaaccataatggtnannnnnnan

SEQ ID NO: 60765 - DNA, 2687 bp, Homo sapiens
  misc_feature (2678)..(2678): n is a, c, g, or t
  misc_feature (2680)..(2685): n is a, c, g, or t
  misc_feature (2687)..(2687): n is a, c, g, or t
tgccagaggatccctggctatcatcggcacccagctgtgggagtggaagctgatggctgttaagaatttgctgtcattgagatttgggggcatcaagtatgtgattgtagtgttgagacattcagcttcaccattagggacaacctaggacattttccttttatttccattatgcctcttgagtataggaaacttgtttcctctgtataaaacaaaaactgtagcctttccaaggtgcttagcaatctgcttagaggtcgggtgcagtggctcccaatactttggagttgggaggatcagttaaggccaggagttcaagactagcctgggcaacatagaccacattctaccaaaaaaaaaagaagaagaagaagaaagaaaaaaaattaaccaggcggagtggggctggtcggtggtcccagctactcaggaggctgaggcaggagggtcattggcccccaggaatgcagggctgcaataagctatgattgcaccactgtgctccaatctgcttagaacagccagagctcttttagtgacctttagcaaggaaaaaagactccagggataataatgctgaataatgccctgtagaggatttttggcatacggtcatccccctaaaatcagtgtgcctccctgagagataagcagaactgacaagcatcgcaatatttctgttttcctacaaggtcacggaaagggagttgaagtctggaggagccaacacacaggtgacggagaaaaacaagaaggagtacatcgagcgcatggtgaagtggcgggtggagcgcggcgtggtacagcagaccgaggcgctggtgcgcggcttctacgaggttgtagactcgaggctggtgtccgtgtttgatgccagggagctggagctggtgatagctggcaccgcggaaatcgacctaaatgactggcggaataacactgagtaccggggaggttaccacgatgggcatcttgtgatccgctggttctgggctgcggtggagcgcttcaataatgagcagaggctgagattactgcagtttgtcacgggaacatccagcgtgccctacgaaggcttcgcagccctccgtgggagcaatgggcttcggcgcttctgcatagagaaatgggggaaaattacttctctccccagggcacacacatgcttcaaccgactggatcttccaccgtatccctcgtactccatgttgtatgaaaagctgttaacagcagtagaggaaaccagcacctttggacttgagtgaggacatggaacctcgcctgacattttcctggccagtgacatcacccttcctgggatgatccccttttccctttcccttaatcaactctcctttgattttggtattccatgatttttattttcaaaccaaatcaggattgacaaaagctgtgcatgaagaactgccttcttctaagatctaaccttcaggcttctctcctctgttttcaatgaactgctagcctgtatgcaatattaaaaaacagctgtctcaaggtctgtgtatatctccacatacctccattactaacaatgaaatatgaatgcaagttaagctacacttgaccaaatggtaataaatgtttacttccatttctatcattgaagggaaaatgtgagcattaagcactccaggctttcatatgcccatgtcttctgagcagagccaccattttttataatttctaataaccaactccagaactaggagctgatcaactctttgttttcctctccatctacttttccctgtgcataatatccatccaaaggacaacagtggcaaagctgaaatttttatacattcaactcatgattcacatgtggcatcagtcccatcagccggaactagcctagacatacggtgcaaatatgacacttctaacgattaacaacagcaagaaaacacctgctgctgatgcaatgcaatgcatcccaatggttgtggggattgtgggctcaactcaagagaagtttaggagggggagcatccctagtgaatactcacaccacaagaaggacaaacttgtgcacatgtccaagaaagaaagcttcttgattgaggtagcatgaaggatgaggcttcagcccccattgtcttatgtagaatgtggcaatgccaactggagaaagggaagaaggacatattaccttggtttgaatccctgagttctgtactgttctgttttgtttagtctagccacagttcttcacaaaggaaaaaaaaatgtgtagatgataccatgacttttgttaaagccatgacttttgtttgcttggcagacaaaccctttttttaaaactttgatatttttttttcacattttttttccttttcctttcttaatcatggagttcaagttcctttgcattcgattgtccatcgggaccacactaggaagctgcagagagtgatggtgcttgttagggatcaagggcaacatagtacttctccttcacccatagtaatcctcctggggcagaaacataacaccccaaaggcacgttgatttgtatcaaaataaatatccagtttcttttagcattcagtgaaaacatatctcagaaaacttcatgttgtcagaaaaacagctgcaggctccaaagacagcctaacctctcaactacatttgaaataaacccaaccataatggtnannnnnnan

SEQ ID NO: 60766 - DNA, 2618 bp, Homo sapiens
gtccagaagccagtgatctattctggaagccaggttgctgtccccctgatagagaagctcctcttcattcagatgatgaggagatttccctgagtaccgagcctgagtcagcccaaattcaggacagccccatgaacaacctgatggaaagcggcagtggggaacctcggtctgaggcaccagagtcctctgagagctggaagccagagcagctgggtgagggcagtgtccccgatcgtccagggaaccaaagcatagagctttccagaccagctgaggaagcagcagtcatcacggaggcaggagaccagggcatggtctctgtgggacctgaaggggctggggagctcctggcccaggtgcaaaaggacatccagcctgcccccagtgcagaagagctggccgagcagctggacctgggtgaggaggcatcagcactgctgctggaagacggtgaagccccagccagcaccaaggaggagcccttggaggaggaagcaacgacccagagccgggctggaagggaagaagaggagaaggagcaggaggaggagggagatgtgtccaccctggagcagggagagggcaggctgcagctgcgggcctcggtgaagagaaaaagcaggccctgctccttgcctgtgtccgagctggagacggtgatcgcgtcagcctgcggggaccccgagaccccgcggacacactacatccgcatccacaccctgctgcacagcatgccctccgcccagggcggcagcgcggcagaggaggaggacggcgcggaggaggagtccaccctcaaggactcctcggagaaggatgggctcagcgaggtggacacggtggccgctgacccgtctgccctggaagaggacagagaagagcccgagggggctactccaggcacggcgcaccctggccactccgggggccacttccccagcctggccaatggcgcggcccaggatggcgacacgcaccccagcaccgggagcgagagcgactccagccccaggcaaggcggggaccacagttgcgagggctgtgacgcgtcctgctgcagcccctcgtgctacagctcctcgtgctacagcacgtcctgctacagcagctcgtgctacagcgcctcgtgctacagcccctcctgctacaacggcaacaggttcgccagccacacgcgcttctcctccgtggacagcgccaagatctccgagagcacggtcttctcctcgcaagacgacgaggaggaggagaacagcgcgttcgagtcggtacccgactccatgcagagccctgagctggacccggagtccacgaacggcgctgggccgtggcaagacgagctggccgcccctagcgggcacgtggaaagaagcccggaaggtctggaatcccccgtggcaggtccaagcaatcggagagaaggtgaatgtcctatactccataattcccagccagtaagccagcttccttccctgaggcctgaacatcatcactacccaacaatcgatgagcctcttccaccaaactgggaagctcgaattgacagccacgggcgggtcttttatgtggaccacgtgaaccgcacaaccacctggcagcgtccgacggcagcagccaccccggatggcatgcggagatcggggtccatccagcagatggagcaactcaacaggcggtatcaaaacattcagcgaaccattgcaacagagaggtccgaagaagattctggcagccaaagctgcgagcaagccccagcaggaggaggcggaggtggagggagtgactcagaagccgaatcttcccagtccagcttagatctaaggagagaggggtcactttctccagtgaactcacaaaaaatcaccttgctgctgcagtccccagcggtcaagttcatcaccaaccccgagttcttcactgtgctacatgccaattatagtgcctaccgagtcttcaccagtagcacctgcttaaagcacatgattctgaaagtccgacgggatgctcgcaattttgaacgctaccagcacaaccgggacttggtgaatttcatcaacatgttcgcagacactcggctggaactgccccggggctgggagatcaaaacggaccagcagggaaagtcttttttcgtggaccacaacagtcgagctaccactttcattgacccccgaatccctcttcagaacggtcgtcttcccaatcatctaactcaccgacagcacctccagaggctccgaagttacagcgctggagaggtaaccctccctacaccccgccctactgttcaccggtcacagtctctgcctcttccatgggagcagaacagttcttcagtggctaggatctagggttgcctgcgctggaagagattaagccatatgcaccctgctttgtagaagaatgatgaccgggacacccacttaacaccccagagctgtcttcagttaccttttctgccttgccttttgtcccacacaatcaccactactaaaaacctgtctagttgaaaggaaactgaaaatgcactgtcaggagatccctacacttatggctggagctgtgcctcctgaggcctgtcatgtgtgaatacatggaactgccatggtatgtct

SEQ ID NO: 60767 - DNA, 519 bp, Homo sapiens
gctttttttcactggtctgttcgcagtcttttttcgtggaccacaacagtcgagctaccactttcattgacccccgaatccctcttcagaacggtcgtcttcccaatcatctaactcaccgacagcacctccagaggctccgaagttacagcgctggagaggtaaccctccctacaccccgccctactgttcaccggtcacagtctctgcctcttccatgggagcagaacagttcttcagtggctaggatctagggttgcctgcgctggaagagattaagccatatgcaccctgctttgtagaagaatgatgaccgggacacccacttaacaccccagagctgtcttcagttaccttttctgccttgccttttgtcccacacaatcaccactactaaaaacctgtctagttgaaaggaaactgaaaatgcactgtcaggagatccctacacttatggctggagctgtgcctcctgaggcctgtcatgtgtgaatacatggaactgccatggtatgtctg

SEQ ID NO: 60768 - DNA, 348 bp, Homo sapiens
ccaactacattgtggaaaagagagacgtcaggcgaaaaggctggcaaacagtggataccactgtcaaggacaccaagtgcacagtcaccccactgactgagggctctttatatgtgttccgagttgctgcagaaaatgctataggacaaagcgactacaccgaaattgaggactctgtgctggccaaagacacctttaccactcctggaccaccctacgccctggcagtggttgatgtgacaaaacgacatgttgacctaaagtgggagccacctaaaaatgatggtggaagaccaatacagagatatgtcattgagaagaaagaaaggttaggtacccgttgggtga

SEQ ID NO: 60769 - DNA, 961 bp, Homo sapiens
gcctggcaataggacttagtgtacagacccctggattaggatagcatctgcatatagtaggtacaaaggaataattttttcccccagaaataactggaaactctataattgttatgttgattattgtgtttaaatctaattaaggtattttgttttcctttttacataagaacataactttctgcaataaaatactagcttatatcagttagacttaatttactctgtgcccttaccctaggtagacacttgaattagctttcatatactcatttcagagtttttttaaaaatgatttattattattattttaaatagagacagggtctccctatgttgcccatgctggttttgaactcctgggctcaagtgatcctcctgccttgtcctcccaaaatattgggattataggtgtgagccaccacacccaacctcatttcagagttttaagggaatttcagagtttctttattttacatatgaaatccctgaggctcatgagtaaaatgatttataggaatctgaatccaggctttatgatttgtactcatgtcagtaactcatatgaggaataaaactaaacatttaatttaatgtgtatttgttcattttatttattttactctttctgattcttatgtaatcattaacttgctcattttaattgctagattttacttaaacaatttcagctagaaatatatttcatttggaagattaggctgtggtggtatgatatttttccatttctgatgagactgtttttatcccacacatttaagtgataggttgtttttaatgttttaaaacagaaaaggattagagtattttacttgggctagtaagaatgaaaataaatcagctcaaagagtcagaatagtaaatatactataatctgaagagaaaaaagtcagaatgcaaaaagcacaaaagtagctgtccctctgccccaagaaaaaga

SEQ ID NO: 60770 - DNA, 568 bp, Homo sapiens
cacaacaccctaggctcactgaatattctattactcactcttactgcccaagaactatcaaactcctgagccaataacttaatatggctagcgtacacaatagcttttatagtaaaaatacctctttacggtctccacctatggctccctaaagcccatgtcgaagcccccatcgctgggtcaatagtacttgccgcagtactcttaaaactaggcggctatggtataatacgcctcacactcattctcaaccccctgacaaaacacatagcctaccccttccttgtactatccctgtgaggcataattataacaagctccatctgcctgcgacaaacagacctaaaatcgctcattgcatactcttcaatcagccacatagccctcgtagtaacagccattctcatccaaaccccctgaagcttcaccggcgcagtcattctcataatcgcccacggacttacatcctcattactattctgcctagcaaactcaaactacgaacgcactcacagtcgcatcataatcctctctcaaggacttcaaaccctactcccactaatagcct

SEQ ID NO: 60771 - DNA, 431 bp, Homo sapiens
aaccagaatgggagaagagctagttatgagctcttgaactttcatggtgaggacaccatttcctctgcccttgggcttaagtgacagtttacaaaccagattttttatctatgactctttcatgaccatatgacgatcatttcaagctcaggaagtttcctaagcctcagtgatctaaggagtgccattgatttgtgatgtggagactttgctcattcacctccttggtccaattcatacatttaagcatcagctcgtccctgagcggagatgctttctccagctccttgcagccatgtggcagagggtgactcccagtactgcttcctgatctacagatccccatggatgtccctggcttctttagaaattttctttacaagaggccacagtggaagatagtggtaagacttacttagacctacagcatc

SEQ ID NO: 60772 - DNA, 95 bp, Homo sapiens
  misc_feature (20)..(20): n is a, c, g, or t
  misc_feature (29)..(29): n is a, c, g, or t
gtgagggctgtggttggggntcagcttcnttcttaaatcgttccttgaacctttaccctattctgtgcactgtgccgatttccagggattggaag

SEQ ID NO: 60773 - DNA, 214 bp, Homo sapiens
taaccccgctccctacccctgaaccatcacaactatcatgtcacatgcacgggtttcttttcaccattgcatttgtcttatttgatttctgtgtttatgtatttgttgtccatcctccaagtgacagagggagtggatggagtgaaggataagttttgtcctgttcactgcccagcatcaagaaaagtgcttggaactgagtagatagtcaaca

SEQ ID NO: 60774 - DNA, 484 bp, Homo sapiens
  misc_feature (13)..(13): n is a, c, g, or t
  misc_feature (30)..(30): n is a, c, g, or t
gctgcgctcggtnaactcggcgagcccttnaggtcatcttctgcaatcgcagtccgcgcgtcgtgctgcccgtatggctcaacttcgacggcgagcccaggcagccctacccaacgctgccgcctggcacgggccgccgcatccacagctaccgaggtacgggcccggcgcttaggcccgacccagcagggacgatagcacggtctgaagcccctctaccgccccggggtccattttgcagacggggaactgaggccccttgaggcaggacacatccagggtgacgctgctcgtaagcgacagagcgagactgcatctcaaaaaaaaaaaaaagaaaaagaaaagaaaattctggtataatttacatacagtaaaatgcacagatcttagggtttgatgagttttctctcgacatgtttttgcactccagcctgcgcagcaggagtgaaattccatctcataaagataccaaaaaaacaaaaaa

SEQ ID NO: 60775 - DNA, 584 bp, Homo sapiens
  misc_feature (13)..(13): n is a, c, g, or t
  misc_feature (30)..(30): n is a, c, g, or t
gctgcgctcggtnaactcggcgagcccttnaggtcatcttctgcaatcgcagtccgcgcgtcgtgctgcccgtatggctcaacttcgacggcgagcccaggcagccctacccaacgctgccgcctggcacgggccgccgcatccacagctaccgaggtcacctttggctcttcagagatgcagggacacacgatgggcttctggttaaccaaactgaattatttgtgccatctctcaatgttgacggacagcctatttttgccaatatcacactgccagtgtatactctgaaagagcgatgcctccaggttgtccggagcctagtcaagcctgagaattacagggagactggacatcgtcaggtcgctctacgaagatctggaagaccacccaaatgtgcagaaagacctgggagcggctgacacaggagcgcattgcacatcaacggatggggagattgaagatttctgttgaaactttacactgtttcatctcagcttttgatggtactgatgagtcttgatctagatacaggactggttccttccttagtttcaaagtgtctcattctcagagtaaaatag

SEQ ID NO: 60776 - DNA, 461 bp, Homo sapiens
  misc_feature (13)..(13): n is a, c, g, or t
  misc_feature (30)..(30): n is a, c, g, or t
gctgcgctcggtnaactcggcgagcccttnaggtcatcttctgcaatcgcagtccgcgcgtcgtgctgcccgtatggctcaacttcgacggcgagcccaggcagccctacccaacgctgccgcctggcacgggccgccgcatccacagctaccgagtgtatactctgaaagagcgatgcctccaggttgtccggagcctagtcaagcctgagaattacagggagactggacatcgtcaggtcgctctacgaagatctggaagaccacccaaatgtgcagaaagacctgggagcggctgacacaggagcgcattgcacatcaacggatggggagattgaagatttctgttgaaactttacactgtttcatctcagcttttgatggtactgatgagtcttgatctagatacaggactggttccttccttagtttcaaagtgtctcattctcagagtaaaatag

SEQ ID NO: 60777 - DNA, 1249 bp, Homo sapiens
cgtgtgtctacacacattcaagaatagtcacctacttctatatctatttatatacatacgtattgaaaactttgagttcacattgacaccttcaattcaatcctttgaggttaatctagtctccctttccatctttgtaacttccttctctcatagaaacctgactcccataatcctaaataatttgttcattcttcctccctccctcaacctcttgacatgccagctgctgtctcatcacacccagtcccaaatatgccaaataaatccgcagtcatagcagcgctggtcctgaccacaccaatccctaacatcctccccagcctggagcctggaccatggcagctgaatctttgaccccagtgatgtcagtcctgagcacaccattggaatcctaggctcctgtcatctggctggaagagagacaaattcacaaccttttgataatgagcaattattgaatactcactgaatttatcagagaaagtttaaaagtgtacgattatacatatttaccaggaatgtttaaacatagacatttatgaaatttatagaaaatattgaattgtggttctcactttttggtcttggctgtaacaatttttaaatattaatacttcctacaataactgtatcatgctatttttaagtgtcctcacactcaaccaatctactctgcatccataaaataagcatgcagttcagaaaatagattaaacgactaattggctatgcttctgagttacaagttttatttgagttcatcttcagctttaaacaattaacaaaaagctgtacatgacatgaaaacctgtctcagatttctggatgcagtcatgcccattcgttacaggatattgtaagtcttccttttatagtgttgacagtactggaaatgagatgaatagtgaccgttaccaatgaggcattgctcattgataagtgaatacagcactgaaatttaaaaatcaggccgggcatagtggttcatgcctgtaatcccagcactttgggaggtcaaggcgggtggatcacgaggtcaggagttcaagaccagcctgaccaacatggtgaaaccccgtctctactaaatatacaaaaattagccaggcgtagtagtgtgtgcctgtaatcccagctattcaggaggctgaggcaggagaattgcttgaacttgggaggcagaggttgcagtgagccgagatcacaccactgcactccagcctgggtgacagagtgagactctgtc

SEQ ID NO: 60778 - DNA, 436 bp, Homo sapiens
actaaagaaaaatatgcttatttccccaattttctagttatgggtactcaatggtggttatcccgtatctgcaatttgctatcttgtagttagaagtcaagccaatcccaagacacaagagtagaatgttgtaaattttttggacctcagagattcttgtaatattggaagattcttttttttccatcttaatgccatttcagtagtatattgctatcatatatgtatatatgattagaatcagggacagcagtgtaagttggagtaacttttaaagggagaaaggactgggttaataattatatctaaagaatttagagaagcaaagaaggaccatttattagatattcagcaatactcgttaccttactaaagatataagtggaaaatcccttaggtatgagctgagaggagtgttaaaaaaaaaaaagaaaga

SEQ ID NO: 60779 - DNA, 428 bp, Homo sapiens
aaaaaaatcctgtaaaaaagattgtatatggaaaagcatgtgcattaaaaagaaaaatggaggcatgtccagtcttccctctgcctggattattctcaaccatcccccagctgccccacaacacagtcacaagcggaatctctacccatttttccaaagttaattcaaattttttcccttatattacattatataaagcttttctagaaattctacaccagacaaagctactctgtatctctacctccatcacagcatttacattctatattgaaattatttcttggtatgtttgccttcatgaagctaattaagacttcatgagtcttaattagctctgtagactgatcatctaccatagtgtttggcattcaacagatgctcaattaacatttttgagtgatagattgatttcacacctttacttt

SEQ ID NO: 60780 - DNA, 415 bp, Homo sapiens
taactcattaatgttttttagtctcttaaataacattaaaattgtctcagagtctctagtatatttaacaattatataaagaaaaaaaaagagttgttcatcctgccattcagtaaatacctgctgacaccttattggccaaatgtgccagatgcagggatgtgaaatataccccatgtctgctttcacaaagcttccaaagtagtgataaagagaaagagagtgaaagacatgggaaaacatatctttgtgttttatttgatgattatcattctgtgtctattatttgtttgaatattagtttacccccatttctttaactggagtgagaggaatggactatatcttcttattctttttatcttcttgggacctaggagaatgccttaataaatacgtgtggaatccactgcaa

SEQ ID NO: 60781 - DNA, 146 bp, Homo sapiens
aaaaaactgaaacaaaataggaggcaataaacaaaaataatatcacacataaataagaaacaaaacaaagcaagaaacattgtagagttatttagtaagaccactaggtagtttatgggaagattcatatattagttgagtcttag

SEQ ID NO: 60782 - DNA, 367 bp, Homo sapiens
tgtcattggtttattgggatggttttccattgtatccagcactgatgggctcttttcttatttctggaagtctgtgtgccaccgttgtatttttttgtgcgtcagaacgtcaacttcataagcttaaaatactcgtcagagagccatatagaagtgtgtaattgaacacaaaatcatagaataagtttgacctggaaaccataaaactccttcctagtgacattttacagctggtccatttaaagagacatccttcattcccaataaattattctgccctaaaaataatgcttatgctttggtaaggtgctgttagctaccttacagccctcattgtctactagttgggacaaagaacgaaaaagta

SEQ ID NO: 60783 - DNA, 380 bp, Homo sapiens
ggtagaggttgcagtaagccgagatcacgccactgcactccatcctgggcgacagagcaagactccatcccccccaaaaaaacaaaacctggacagagtggccccctgcaggccccccgcttcttggggctggagcaagtgttcttatagatgtctctggtcgtcttggccactggctcggagacagccaccgagacccggcatttggagcagctggctgggatgctgcagggaggggtgtccaagcaggaggcagccaagcctgcctggagcaggataagatgagctcccctctgagactcagtattttctgttcaatgaaaggaacagtccagtatttgagacaggagaaccggaattgacttgactggtctgtggtg

SEQ ID NO: 60784 - DNA, 376 bp, Homo sapiens
ttacagcttcatagtactataaaacagattatcaataaattgcttattaacttatgggtagaaatttagatagttgtttgtgttttctgattctagaccatcccaccatgagcaagtctatgtatctgttgtgcctgtgtgagtttctctataaagcatagatctcaaaagatggaattatagtgtaaaattttaaatttggttagaaattgactaattgccttccaaaaatatttaagaatatgtaagactacctgttttccatagagttatcatagctgaacagaaccaatcataaagcttttacaaatttgttggtaaaataagtgacttcattgtctgaatttataatccatgattattggtgaagctgggc

SEQ ID NO: 60785 - DNA, 586 bp, Homo sapiens
  misc_feature (399)..(399): n is a, c, g, or t
  misc_feature (526)..(526): n is a, c, g, or t
  misc_feature (554)..(554): n is a, c, g, or t
  misc_feature (561)..(561): n is a, c, g, or t
  misc_feature (586)..(586): n is a, c, g, or t
gccatggatgaaggctcagaagcatcctcctgctcatctgctttggctaccttccagcataactaggaacattattagatttagtaatacataatttaaattctaaagtttaccattgttttgtctttttatggttatgggtgactatgtcatgaccaattgtcatttcataatctagagatttctttaaaacatgactatttctgttggatgtacatgtgtaagataggaaaactgccatttacatccattgtgtgcattatttgccctcatctccccaaacagaccaaaacaaaaaaccccaagaaatggatttgtcttatctttgtagtttatataccatggtataatgtaattttcaaattcatagcgtaacttacttgtttccataagcaaagntgtatgtaaactgtgtatcagtgcttctagtaatcttgctattgtcttggtactgaaattttagaccaatataatttgccaggaatcctttgtatgctaaacataactacataaaaatatgaaaaanattggtaacaatatattaccattacatngtttcanaacaattcaaataaattcaaagtcn

SEQ ID NO: 60786 - DNA, 519 bp, Homo sapiens
  misc_feature (39)..(39): n is a, c, g, or t
  misc_feature (43)..(43): n is a, c, g, or t
  misc_feature (47)..(47): n is a, c, g, or t
  misc_feature (51)..(52): n is a, c, g, or t
  misc_feature (59)..(59): n is a, c, g, or t
  misc_feature (63)..(63): n is a, c, g, or t
  misc_feature (478)..(478): n is a, c, g, or t
  misc_feature (480)..(480): n is a, c, g, or t
  misc_feature (483)..(483): n is a, c, g, or t
  misc_feature (498)..(498): n is a, c, g, or t
aacctccattctgctggaattatcaccagagatttaaanccangtancatnntagtcangtcngattgcacattgaaaatcctggactttggactggccaggacagcaggcacaagcttcatgatgactccatatgtggtgacacgttattacagagcccctgaggtcatcctggggatgggctacaaggagaacggagagtaaagatagaagcaaaaagttggaacttttaaacttgaaccctaagcaaaaatagtaaaatgtcttgacaaatcagagaatcttatgaaattgtcattgatgactgaagtttaactactttcccacattcaaactatctttgcattttgagaaacatcgtgggggtttcttggtggttgatatgatctagatgatatcacagggaattgtcttggttactgaattagaatgttggcaaaataaaattgaacaaaataaacaaggatgcggctcggcncntcnttttctttcacacancacggacgcatctcccccacg

SEQ ID NO: 60787 - DNA, 861 bp, Homo sapiens
  misc_feature (39)..(39): n is a, c, g, or t
  misc_feature (43)..(43): n is a, c, g, or t
  misc_feature (47)..(47): n is a, c, g, or t
  misc_feature (51)..(52): n is a, c, g, or t
  misc_feature (59)..(59): n is a, c, g, or t
  misc_feature (63)..(63): n is a, c, g, or t
  misc_feature (820)..(820): n is a, c, g, or t
  misc_feature (822)..(822): n is a, c, g, or t
  misc_feature (825)..(825): n is a, c, g, or t
  misc_feature (840)..(840): n is a, c, g, or t
aacctccattctgctggaattatcaccagagatttaaanccangtancatnntagtcangtcngattgcacattgaaaatcctggactttggactggccaggacagcaggcacaagcttcatgatgactccatatgtggtgacacgttattacagagcccctgaggtcatcctggggatgggctacaaggagaacggagagtaaagatagaagcaaaaagttgggacttcctaccaacaactgagcagtcagataacctctcaaactatgactatcagacacaaggctgagggctgattcaagttatttatcggcagaagaattacacaattttaagcatattgaaattagtctaacatttattggaagaaatatcaaagctaagtatatgctaattgataccttgactacttccaggactctgcagaaatttcaaaaaacaatcagaggttctcatgtctttcacctagaattattcagagtaatttatattaaattactttgaggctgaaaaatgatgtgataatactatcataataatcaacatttttcttctctcttcacagaacttttaaacttgaaccctaagcaaaaatagtaaaatgtcttgacaaatcagagaatcttatgaaattgtcattgatgactgaagtttaactactttcccacattcaaactatctttgcattttgagaaacatcgtgggggtttcttggtggttgatatgatctagatgatatcacagggaattgtcttggttactgaattagaatgttggcaaaataaaattgaacaaaataaacaaggatgcggctcggcncntcnttttctttcacacancacggacgcatctcccccacg

SEQ ID NO: 60788 - DNA, 150 bp, Homo sapiens
acagggaattgtcttggttactgaattagaatgttggcaaaataaaattgaacaaaataaacaatacatatttgcttttccacttattaatttgctaattactttaatatccagaggatcacttcttaatacttatttttcttgtgtaaa

SEQ ID NO: 60789 - DNA, 714 bp, Homo sapiens
atatattttatgaatttatactttttcctgagatttcaggagggaaaaatgagtaggagatgactgagagcttaaagtttgggagtgtcaattaactcagcattcttttaaaaaacatgtgtcatatattacagcatattcttttatttgaagtgagtaaatgtatctttttaaattccttagtaatttttgagcactccatatgtataaagcatgtgaatatttggtagcattttacaaatgtccagagatttgtgagagttcctgagatcttcatagggggcccacaaagtttagtattacttttcacggtaatactaaagtgtattttgcctctttttactttttctcttaatagcatacagtggtaactgaaggctaatagtatgtgtgtttatgtgctttaaaaagttcgtggttttggccaggcgcagtggctcagacctgtaatcccagcactttgggaggctgaggcaggtggatcacctgaggtcaggagttcaagaccaaaaccagcctggccaacatggtgaaaccccatctctactaaaaatacaaaaattagccaggcatggtagtgggtgcctgtagtctcagctactcgagatgctgaggcaggagaatcacttgaagctgggaggtggaggttgcagtgagccaaaatctcgccattacactccagcctgggggacaagagcaagactccatctcaaa

SEQ ID NO: 60790 - DNA, 362 bp, Homo sapiens
atatcattattacatggtatggttgatgtacgttttggcccaaatttctgtggaaacatgacttaccaaatgactttaccactgtgcccatttgtgtagcacagatggggatgcaaatagcagtatgagagagcgagttaccatcgtgcatctgcctttagtgaccatggaacatcacataaacaaacacataggcagcaaccagtctacattttaaataaaatatctttgccttttaaaaaataaataaccttttatttgttggtagattttagttacatttaataataatataaacacagaaagcctaggagaccaatgaattttataagcacaactatcatctttggggcaatggtttg

SEQ ID NO: 60791 - DNA, 120 bp, Homo sapiens
actgggggctccctggaggggcagggggcctgtcctatcctgttcacatcagcatccccacacagacccaatgcaagagctgatgcttttaagaagtgtttgcagaaggaagaaatgaag

SEQ ID NO: 60792 - DNA, 5389 bp, Homo sapiens
aacccagtccccagtgggccgccatgttgtgggagtgaaaggtaagggggagcgagagcgccagagagagaagatcggggggctgaaatccatcttcatcctaccgctccgcccgtgttggtggaatgagcgttgcatgtgtcttgaagagaaaagcagtgctttggcaggactctttcagcccccacctgaaacatcaccctcaagaaccagctaatcccaacatgcctgttgttttgacatctggaacagggtcgcaagcgcagccacaaccagctgcaaatcaggctcttgcagctgggactcactccagccctgtcccaggatctataggagttgcaggccgttcccaggacgacgctatggtggactacttctttcagaggcagcatggtgagcagcttgggggaggaggaagtggaggaggcggctataataatagcaaacatcgatggcctactggggataacattcatgcagaacatcaggtgcgttccatggatgaactgaatcatgattttcaagcacttgctctggagggaagagcgatgggagagcagctcttgccaggtaaaaagttttgggaaacagatgaatccagcaaagatggaccaaaaggaatattcctgggtgatcaatggcgagacagtgcctggggaacatcagatcattcagtttcccagccaatcatggtgcagagaagacctggtcagagtttccatgtgaacagtgaggtcaattctgtactgtccccacgatcggagagtgggggactaggcgttagcatggtggagtatgtgttgagctcatccccgggcgattcctgtctaagaaaaggaggatttggcccaagggatgcagacagtgatgaaaacgacaaaggtgaaaagaagaacaagggtacgtttgatggagataagctaggagatttgaaggaggagggtgatgtgatggacaagaccaatggtttaccagtgcagaatgggattgatgcagacgtcaaagattttagccgtacccctggtaattgccagaactctgctaatgaagtggatcttctgggtccaaaccagaatggttctgagggcttagcccagctgaccagcaccaatggtgccaagcctgtggaggatttctccaacatggagtcccagagtgtccccttggaccccatggaacatgtgggcatggagcctcttcagtttgattattcaggcacgcaggtacctgtggactcagcagcagcaactgtgggactttttgactacaattctcaacaacagctgttccaaagacctaatgcgcttgctgtccagcagttgacagctgctcagcagcagcagtatgcactggcagctgctcatcagccgcacatcggtttagctcccgctgcgtttgtccccaatccatacatcatcagcgctgctcccccagggacggacccctacacagctggattggctgcagcagcgacactaggcccagctgtggtccctcaccagtattatggagttactccctggggagtctaccctgccagtcttttccagcagcaagctgccgctgccgctgcagcaactaattcagctaatcaacagaccaccccacaggctcagcaaggacagcagcaggttctccgtggaggagccagccaacgtcctttgaccccaaaccagaaccagcagggacagcaaacggatccccttgtggcagctgcagcagtgaattctgcccttgcatttggacaaggtctggcagcaggcatgccaggttatccggtgttggctcctgctgcttactatgaccaaactggtgcccttgtagtgaatgcaggcgcgagaaatggtcttggagctcctgttcgacttgtagctcctgccccagtcatcattagttcctcagctgcacaagcagctgttgcagcagccgcagcttcagcaaatggagcagctggtggtcttgctggaacaacaaatggaccatttcgccctttaggaacacagcagcctcagccccagccccagcagcagcccaataacaacctggcatccagttctttctacggcaacaactctctgaacagcaattcacagagcagctccctcttctcccagggctctgcccagcctgccaacacatccttgggattcggaagtagcagttctctcggcgccaccctgggatccgcccttggagggtttggaacagcagttgcaaactccaacactggcagtggctcccgccgtgactccctgactggcagcagtgacctttataagaggacatcgagcagcttgacccccattggacacagtttttataacggccttagcttttcctcctctcctggacccgtgggcatgcctctccctagtcagggaccaggacattcacagacaccacctccttccctctcttcacatggatcctcttcaagcttaaacctgggaggactcacgaatggcagtggaagatacatctctgctgctccaggcgctgaagccaagtaccgcagtgcaagcagcgcctccagcctcttcagcccgagcagcactcttttctcttcctctcgtttgcgatatggaatgtctgatgtcatgccttctggcaggagcaggcttttggaagattttcgaaacaaccggtaccccaatttacaactgcgggagattgctggacatataatggaattttcccaagaccagcatgggtccagattcattcagctgaaactggagcgtgccacaccagctgagcgccagcttgtcttcaatgaaatcctccaggctgcctaccaactcatggtggatgtgtttggtaattacgtcattcagaagttctttgaatttggcagtcttgaacagaagctggctttggcagaacggattcgaggccacgtcctgtcattggcactacagatgtatggctgccgtgttatccagaaagctcttgagtttattccttcagaccagcagaatgagatggttcgggaactagatggccatgtcttgaagtgtgtgaaagatcagaatggcaatcacgtggttcagaaatgcattgaatgtgtacagccccagtctttgcaatttatcatcgatgcgtttaagggacaggtatttgccttatccacacatccttatggctgccgagtgattcagagaatcctggagcactgtctccctgaccagacactccctattttagaggagcttcaccagcacacagagcagcttgtacaggatcaatatggaaattatgtaatccaacatgtactggagcacggtcgtcctgaggataaaagcaaaattgtagcagaaatccgaggcaatgtacttgtattgagtcagcacaaatttgcaagcaatgttgtggagaagtgtgttactcacgcctcacgtacggagcgcgctgtgctcatcgatgaggtgtgcaccatgaacgacggtccccacagtgccttatacaccatgatgaaggaccagtatgccaactacgtggtccagaagatgattgacgtggcggagccaggccagcggaagatcgtcatgcataagatccggccccacatcgcaactcttcgtaagtacacctatggcaagcacattctggccaagctggagaagtactacatgaagaacggtgttgacttagggcccatctgtggcccccctaatggtatcatctgaggcagtgtcacccgctgttccctcattcccgctgacctcactggcccactggcaaatccaaccagcaaccagaaatgttctagtgtagagtctgagacgggcaagtggttgctccaggattactccctcctccaaaaaaggaatcaaatccacgagtggaaaagcctttgtaaatttaattttattacacataacatgtactattttttttaattgactaattgccctgctgttttactggtgtataggatacttgtacataggtaaccaatgtacatgggaggccacatattttgttcactgttgtatctatatttcacatgtggaaactttcagggtggttggtttaacaaaaaaaaaaagctttaaaaaaaaaagaaaaaaaggaaaaggtttttagctcatttgcctggccggcaagttttgcaaatagctcttccccacctcctcattttagtaaaaaacaaacaaaaacaaaaaaacctgagaagtttgaattgtagttaaatgaccccaaactggcatttaacactgtttataaaaaatatatatatatatatatatatataatgaaaaaggtttcagagttgctaaagcttcagtttgtgacattaagtttatgaaattctaaaaaatgccttttttggagactatattatgctgaagaaggctgttcgtgaggaggagatgcgagcacccagaacgtcttttgaggctgggcgggtgtgattgtttactgcctactggatttttttctattaacattgaaaggtaaaatctgattatttagcatgagaaaaaaaaatccaactctgcttttggtcttgcttctataaatatatagtgtatacttggtgtagactttgcatatatacaaatttgtagtattttcttgttttgatgtctaatctgtatctataatgtaccctagtagtcgaacatacttttgattgtacaattgtacatttgtatacctgtaatgtaaatgtggagaagtttgaatcaacataaacacgttttttggtaagaaaagagaattagccagccctgtgcattcagtgtatattctcaccttttatggtcgtagcatatagtgttgtatattgtaaattgtaatttcaaccagaagtaaatttttttcttttgaaggaataaatgttctttatacagcctagttaatgtttaaaaagaaaaaaatagcttggttttatttgtcatctagtctcaagtatagcgagattctttctaaatgttattcaagattgagttctcactagtgtttttttaatcctaaaaaagtaatgttttgattttgtgacagtcaaaaggacgtgcaaaagtctagccttgcccgagctttccttacaatcagagcccctctcaccttgtaaagtgtgaatcgcccttcccttttgtacagaagatgaactgtattttgcattttgtctacttgtaagtgaatgtaacatactgtcaattttccttgtttgaatatagaattgtaacactacacggtgtacatttccagagccttgtgtatatttccaatgaacttttttgcaagcacacttgtaaccatatgtgtataattaacaaacctgtgtatgcttatgcctgggcaactattttttgtaactcttgtgtagattgtctctaaacaatgtgtgatctttattttgaaaaatacagaactttggaatctg

SEQ ID NO: 60793 - DNA, 5486 bp, Homo sapiens
  misc_feature (5414)..(5414): n is a, c, g, or t
  misc_feature (5417)..(5417): n is a, c, g, or t
  misc_feature (5423)..(5423): n is a, c, g, or t
  misc_feature (5443)..(5445): n is a, c, g, or t
  misc_feature (5448)..(5448): n is a, c, g, or t
  misc_feature (5450)..(5450): n is a, c, g, or t
  misc_feature (5454)..(5454): n is a, c, g, or t
  misc_feature (5465)..(5465): n is a, c, g, or t
  misc_feature (5469)..(5469): n is a, c, g, or t
  misc_feature (5471)..(5472): n is a, c, g, or t
aacccagtccccagtgggccgccatgttgtgggagtgaaaggtaagggggagcgagagcgccagagagagaagatcggggggctgaaatccatcttcatcctaccgctccgcccgtgttggtggaatgagcgttgcatgtgtcttgaagagaaaagcagtgctttggcaggactctttcagcccccacctgaaacatcaccctcaagaaccagctaatcccaacatgcctgttgttttgacatctggaacagggtcgcaagcgcagccacaaccagctgcaaatcaggctcttgcagctgggactcactccagccctgtcccaggatctataggagttgcaggccgttcccaggacgacgctatggtggactacttctttcagaggcagcatggtgagcagcttgggggaggaggaagtggaggaggcggctataataatagcaaacatcgatggcctactggggataacattcatgcagaacatcaggtgcgttccatggatgaactgaatcatgattttcaagcacttgctctggagggaagagcgatgggagagcagctcttgccaggtaaaaagttttgggaaacagatgaatccagcaaagatggaccaaaaggaatattcctgggtgatcaatggcgagacagtgcctggggaacatcagatcattcagtttcccagccaatcatggtgcagagaagacctggtcagagtttccatgtgaacagtgaggtcaattctgtactgtccccacgatcggagagtgggggactaggcgttagcatggtggagtatgtgttgagctcatccccgggcgattcctgtctaagaaaaggaggatttggcccaagggatgcagacagtgatgaaaacgacaaaggtgaaaagaagaacaagggtacgtttgatggagataagctaggagatttgaaggaggagggtgatgtgatggacaagaccaatggtttaccagtgcagaatgggattgatgcagacgtcaaagattttagccgtacccctggtaattgccagaactctgctaatgaagtggatcttctgggtccaaaccagaatggttctgagggcttagcccagctgaccagcaccaatggtgccaagcctgtggaggatttctccaacatggagtcccagagtgtccccttggaccccatggaacatgtgggcatggagcctcttcagtttgattattcaggcacgcaggtacctgtggactcagcagcagcaactgtgggactttttgactacaattctcaacaacagctgttccaaagacctaatgcgcttgctgtccagcagttgacagctgctcagcagcagcagtatgcactggcagctgctcatcagccgcacatcggtttagctcccgctgcgtttgtccccaatccatacatcatcagcgctgctcccccagggacggacccctacacagctggattggctgcagcagcgacactaggcccagctgtggtccctcaccagtattatggagttactccctggggagtctaccctgccagtcttttccagcagcaagctgccgctgccgctgcagcaactaattcagctaatcaacagaccaccccacaggctcagcaaggacagcagcaggttctccgtggaggagccagccaacgtcctttgaccccaaaccagaaccagcagggacagcaaacggatccccttgtggcagctgcagcagtgaattctgcccttgcatttggacaaggtctggcagcaggcatgccaggttatccggtgttggctcctgctgcttactatgaccaaactggtgcccttgtagtgaatgcaggcgcgagaaatggtcttggagctcctgttcgacttgtagctcctgccccagtcatcattagttcctcagctgcacaagcagctgttgcagcagccgcagcttcagcaaatggagcagctggtggtcttgctggaacaacaaatggaccatttcgccctttaggaacacagcagcctcagccccagccccagcagcagcccaataacaacctggcatccagttctttctacggcaacaactctctgaacagcaattcacagagcagctccctcttctcccagggctctgcccagcctgccaacacatccttgggattcggaagtagcagttctctcggcgccaccctgggatccgcccttggagggtttggaacagcagttgcaaactccaacactggcagtggctcccgccgtgactccctgactggcagcagtgacctttataagaggacatcgagcagcttgacccccattggacacagtttttataacggccttagcttttcctcctctcctggacccgtgggcatgcctctccctagtcagggaccaggacattcacagacaccacctccttccctctcttcacatggatcctcttcaagcttaaacctgggaggactcacgaatggcagtggaagatacatctctgctgctccaggcgctgaagccaagtaccgcagtgcaagcagcgcctccagcctcttcagcccgagcagcactcttttctcttcctctcgtttgcgatatggaatgtctgatgtcatgccttctggcaggagcaggcttttggaagattttcgaaacaaccggtaccccaatttacaactgcgggagattgctggacatataatggaattttcccaagaccagcatgggtccagattcattcagctgaaactggagcgtgccacaccagctgagcgccagcttgtcttcaatgaaatcctccaggctgcctaccaactcatggtggatgtgtttggtaattacgtcattcagaagttctttgaatttggcagtcttgaacagaagctggctttggcagaacggattcgaggccacgtcctgtcattggcactacagatgtatggctgccgtgttatccagaaagctcttgagtttattccttcagaccagcagaatgagatggttcgggaactagatggccatgtcttgaagtgtgtgaaagatcagaatggcaatcacgtggttcagaaatgcattgaatgtgtacagccccagtctttgcaatttatcatcgatgcgtttaagggacaggtatttgccttatccacacatccttatggctgccgagtgattcagagaatcctggagcactgtctccctgaccagacactccctattttagaggagcttcaccagcacacagagcagcttgtacaggatcaatatggaaattatgtaatccaacatgtactggagcacggtcgtcctgaggataaaagcaaaattgtagcagaaatccgaggcaatgtacttgtattgagtcagcacaaatttgcaagcaatgttgtggagaagtgtgttactcacgcctcacgtacggagcgcgctgtgctcatcgatgaggtgtgcaccatgaacgacggtccccacagtgccttatacaccatgatgaaggaccagtatgccaactacgtggtccagaagatgattgacgtggcggagccaggccagcggaagatcgtcatgcataagatccggccccacatcgcaactcttcgtaagtacacctatggcaagcacattctggccaagctggagaagtactacatgaagaacggtgttgacttagggcccatctgtggcccccctaatggtatcatctgaggcagtgtcacccgctgttccctcattcccgctgacctcactggcccactggcaaatccaaccagcaaccagaaatgttctagtgtagagtctgagacgggcaagtggttgctccaggattactccctcctccaaaaaaggaatcaaatccacgagtggaaaagcctttgtaaatttaattttattacacataacatgtactattttttttaattgactaattgccctgctgttttactggtgtataggatacttgtacataggtaaccaatgtacatgggaggccacatattttgttcactgttgtatctatatttcacatgtggaaactttcagggtggttggtttaacaaaaaaaaaaagctttaaaaaaaaaagaaaaaaaggaaaaggtttttagctcatttgcctggccggcaagttttgcaaatagctcttccccacctcctcattttagtaaaaaacaaacaaaaacaaaaaaacctgagaagtttgaattgtagttaaatgaccccaaactggcatttaacactgtttataaaaaatatatatatatatatatatatataatgaaaaaggtttcagagttgctaaagcttcagtttgtgacattaagtttatgaaattctaaaaaatgccttttttggagactatattatgctgaagaaggctgttcgtgaggaggagatgcgagcacccagaacgtcttttgaggctgggcgggtgtgattgtttactgcctactggatttttttctattaacattgaaaggtaaaatctgattatttagcatgagaaaaaaaaatccaactctgcttttggtcttgcttctataaatatatagtgtatacttggtgtagactttgcatatatacaaatttgtagtattttcttgttttgatgtctaatctgtatctataatgtaccctagtagtcgaacatacttttgattgtacaattgtacatttgtatacctgtaatgtaaatgtggagaagtttgaatcaacataaacacgttttttggtaagaaaagagaattagccagccctgtgcattcagtgtatattctcaccttttatggtcgtagcatatagtgttgtatattgtaaattgtaatttcaaccagaagtaaatttttttcttttgaaggaataaatgttctttatacagcctagttaatgtttaaaaagaaaaaaatagcttggttttatttgtcatctagtctcaagtatagcgagattctttctaaatgttattcaagattgagttctcactagtgtttttttaatcctaaaaaagtaatgttttgattttgtgacagtcaaaaggacgtgcaaaagtctagccttgcccgagctttccttacaatcagagcccctctcaccttgtaaagtgtgaatcgcccttcccttttgtacagaagatgaactgtattttgcattttgtctacttgtaagtgaatgtaacatactgtcaattttccttgtttgaatatagaattgtaacactacacggtgtacatttccagagccttgtgtatatttccaatgaacttttttgcaagcacacttgtaaccatatgtgtataattaacaaacctgtgtatgcttatgcctgggcaactattttttgtaactcttgtgtagattgtctctaaacaatgtgtgatctttattttgaaaaatacagaactttggaatctgaaaaaaaaaaaaaaaaaaaaaaaanaanaaaaanaaaaaacaaaacaaaaacannnaananaaanaaacacaaaanaaanannaaaacacaacaaca

SEQ ID NO: 60794 - DNA, 5405 bp, Homo sapiens
  misc_feature (5333)..(5333): n is a, c, g, or t
  misc_feature (5336)..(5336): n is a, c, g, or t
  misc_feature (5342)..(5342): n is a, c, g, or t
  misc_feature (5362)..(5364): n is a, c, g, or t
  misc_feature (5367)..(5367): n is a, c, g, or t
  misc_feature (5369)..(5369): n is a, c, g, or t
  misc_feature (5373)..(5373): n is a, c, g, or t
  misc_feature (5384)..(5384): n is a, c, g, or t
  misc_feature (5388)..(5388): n is a, c, g, or t
  misc_feature (5390)..(5391): n is a, c, g, or t
aacccagtccccagtgggccgccatgttgtgggagtgaaaggtaagggggagcgagagcgccagagagagaagatcggggggctgaaatccatcttcatcctaccgctccgcccgtgttggtggaatgagcgttgcatgtgtcttgaagagaaaagcagtgctttggcaggactctttcagcccccacctgaaacatcaccctcaagaaccagctaatcccaacatgcctgttgttttgacatctggaacagggtcgcaagcgcagccacaaccagctgcaaatcaggctcttgcagctgggactcactccagccctgtcccaggatctataggagttgcaggccgttcccaggacgacgctatggtggactacttctttcagaggcagcatggtgagcagcttgggggaggaggaagtggaggaggcggctataataatagcaaacatcgatggcctactggggataacattcatgcagaacatcaggtgcgttccatggatgaactgaatcatgattttcaagcacttgctctggagggaagagcgatgggagagcagctcttgccaggtaaaaagttttgggaaacagatgaatccagcaaagatggaccaaaaggaatattcctgggtgatcaatggcgagacagtgcctggggaacatcagatcattcagtttcccagccaatcatggtgcagagaagacctggtcagagtttccatgtgaacagtgaggtcaattctgtactgtccccacgatcggagagtgggggactaggcgttagcatggtggagtatgtgttgagctcatccccgggcgattcctgtctaagaaaaggaggatttggcccaagggatgcagacagtgatgaaaacgacaaaggtgaaaagaagaacaagggtacgtttgatggagataagctaggagatttgaaggaggagggtgatgtgatggacaagaccaatggtttaccagtgcagaatgggattgatgcagacgtcaaagattttagccgtacccctggtaattgccagaactctgctaatgaagtggatcttctgggtccaaaccagaatggttctgagggcttagcccagctgaccagcaccaatggtgccaagcctgtggaggatttctccaacatggagtcccagagtgtccccttggaccccatggaacatgtgggcatggagcctcttcagtttgattattcaggcacgcaggtacctgtggactcagcagcagcaactgtgggactttttgactacaattctcaacaacagctgttccaaagacctaatgcgcttgctgtccagcagttgacagctgctcagcagcagcagtatgcactggcagctgctcatcagccgcacatcggtttagctcccgctgcgtttgtccccaatccatacatcatcagcgctgctcccccagggacggacccctacacagctggattggctgcagcagcgacactaggcccagctgtggtccctcaccagtattatggagttactccctggggagtctaccctgccagtcttttccagcagcaagctgccgctgccgctgcagcaactaattcagctaatcaacagaccaccccacaggctcagcaaggacagcagcaggttctccgtggaggagccagccaacgtcctttgaccccaaaccagaaccagcagggacagcaaacggatccccttgtggcagctgcagcagtgaattctgcccttgcatttggacaaggtctggcagcaggcatgccaggttatccggtgttggctcctgctgcttactatgaccaaactggtgcccttgtagtgaatgcaggcgcgagaaatggtcttggagctcctgttcgacttgtagctcctgccccagtcatcattagttcctcagctgcacaagcaggaacacagcagcctcagccccagccccagcagcagcccaataacaacctggcatccagttctttctacggcaacaactctctgaacagcaattcacagagcagctccctcttctcccagggctctgcccagcctgccaacacatccttgggattcggaagtagcagttctctcggcgccaccctgggatccgcccttggagggtttggaacagcagttgcaaactccaacactggcagtggctcccgccgtgactccctgactggcagcagtgacctttataagaggacatcgagcagcttgacccccattggacacagtttttataacggccttagcttttcctcctctcctggacccgtgggcatgcctctccctagtcagggaccaggacattcacagacaccacctccttccctctcttcacatggatcctcttcaagcttaaacctgggaggactcacgaatggcagtggaagatacatctctgctgctccaggcgctgaagccaagtaccgcagtgcaagcagcgcctccagcctcttcagcccgagcagcactcttttctcttcctctcgtttgcgatatggaatgtctgatgtcatgccttctggcaggagcaggcttttggaagattttcgaaacaaccggtaccccaatttacaactgcgggagattgctggacatataatggaattttcccaagaccagcatgggtccagattcattcagctgaaactggagcgtgccacaccagctgagcgccagcttgtcttcaatgaaatcctccaggctgcctaccaactcatggtggatgtgtttggtaattacgtcattcagaagttctttgaatttggcagtcttgaacagaagctggctttggcagaacggattcgaggccacgtcctgtcattggcactacagatgtatggctgccgtgttatccagaaagctcttgagtttattccttcagaccagcagaatgagatggttcgggaactagatggccatgtcttgaagtgtgtgaaagatcagaatggcaatcacgtggttcagaaatgcattgaatgtgtacagccccagtctttgcaatttatcatcgatgcgtttaagggacaggtatttgccttatccacacatccttatggctgccgagtgattcagagaatcctggagcactgtctccctgaccagacactccctattttagaggagcttcaccagcacacagagcagcttgtacaggatcaatatggaaattatgtaatccaacatgtactggagcacggtcgtcctgaggataaaagcaaaattgtagcagaaatccgaggcaatgtacttgtattgagtcagcacaaatttgcaagcaatgttgtggagaagtgtgttactcacgcctcacgtacggagcgcgctgtgctcatcgatgaggtgtgcaccatgaacgacggtccccacagtgccttatacaccatgatgaaggaccagtatgccaactacgtggtccagaagatgattgacgtggcggagccaggccagcggaagatcgtcatgcataagatccggccccacatcgcaactcttcgtaagtacacctatggcaagcacattctggccaagctggagaagtactacatgaagaacggtgttgacttagggcccatctgtggcccccctaatggtatcatctgaggcagtgtcacccgctgttccctcattcccgctgacctcactggcccactggcaaatccaaccagcaaccagaaatgttctagtgtagagtctgagacgggcaagtggttgctccaggattactccctcctccaaaaaaggaatcaaatccacgagtggaaaagcctttgtaaatttaattttattacacataacatgtactattttttttaattgactaattgccctgctgttttactggtgtataggatacttgtacataggtaaccaatgtacatgggaggccacatattttgttcactgttgtatctatatttcacatgtggaaactttcagggtggttggtttaacaaaaaaaaaaagctttaaaaaaaaaagaaaaaaaggaaaaggtttttagctcatttgcctggccggcaagttttgcaaatagctcttccccacctcctcattttagtaaaaaacaaacaaaaacaaaaaaacctgagaagtttgaattgtagttaaatgaccccaaactggcatttaacactgtttataaaaaatatatatatatatatatatatataatgaaaaaggtttcagagttgctaaagcttcagtttgtgacattaagtttatgaaattctaaaaaatgccttttttggagactatattatgctgaagaaggctgttcgtgaggaggagatgcgagcacccagaacgtcttttgaggctgggcgggtgtgattgtttactgcctactggatttttttctattaacattgaaaggtaaaatctgattatttagcatgagaaaaaaaaatccaactctgcttttggtcttgcttctataaatatatagtgtatacttggtgtagactttgcatatatacaaatttgtagtattttcttgttttgatgtctaatctgtatctataatgtaccctagtagtcgaacatacttttgattgtacaattgtacatttgtatacctgtaatgtaaatgtggagaagtttgaatcaacataaacacgttttttggtaagaaaagagaattagccagccctgtgcattcagtgtatattctcaccttttatggtcgtagcatatagtgttgtatattgtaaattgtaatttcaaccagaagtaaatttttttcttttgaaggaataaatgttctttatacagcctagttaatgtttaaaaagaaaaaaatagcttggttttatttgtcatctagtctcaagtatagcgagattctttctaaatgttattcaagattgagttctcactagtgtttttttaatcctaaaaaagtaatgttttgattttgtgacagtcaaaaggacgtgcaaaagtctagccttgcccgagctttccttacaatcagagcccctctcaccttgtaaagtgtgaatcgcccttcccttttgtacagaagatgaactgtattttgcattttgtctacttgtaagtgaatgtaacatactgtcaattttccttgtttgaatatagaattgtaacactacacggtgtacatttccagagccttgtgtatatttccaatgaacttttttgcaagcacacttgtaaccatatgtgtataattaacaaacctgtgtatgcttatgcctgggcaactattttttgtaactcttgtgtagattgtctctaaacaatgtgtgatctttattttgaaaaatacagaactttggaatctgaaaaaaaaaaaaaaaaaaaaaaaanaanaaaaanaaaaaacaaaacaaaaacannnaananaaanaaacacaaaanaaanannaaaacacaacaaca

SEQ ID NO: 60795 - DNA, 5187 bp, Homo sapiens
aacccagtccccagtgggccgccatgttgtgggagtgaaaggtaagggggagcgagagcgccagagagagaagatcggggggctgaaatccatcttcatcctaccgctccgcccgtgttggtggaatgagcgttgcatgtgtcttgaagagaaaagcagtgctttggcaggactctttcagcccccacctgaaacatcaccctcaagaaccagctaatcccaacatgcctgttgttttgacatctggaacagggtcgcaagcgcagccacaaccagctgcaaatcaggctcttgcagctgggactcactccagccctgtcccaggatctataggagttgcaggccgttcccaggacgacgctatggtggactacttctttcagaggcagcatggtgagcagcttgggggaggaggaagtggaggaggcggctataataatagcaaacatcgatggcctactggggataacattcatgcagaacatcaggtgcgttccatggatgaactgaatcatgattttcaagcacttgctctggagggaagagcgatgggagagcagctcttgccaggtaaaaagttttgggaaacagatgaatccagcaaagatggaccaaaaggaatattcctgggtgatcaatggcgagacagtgcctggggaacatcagatcattcagtttcccagccaatcatggtgcagagaagacctggtcagagtttccatgtgaacagtgaggtcaattctgtactgtccccacgatcggagagtgggggactaggcgttagcatggtggagtatgtgttgagctcatccccgggcgattcctgtctaagaaaaggaggatttggcccaagggatgcagacagtgatgaaaacgacaaaggtgaaaagaagaacaagggtacgtttgatggagataagctaggagatttgaaggaggagggtgatgtgatggacaagaccaatggtttaccagtgcagaatgggattgatgcagacgtcaaagattttagccgtacccctggtaattgccagaactctgctaatgaagtggatcttctgggtccaaaccagaatggttctgagggcttagcccagctgaccagcaccaatggtgccaagcctgtggaggatttctccaacatggagtcccagagtgtccccttggaccccatggaacatgtgggcatggagcctcttcagtttgattattcaggcacgcaggtacctgtggactcagcagcagcaactgtgggactttttgactacaattctcaacaacagctgttccaaagacctaatgcgcttgctgtccagcagttgacagctgctcagcagcagcagtatgcactggcagctgctcatcagccgcacatcggtttagctcccgctgcgtttgtccccaatccatacatcatcagcgctgctcccccagggacggacccctacacagctggattggctgcagcagcgacactaggcccagctgtggtccctcaccagtattatggagttactccctggggagtctaccctgccagtcttttccagcagcaagctgccgctgccgctgcagcaactaattcagctaatcaacagaccaccccacaggctcagcaaggacagcagcaggttctccgtggaggagccagccaacgtcctttgaccccaaaccagaaccagcagggacagcaaacggatccccttgtggcagctgcagcagtgaattctgcccttgcatttggacaaggtctggcagcaggcatgccaggttatccggtgttggctcctgctgcttactatgaccaaactggtgcccttgtagtgaatgcaggcgcgagaaatggtcttggagctcctgttcgacttgtagctcctgccccagtcatcattagttcctcagctgcacaagcagctgttgcagcagccgcagcttcagcaaatggagcagctggtggtcttgctggaacaacaaatggaccatttcgccctttaggaacacagcagcctcagccccagccccagcagcagcccaataacaacctggcatccagttctttctacggcaacaactctctgaacagcaattcacagagcagctccctcttctcccagggctctgcccagcctgccaacacatccttgggattcggaagtagcagttctctcggcgccaccctgggatccgcccttggagggtttggaacagcagttgcaaactccaacactggcagtggctcccgccgtgactccctgactggcagcagtgacctttataagaggacatcgagcagcttgacccccattggacacagtttttataacggccttagcttttcctcctctcctggacccgtgggcatgcctctccctagtcagggaccaggacattcacagacaccacctccttccctctcttcacatggatcctcttcaagcttaaacctgggaggactcacgaatggcagtggaagatacatctctgctgctccaggcgctgaagccaagtaccgcagtgcaagcagcgcctccagcctcttcagcccgagcagcactcttttctcttcctctcgtttgcgatatggaatgtctgatgtcatgccttctggcaggagcaggcttttggaagattttcgaaacaaccggtaccccaatttacaactgcgggagattgctggacatataatggaattttcccaagaccagcatgggtccagattcattcagctgaaactggagcgtgccacaccagctgagcgccagcttgtcttcaatgaaatcctccaggctgcctaccaactcatggtggatgtgtttggtaattacgtcattcagaagttctttgaatttggcagtcttgaacagaagctggctttggcagaacggattcgaggccacgtcctgtcattggcactacagatgtatggctgccgtgttatccagaaagctcttgagtttattccttcagaccagcagaatgagatggttcgggaactagatggccatgtcttgaagtgtgtgaaagatcagaatggcaatcacgtggttcagaaatgcattgaatgtgtacagccccagtctttgcaatttatcatcgatgcgtttaagggacaggtatttgccttatccacacatccttatggctgccgagtgattcagagaatcctggagcactgtctccctgaccagacactccctattttagaggagcttcaccagcacacagagcagcttgtacaggatcaatatggaaattatgtaatccaacatgtactggagcacggtcgtcctgaggataaaagcaaaattgtagcagaaatccgaggcaatgtacttgtattgagtcagcacaaatttgcaagcaatgttgtggagaagtgtgttactcacgcctcacgtacggagcgcgctgtgctcatcgatgaggtgtgcaccatgaacgacggtccccacagtgccttatacaccatgatgaaggaccagtatgccaactacgtggtccagaagatgattgacgtggcggagccaggccagcggaagatcgtcatgcataagatccggccccacatcgcaactcttcgtaagtacacctatggcaagcacattctggccaagctggagaagtactacatgaagaacggtgttgacttagggcccatctgtggcccccctaatggtatcatctgaggcagtgtcacccgctgttccctcattcccgctgacctcactggcccactggcaaatccaaccagcaaccagaaatgttctagtgtagagtctgagacgggcaagtggttgctccaggattactccctcctccaaaaaaggaatcaaatccacgagtggaaaagcctttgtaaatttaattttattacacataacatgtactattttttttaattgactaattgccctgctgttttactggtgtataggatacttgtacataggtaaccaatgtacatgggaggccacatattttgttcactgttgtatctatatttcacatgtggaaactttcagggtggttggtttaacaaaaaaaaaaagctttaaaaaaaaaagaaaaaaaggaaaaggtttttagctcatttgcctggccggcaagttttgcaaatagctcttccccacctcctcattttagtaaaaaacaaacaaaaacaaaaaaacctgagaagtttgaattgtagttaaatgaccccaaactggcatttaacactgtttataaaaaatatatatatatatatatatatataatgaaaaaggtttcagagttgctaaagcttcagtttgtgacattaagtttatgaaattctaaaaaatgccttttttggagactatattatgctgaagaaggctgttcgtgaggaggagatgcgagcacccagaacgtcttttgaggctgggcgggtgtgattgtttactgcctactggatttttttctattaacattgaaaggtaaaatctgattatttagcatgagaaaaaaaaatccaactctgcttttggtcttgcttctataaatatatagtgtatacttggtgtagactttgcatatatacaaatttgtagtattttcttgttttgatgtctaatctgtatctataatgtaccctagtagtcgaacatacttttgattgtacaattgtacatttgtatacctgtaatgtaaatgtggagaagtttgaatcaacataaacacgttttttggtaagaaaagagaattagccagccctgtgcattcagtgtatattctcaccttttatggtcgtagcatatagtgttgtatattgtaaattgtaatttcaaccagaagtaaatttttttcttttgaaggaataaatgttctttatacagcctagttaatgtttaaaaagaaaaaaatagcttggttttatttgtcatctagtctcaagtatagcgagattctttctaaatgttattcaagattgagttctcactagtgtttttttaatcctaaaaaagtaatgttttgattttgtgacagtcaaaaggacgtgcaaaagtctagccttgcccgagctttccttacaatcagagcccctctcaccttgtaaaaaacctgtgtatgcttatgcctgggcaactattttttgtaactcttgtgtagattgtctctaaacaatgtgtgatctttattttgaaaaatacagaactttggaatctg

SEQ ID NO: 60796 - DNA, 5048 bp, Homo sapiens
  misc_feature (4976)..(4976): n is a, c, g, or t
  misc_feature (4979)..(4979): n is a, c, g, or t
  misc_feature (4985)..(4985): n is a, c, g, or t
  misc_feature (5005)..(5007): n is a, c, g, or t
  misc_feature (5010)..(5010): n is a, c, g, or t
  misc_feature (5012)..(5012): n is a, c, g, or t
  misc_feature (5016)..(5016): n is a, c, g, or t
  misc_feature (5027)..(5027): n is a, c, g, or t
  misc_feature (5031)..(5031): n is a, c, g, or t
  misc_feature (5033)..(5034): n is a, c, g, or t
aacccagtccccagtgggccgccatgttgtgggagtgaaaggtaagggggagcgagagcgccagagagagaagatcggggggctgaaatccatcttcatcctaccgctccgcccgtgttggtggaatgagcgttgcatgtgtcttgaagagaaaagcagtgctttggcaggactctttcagcccccacctgaaacatcaccctcaagaaccagctaatcccaacatgcctgttgttttgacatctggaacagggtcgcaagcgcagccacaaccagctgcaaatcaggctcttgcagctgggactcactccagccctgtcccaggatctataggagttgcaggccgttcccaggacgacgctatggtggactacttctttcagaggcagcatggtgagcagcttgggggaggaggaagtggaggaggcggctataataatagcaaacatcgatggcctactggggataacattcatgcagaacatcaggtgcgttccatggatgaactgaatcatgattttcaagcacttgctctggagggaagagcgatgggagagcagctcttgccaggtaaaaagttttgggaaacagatgaatccagcaaagatggaccaaaaggaatattcctgggtgatcaatggcgagacagtgcctggggaacatcagatcattcagtttcccagccaatcatggtgcagagaagacctggtcagagtttccatgtgaacagtgaggtcaattctgtactgtccccacgatcggagagtgggggactaggcgttagcatggtggagtatgtgttgagctcatccccgggcgattcctgtctaagaaaaggaggatttctgttccaaagacctaatgcgcttgctgtccagcagttgacagctgctcagcagcagcagtatgcactggcagctgctcatcagccgcacatcggtttagctcccgctgcgtttgtccccaatccatacatcatcagcgctgctcccccagggacggacccctacacagctggattggctgcagcagcgacactaggcccagctgtggtccctcaccagtattatggagttactccctggggagtctaccctgccagtcttttccagcagcaagctgccgctgccgctgcagcaactaattcagctaatcaacagaccaccccacaggctcagcaaggacagcagcaggttctccgtggaggagccagccaacgtcctttgaccccaaaccagaaccagcagggacagcaaacggatccccttgtggcagctgcagcagtgaattctgcccttgcatttggacaaggtctggcagcaggcatgccaggttatccggtgttggctcctgctgcttactatgaccaaactggtgcccttgtagtgaatgcaggcgcgagaaatggtcttggagctcctgttcgacttgtagctcctgccccagtcatcattagttcctcagctgcacaagcagctgttgcagcagccgcagcttcagcaaatggagcagctggtggtcttgctggaacaacaaatggaccatttcgccctttaggaacacagcagcctcagccccagccccagcagcagcccaataacaacctggcatccagttctttctacggcaacaactctctgaacagcaattcacagagcagctccctcttctcccagggctctgcccagcctgccaacacatccttgggattcggaagtagcagttctctcggcgccaccctgggatccgcccttggagggtttggaacagcagttgcaaactccaacactggcagtggctcccgccgtgactccctgactggcagcagtgacctttataagaggacatcgagcagcttgacccccattggacacagtttttataacggccttagcttttcctcctctcctggacccgtgggcatgcctctccctagtcagggaccaggacattcacagacaccacctccttccctctcttcacatggatcctcttcaagcttaaacctgggaggactcacgaatggcagtggaagatacatctctgctgctccaggcgctgaagccaagtaccgcagtgcaagcagcgcctccagcctcttcagcccgagcagcactcttttctcttcctctcgtttgcgatatggaatgtctgatgtcatgccttctggcaggagcaggcttttggaagattttcgaaacaaccggtaccccaatttacaactgcgggagattgctggacatataatggaattttcccaagaccagcatgggtccagattcattcagctgaaactggagcgtgccacaccagctgagcgccagcttgtcttcaatgaaatcctccaggctgcctaccaactcatggtggatgtgtttggtaattacgtcattcagaagttctttgaatttggcagtcttgaacagaagctggctttggcagaacggattcgaggccacgtcctgtcattggcactacagatgtatggctgccgtgttatccagaaagctcttgagtttattccttcagaccagcagaatgagatggttcgggaactagatggccatgtcttgaagtgtgtgaaagatcagaatggcaatcacgtggttcagaaatgcattgaatgtgtacagccccagtctttgcaatttatcatcgatgcgtttaagggacaggtatttgccttatccacacatccttatggctgccgagtgattcagagaatcctggagcactgtctccctgaccagacactccctattttagaggagcttcaccagcacacagagcagcttgtacaggatcaatatggaaattatgtaatccaacatgtactggagcacggtcgtcctgaggataaaagcaaaattgtagcagaaatccgaggcaatgtacttgtattgagtcagcacaaatttgcaagcaatgttgtggagaagtgtgttactcacgcctcacgtacggagcgcgctgtgctcatcgatgaggtgtgcaccatgaacgacggtccccacagtgccttatacaccatgatgaaggaccagtatgccaactacgtggtccagaagatgattgacgtggcggagccaggccagcggaagatcgtcatgcataagatccggccccacatcgcaactcttcgtaagtacacctatggcaagcacattctggccaagctggagaagtactacatgaagaacggtgttgacttagggcccatctgtggcccccctaatggtatcatctgaggcagtgtcacccgctgttccctcattcccgctgacctcactggcccactggcaaatccaaccagcaaccagaaatgttctagtgtagagtctgagacgggcaagtggttgctccaggattactccctcctccaaaaaaggaatcaaatccacgagtggaaaagcctttgtaaatttaattttattacacataacatgtactattttttttaattgactaattgccctgctgttttactggtgtataggatacttgtacataggtaaccaatgtacatgggaggccacatattttgttcactgttgtatctatatttcacatgtggaaactttcagggtggttggtttaacaaaaaaaaaaagctttaaaaaaaaaagaaaaaaaggaaaaggtttttagctcatttgcctggccggcaagttttgcaaatagctcttccccacctcctcattttagtaaaaaacaaacaaaaacaaaaaaacctgagaagtttgaattgtagttaaatgaccccaaactggcatttaacactgtttataaaaaatatatatatatatatatatatataatgaaaaaggtttcagagttgctaaagcttcagtttgtgacattaagtttatgaaattctaaaaaatgccttttttggagactatattatgctgaagaaggctgttcgtgaggaggagatgcgagcacccagaacgtcttttgaggctgggcgggtgtgattgtttactgcctactggatttttttctattaacattgaaaggtaaaatctgattatttagcatgagaaaaaaaaatccaactctgcttttggtcttgcttctataaatatatagtgtatacttggtgtagactttgcatatatacaaatttgtagtattttcttgttttgatgtctaatctgtatctataatgtaccctagtagtcgaacatacttttgattgtacaattgtacatttgtatacctgtaatgtaaatgtggagaagtttgaatcaacataaacacgttttttggtaagaaaagagaattagccagccctgtgcattcagtgtatattctcaccttttatggtcgtagcatatagtgttgtatattgtaaattgtaatttcaaccagaagtaaatttttttcttttgaaggaataaatgttctttatacagcctagttaatgtttaaaaagaaaaaaatagcttggttttatttgtcatctagtctcaagtatagcgagattctttctaaatgttattcaagattgagttctcactagtgtttttttaatcctaaaaaagtaatgttttgattttgtgacagtcaaaaggacgtgcaaaagtctagccttgcccgagctttccttacaatcagagcccctctcaccttgtaaagtgtgaatcgcccttcccttttgtacagaagatgaactgtattttgcattttgtctacttgtaagtgaatgtaacatactgtcaattttccttgtttgaatatagaattgtaacactacacggtgtacatttccagagccttgtgtatatttccaatgaacttttttgcaagcacacttgtaaccatatgtgtataattaacaaacctgtgtatgcttatgcctgggcaactattttttgtaactcttgtgtagattgtctctaaacaatgtgtgatctttattttgaaaaatacagaactttggaatctgaaaaaaaaaaaaaaaaaaaaaaaanaanaaaaanaaaaaacaaaacaaaaacannnaananaaanaaacacaaaanaaanannaaaacacaacaaca

SEQ ID NO: 60797 - DNA, 5198 bp, Homo sapiens
  misc_feature (5126)..(5126): n is a, c, g, or t
  misc_feature (5129)..(5129): n is a, c, g, or t
  misc_feature (5135)..(5135): n is a, c, g, or t
  misc_feature (5155)..(5157): n is a, c, g, or t
  misc_feature (5160)..(5160): n is a, c, g, or t
  misc_feature (5162)..(5162): n is a, c, g, or t
  misc_feature (5166)..(5166): n is a, c, g, or t
  misc_feature (5177)..(5177): n is a, c, g, or t
  misc_feature (5181)..(5181): n is a, c, g, or t
  misc_feature (5183)..(5184): n is a, c, g, or t
aacccagtccccagtgggccgccatgttgtgggagtgaaaggtaagggggagcgagagcgccagagagagaagatcggggggctgaaatccatcttcatcctaccgctccgcccgtgttggtggaatgagcgttgcatgtgtcttgaagagaaaagcagtgctttggcaggactctttcagcccccacctgaaacatcaccctcaagaaccagctaatcccaacatgcctgttgttttgacatctggaacagggtcgcaagcgcagccacaaccagctgcaaatcaggctcttgcagctgggactcactccagccctgtcccaggatctataggagttgcaggccgttcccaggacgacgctatggtggactacttctttcagaggcagcatggtgagcagcttgggggaggaggaagtggaggaggcggctataataatagcaaacatcgatggcctactggggataacattcatgcagaacatcaggtgcgttccatggatgaactgaatcatgattttcaagcacttgctctggagggaagagcgatgggagagggcccaagggatgcagacagtgatgaaaacgacaaaggtgaaaagaagaacaagggtacgtttgatggagataagctaggagatttgaaggaggagggtgatgtgatggacaagaccaatggtttaccagtgcagaatgggattgatgcagacgtcaaagattttagccgtacccctggtaattgccagaactctgctaatgaagtggatcttctgggtccaaaccagaatggttctgagggcttagcccagctgaccagcaccaatggtgccaagcctgtggaggatttctccaacatggagtcccagagtgtccccttggaccccatggaacatgtgggcatggagcctcttcagtttgattattcaggcacgcaggtacctgtggactcagcagcagcaactgtgggactttttgactacaattctcaacaacagctgttccaaagacctaatgcgcttgctgtccagcagttgacagctgctcagcagcagcagtatgcactggcagctgctcatcagccgcacatcggtttagctcccgctgcgtttgtccccaatccatacatcatcagcgctgctcccccagggacggacccctacacagctggattggctgcagcagcgacactaggcccagctgtggtccctcaccagtattatggagttactccctggggagtctaccctgccagtcttttccagcagcaagctgccgctgccgctgcagcaactaattcagctaatcaacagaccaccccacaggctcagcaaggacagcagcaggttctccgtggaggagccagccaacgtcctttgaccccaaaccagaaccagcagggacagcaaacggatccccttgtggcagctgcagcagtgaattctgcccttgcatttggacaaggtctggcagcaggcatgccaggttatccggtgttggctcctgctgcttactatgaccaaactggtgcccttgtagtgaatgcaggcgcgagaaatggtcttggagctcctgttcgacttgtagctcctgccccagtcatcattagttcctcagctgcacaagcagctgttgcagcagccgcagcttcagcaaatggagcagctggtggtcttgctggaacaacaaatggaccatttcgccctttaggaacacagcagcctcagccccagccccagcagcagcccaataacaacctggcatccagttctttctacggcaacaactctctgaacagcaattcacagagcagctccctcttctcccagggctctgcccagcctgccaacacatccttgggattcggaagtagcagttctctcggcgccaccctgggatccgcccttggagggtttggaacagcagttgcaaactccaacactggcagtggctcccgccgtgactccctgactggcagcagtgacctttataagaggacatcgagcagcttgacccccattggacacagtttttataacggccttagcttttcctcctctcctggacccgtgggcatgcctctccctagtcagggaccaggacattcacagacaccacctccttccctctcttcacatggatcctcttcaagcttaaacctgggaggactcacgaatggcagtggaagatacatctctgctgctccaggcgctgaagccaagtaccgcagtgcaagcagcgcctccagcctcttcagcccgagcagcactcttttctcttcctctcgtttgcgatatggaatgtctgatgtcatgccttctggcaggagcaggcttttggaagattttcgaaacaaccggtaccccaatttacaactgcgggagattgctggacatataatggaattttcccaagaccagcatgggtccagattcattcagctgaaactggagcgtgccacaccagctgagcgccagcttgtcttcaatgaaatcctccaggctgcctaccaactcatggtggatgtgtttggtaattacgtcattcagaagttctttgaatttggcagtcttgaacagaagctggctttggcagaacggattcgaggccacgtcctgtcattggcactacagatgtatggctgccgtgttatccagaaagctcttgagtttattccttcagaccagcagaatgagatggttcgggaactagatggccatgtcttgaagtgtgtgaaagatcagaatggcaatcacgtggttcagaaatgcattgaatgtgtacagccccagtctttgcaatttatcatcgatgcgtttaagggacaggtatttgccttatccacacatccttatggctgccgagtgattcagagaatcctggagcactgtctccctgaccagacactccctattttagaggagcttcaccagcacacagagcagcttgtacaggatcaatatggaaattatgtaatccaacatgtactggagcacggtcgtcctgaggataaaagcaaaattgtagcagaaatccgaggcaatgtacttgtattgagtcagcacaaatttgcaagcaatgttgtggagaagtgtgttactcacgcctcacgtacggagcgcgctgtgctcatcgatgaggtgtgcaccatgaacgacggtccccacagtgccttatacaccatgatgaaggaccagtatgccaactacgtggtccagaagatgattgacgtggcggagccaggccagcggaagatcgtcatgcataagatccggccccacatcgcaactcttcgtaagtacacctatggcaagcacattctggccaagctggagaagtactacatgaagaacggtgttgacttagggcccatctgtggcccccctaatggtatcatctgaggcagtgtcacccgctgttccctcattcccgctgacctcactggcccactggcaaatccaaccagcaaccagaaatgttctagtgtagagtctgagacgggcaagtggttgctccaggattactccctcctccaaaaaaggaatcaaatccacgagtggaaaagcctttgtaaatttaattttattacacataacatgtactattttttttaattgactaattgccctgctgttttactggtgtataggatacttgtacataggtaaccaatgtacatgggaggccacatattttgttcactgttgtatctatatttcacatgtggaaactttcagggtggttggtttaacaaaaaaaaaaagctttaaaaaaaaaagaaaaaaaggaaaaggtttttagctcatttgcctggccggcaagttttgcaaatagctcttccccacctcctcattttagtaaaaaacaaacaaaaacaaaaaaacctgagaagtttgaattgtagttaaatgaccccaaactggcatttaacactgtttataaaaaatatatatatatatatatatatataatgaaaaaggtttcagagttgctaaagcttcagtttgtgacattaagtttatgaaattctaaaaaatgccttttttggagactatattatgctgaagaaggctgttcgtgaggaggagatgcgagcacccagaacgtcttttgaggctgggcgggtgtgattgtttactgcctactggatttttttctattaacattgaaaggtaaaatctgattatttagcatgagaaaaaaaaatccaactctgcttttggtcttgcttctataaatatatagtgtatacttggtgtagactttgcatatatacaaatttgtagtattttcttgttttgatgtctaatctgtatctataatgtaccctagtagtcgaacatacttttgattgtacaattgtacatttgtatacctgtaatgtaaatgtggagaagtttgaatcaacataaacacgttttttggtaagaaaagagaattagccagccctgtgcattcagtgtatattctcaccttttatggtcgtagcatatagtgttgtatattgtaaattgtaatttcaaccagaagtaaatttttttcttttgaaggaataaatgttctttatacagcctagttaatgtttaaaaagaaaaaaatagcttggttttatttgtcatctagtctcaagtatagcgagattctttctaaatgttattcaagattgagttctcactagtgtttttttaatcctaaaaaagtaatgttttgattttgtgacagtcaaaaggacgtgcaaaagtctagccttgcccgagctttccttacaatcagagcccctctcaccttgtaaagtgtgaatcgcccttcccttttgtacagaagatgaactgtattttgcattttgtctacttgtaagtgaatgtaacatactgtcaattttccttgtttgaatatagaattgtaacactacacggtgtacatttccagagccttgtgtatatttccaatgaacttttttgcaagcacacttgtaaccatatgtgtataattaacaaacctgtgtatgcttatgcctgggcaactattttttgtaactcttgtgtagattgtctctaaacaatgtgtgatctttattttgaaaaatacagaactttggaatctgaaaaaaaaaaaaaaaaaaaaaaaanaanaaaaanaaaaaacaaaacaaaaacannnaananaaanaaacacaaaanaaanannaaaacacaacaaca

SEQ ID NO: 60798 - DNA, 5307 bp, Homo sapiens
  misc_feature (5235)..(5235): n is a, c, g, or t
  misc_feature (5238)..(5238): n is a, c, g, or t
  misc_feature (5244)..(5244): n is a, c, g, or t
  misc_feature (5264)..(5266): n is a, c, g, or t
  misc_feature (5269)..(5269): n is a, c, g, or t
  misc_feature (5271)..(5271): n is a, c, g, or t
  misc_feature (5275)..(5275): n is a, c, g, or t
  misc_feature (5286)..(5286): n is a, c, g, or t
  misc_feature (5290)..(5290): n is a, c, g, or t
  misc_feature (5292)..(5293): n is a, c, g, or t
aacccagtccccagtgggccgccatgttgtgggagtgaaaggtaagggggagcgagagcgccagagagagaagatcggggggctgaaatccatcttcatcctaccgctccgcccgtgttggtggaatgagcgttgcatgtgtcttgaagagaaaagcagtgctttggcaggactctttcagcccccacctgaaacatcaccctcaagaaccagctaatcccaacatgcctgttgttttgacatctggaacagggtcgcaagcgcagccacaaccagctgcaaatcaggctcttgcagctgggactcactccagccctgtcccaggatctataggagttgcaggccgttcccaggacgacgctatggtggactacttctttcagaggcagcatggtgagcagcttgggggaggaggaagtggaggaggcggctataataatagcaaacatcgatggcctactggggataacattcatgcagaacatcaggtgcgttccatggatgaactgaatcatgattttcaagcacttgctctggagggaagagcgatgggagagcagctcttgccaggtaaaaagttttgggaaacagatgaatccagcaaagatggaccaaaaggaatattcctgggtgatcaatggcgagacagtgcctggggaacatcagggcccaagggatgcagacagtgatgaaaacgacaaaggtgaaaagaagaacaagggtacgtttgatggagataagctaggagatttgaaggaggagggtgatgtgatggacaagaccaatggtttaccagtgcagaatgggattgatgcagacgtcaaagattttagccgtacccctggtaattgccagaactctgctaatgaagtggatcttctgggtccaaaccagaatggttctgagggcttagcccagctgaccagcaccaatggtgccaagcctgtggaggatttctccaacatggagtcccagagtgtccccttggaccccatggaacatgtgggcatggagcctcttcagtttgattattcaggcacgcaggtacctgtggactcagcagcagcaactgtgggactttttgactacaattctcaacaacagctgttccaaagacctaatgcgcttgctgtccagcagttgacagctgctcagcagcagcagtatgcactggcagctgctcatcagccgcacatcggtttagctcccgctgcgtttgtccccaatccatacatcatcagcgctgctcccccagggacggacccctacacagctggattggctgcagcagcgacactaggcccagctgtggtccctcaccagtattatggagttactccctggggagtctaccctgccagtcttttccagcagcaagctgccgctgccgctgcagcaactaattcagctaatcaacagaccaccccacaggctcagcaaggacagcagcaggttctccgtggaggagccagccaacgtcctttgaccccaaaccagaaccagcagggacagcaaacggatccccttgtggcagctgcagcagtgaattctgcccttgcatttggacaaggtctggcagcaggcatgccaggttatccggtgttggctcctgctgcttactatgaccaaactggtgcccttgtagtgaatgcaggcgcgagaaatggtcttggagctcctgttcgacttgtagctcctgccccagtcatcattagttcctcagctgcacaagcagctgttgcagcagccgcagcttcagcaaatggagcagctggtggtcttgctggaacaacaaatggaccatttcgccctttaggaacacagcagcctcagccccagccccagcagcagcccaataacaacctggcatccagttctttctacggcaacaactctctgaacagcaattcacagagcagctccctcttctcccagggctctgcccagcctgccaacacatccttgggattcggaagtagcagttctctcggcgccaccctgggatccgcccttggagggtttggaacagcagttgcaaactccaacactggcagtggctcccgccgtgactccctgactggcagcagtgacctttataagaggacatcgagcagcttgacccccattggacacagtttttataacggccttagcttttcctcctctcctggacccgtgggcatgcctctccctagtcagggaccaggacattcacagacaccacctccttccctctcttcacatggatcctcttcaagcttaaacctgggaggactcacgaatggcagtggaagatacatctctgctgctccaggcgctgaagccaagtaccgcagtgcaagcagcgcctccagcctcttcagcccgagcagcactcttttctcttcctctcgtttgcgatatggaatgtctgatgtcatgccttctggcaggagcaggcttttggaagattttcgaaacaaccggtaccccaatttacaactgcgggagattgctggacatataatggaattttcccaagaccagcatgggtccagattcattcagctgaaactggagcgtgccacaccagctgagcgccagcttgtcttcaatgaaatcctccaggctgcctaccaactcatggtggatgtgtttggtaattacgtcattcagaagttctttgaatttggcagtcttgaacagaagctggctttggcagaacggattcgaggccacgtcctgtcattggcactacagatgtatggctgccgtgttatccagaaagctcttgagtttattccttcagaccagcagaatgagatggttcgggaactagatggccatgtcttgaagtgtgtgaaagatcagaatggcaatcacgtggttcagaaatgcattgaatgtgtacagccccagtctttgcaatttatcatcgatgcgtttaagggacaggtatttgccttatccacacatccttatggctgccgagtgattcagagaatcctggagcactgtctccctgaccagacactccctattttagaggagcttcaccagcacacagagcagcttgtacaggatcaatatggaaattatgtaatccaacatgtactggagcacggtcgtcctgaggataaaagcaaaattgtagcagaaatccgaggcaatgtacttgtattgagtcagcacaaatttgcaagcaatgttgtggagaagtgtgttactcacgcctcacgtacggagcgcgctgtgctcatcgatgaggtgtgcaccatgaacgacggtccccacagtgccttatacaccatgatgaaggaccagtatgccaactacgtggtccagaagatgattgacgtggcggagccaggccagcggaagatcgtcatgcataagatccggccccacatcgcaactcttcgtaagtacacctatggcaagcacattctggccaagctggagaagtactacatgaagaacggtgttgacttagggcccatctgtggcccccctaatggtatcatctgaggcagtgtcacccgctgttccctcattcccgctgacctcactggcccactggcaaatccaaccagcaaccagaaatgttctagtgtagagtctgagacgggcaagtggttgctccaggattactccctcctccaaaaaaggaatcaaatccacgagtggaaaagcctttgtaaatttaattttattacacataacatgtactattttttttaattgactaattgccctgctgttttactggtgtataggatacttgtacataggtaaccaatgtacatgggaggccacatattttgttcactgttgtatctatatttcacatgtggaaactttcagggtggttggtttaacaaaaaaaaaaagctttaaaaaaaaaagaaaaaaaggaaaaggtttttagctcatttgcctggccggcaagttttgcaaatagctcttccccacctcctcattttagtaaaaaacaaacaaaaacaaaaaaacctgagaagtttgaattgtagttaaatgaccccaaactggcatttaacactgtttataaaaaatatatatatatatatatatatataatgaaaaaggtttcagagttgctaaagcttcagtttgtgacattaagtttatgaaattctaaaaaatgccttttttggagactatattatgctgaagaaggctgttcgtgaggaggagatgcgagcacccagaacgtcttttgaggctgggcgggtgtgattgtttactgcctactggatttttttctattaacattgaaaggtaaaatctgattatttagcatgagaaaaaaaaatccaactctgcttttggtcttgcttctataaatatatagtgtatacttggtgtagactttgcatatatacaaatttgtagtattttcttgttttgatgtctaatctgtatctataatgtaccctagtagtcgaacatacttttgattgtacaattgtacatttgtatacctgtaatgtaaatgtggagaagtttgaatcaacataaacacgttttttggtaagaaaagagaattagccagccctgtgcattcagtgtatattctcaccttttatggtcgtagcatatagtgttgtatattgtaaattgtaatttcaaccagaagtaaatttttttcttttgaaggaataaatgttctttatacagcctagttaatgtttaaaaagaaaaaaatagcttggttttatttgtcatctagtctcaagtatagcgagattctttctaaatgttattcaagattgagttctcactagtgtttttttaatcctaaaaaagtaatgttttgattttgtgacagtcaaaaggacgtgcaaaagtctagccttgcccgagctttccttacaatcagagcccctctcaccttgtaaagtgtgaatcgcccttcccttttgtacagaagatgaactgtattttgcattttgtctacttgtaagtgaatgtaacatactgtcaattttccttgtttgaatatagaattgtaacactacacggtgtacatttccagagccttgtgtatatttccaatgaacttttttgcaagcacacttgtaaccatatgtgtataattaacaaacctgtgtatgcttatgcctgggcaactattttttgtaactcttgtgtagattgtctctaaacaatgtgtgatctttattttgaaaaatacagaactttggaatctgaaaaaaaaaaaaaaaaaaaaaaaanaanaaaaanaaaaaacaaaacaaaaacannnaananaaanaaacacaaaanaaanannaaaacacaacaaca

SEQ ID NO: 60799 - DNA, 3891 bp, Homo sapiens
  misc_feature (3819)..(3819): n is a, c, g, or t
  misc_feature (3822)..(3822): n is a, c, g, or t
  misc_feature (3828)..(3828): n is a, c, g, or t
  misc_feature (3848)..(3850): n is a, c, g, or t
  misc_feature (3853)..(3853): n is a, c, g, or t
  misc_feature (3855)..(3855): n is a, c, g, or t
  misc_feature (3859)..(3859): n is a, c, g, or t
  misc_feature (3870)..(3870): n is a, c, g, or t
  misc_feature (3874)..(3874): n is a, c, g, or t
  misc_feature (3876)..(3877): n is a, c, g, or t
gtacagacgggagtatccagacgctgattgtatctggtcggtgagtgatcacggacggtcggtttatacccgaatcaggagcataagagagcaagcgagagggatccccttgtggcagctgcagcagtgaattctgcccttgcatttggacaaggtctggcagcaggcatgccaggttatccggtgttggctcctgctgcttactatgaccaaactggtgcccttgtagtgaatgcaggcgcgagaaatggtcttggagctcctgttcgacttgtagctcctgccccagtcatcattagttcctcagctgcacaagcagctgttgcagcagccgcagcttcagcaaatggagcagctggtggtcttgctggaacaacaaatggaccatttcgccctttaggaacacagcagcctcagccccagccccagcagcagcccaataacaacctggcatccagttctttctacggcaacaactctctgaacagcaattcacagagcagctccctcttctcccagggctctgcccagcctgccaacacatccttgggattcggaagtagcagttctctcggcgccaccctgggatccgcccttggagggtttggaacagcagttgcaaactccaacactggcagtggctcccgccgtgactccctgactggcagcagtgacctttataagaggacatcgagcagcttgacccccattggacacagtttttataacggccttagcttttcctcctctcctggacccgtgggcatgcctctccctagtcagggaccaggacattcacagacaccacctccttccctctcttcacatggatcctcttcaagcttaaacctgggaggactcacgaatggcagtggaagatacatctctgctgctccaggcgctgaagccaagtaccgcagtgcaagcagcgcctccagcctcttcagcccgagcagcactcttttctcttcctctcgtttgcgatatggaatgtctgatgtcatgccttctggcaggagcaggcttttggaagattttcgaaacaaccggtaccccaatttacaactgcgggagattgctggacatataatggaattttcccaagaccagcatgggtccagattcattcagctgaaactggagcgtgccacaccagctgagcgccagcttgtcttcaatgaaatcctccaggctgcctaccaactcatggtggatgtgtttggtaattacgtcattcagaagttctttgaatttggcagtcttgaacagaagctggctttggcagaacggattcgaggccacgtcctgtcattggcactacagatgtatggctgccgtgttatccagaaagctcttgagtttattccttcagaccagcagaatgagatggttcgggaactagatggccatgtcttgaagtgtgtgaaagatcagaatggcaatcacgtggttcagaaatgcattgaatgtgtacagccccagtctttgcaatttatcatcgatgcgtttaagggacaggtatttgccttatccacacatccttatggctgccgagtgattcagagaatcctggagcactgtctccctgaccagacactccctattttagaggagcttcaccagcacacagagcagcttgtacaggatcaatatggaaattatgtaatccaacatgtactggagcacggtcgtcctgaggataaaagcaaaattgtagcagaaatccgaggcaatgtacttgtattgagtcagcacaaatttgcaagcaatgttgtggagaagtgtgttactcacgcctcacgtacggagcgcgctgtgctcatcgatgaggtgtgcaccatgaacgacggtccccacagtgccttatacaccatgatgaaggaccagtatgccaactacgtggtccagaagatgattgacgtggcggagccaggccagcggaagatcgtcatgcataagatccggccccacatcgcaactcttcgtaagtacacctatggcaagcacattctggccaagctggagaagtactacatgaagaacggtgttgacttagggcccatctgtggcccccctaatggtatcatctgaggcagtgtcacccgctgttccctcattcccgctgacctcactggcccactggcaaatccaaccagcaaccagaaatgttctagtgtagagtctgagacgggcaagtggttgctccaggattactccctcctccaaaaaaggaatcaaatccacgagtggaaaagcctttgtaaatttaattttattacacataacatgtactattttttttaattgactaattgccctgctgttttactggtgtataggatacttgtacataggtaaccaatgtacatgggaggccacatattttgttcactgttgtatctatatttcacatgtggaaactttcagggtggttggtttaacaaaaaaaaaaagctttaaaaaaaaaagaaaaaaaggaaaaggtttttagctcatttgcctggccggcaagttttgcaaatagctcttccccacctcctcattttagtaaaaaacaaacaaaaacaaaaaaacctgagaagtttgaattgtagttaaatgaccccaaactggcatttaacactgtttataaaaaatatatatatatatatatatatataatgaaaaaggtttcagagttgctaaagcttcagtttgtgacattaagtttatgaaattctaaaaaatgccttttttggagactatattatgctgaagaaggctgttcgtgaggaggagatgcgagcacccagaacgtcttttgaggctgggcgggtgtgattgtttactgcctactggatttttttctattaacattgaaaggtaaaatctgattatttagcatgagaaaaaaaaatccaactctgcttttggtcttgcttctataaatatatagtgtatacttggtgtagactttgcatatatacaaatttgtagtattttcttgttttgatgtctaatctgtatctataatgtaccctagtagtcgaacatacttttgattgtacaattgtacatttgtatacctgtaatgtaaatgtggagaagtttgaatcaacataaacacgttttttggtaagaaaagagaattagccagccctgtgcattcagtgtatattctcaccttttatggtcgtagcatatagtgttgtatattgtaaattgtaatttcaaccagaagtaaatttttttcttttgaaggaataaatgttctttatacagcctagttaatgtttaaaaagaaaaaaatagcttggttttatttgtcatctagtctcaagtatagcgagattctttctaaatgttattcaagattgagttctcactagtgtttttttaatcctaaaaaagtaatgttttgattttgtgacagtcaaaaggacgtgcaaaagtctagccttgcccgagctttccttacaatcagagcccctctcaccttgtaaagtgtgaatcgcccttcccttttgtacagaagatgaactgtattttgcattttgtctacttgtaagtgaatgtaacatactgtcaattttccttgtttgaatatagaattgtaacactacacggtgtacatttccagagccttgtgtatatttccaatgaacttttttgcaagcacacttgtaaccatatgtgtataattaacaaacctgtgtatgcttatgcctgggcaactattttttgtaactcttgtgtagattgtctctaaacaatgtgtgatctttattttgaaaaatacagaactttggaatctgaaaaaaaaaaaaaaaaaaaaaaaanaanaaaaanaaaaaacaaaacaaaaacannnaananaaanaaacacaaaanaaanannaaaacacaacaaca

SEQ ID NO: 60800 - DNA, 3675 bp, Homo sapiens
  misc_feature (3603)..(3603): n is a, c, g, or t
  misc_feature (3606)..(3606): n is a, c, g, or t
  misc_feature (3612)..(3612): n is a, c, g, or t
  misc_feature (3632)..(3634): n is a, c, g, or t
  misc_feature (3637)..(3637): n is a, c, g, or t
  misc_feature (3639)..(3639): n is a, c, g, or t
  misc_feature (3643)..(3643): n is a, c, g, or t
  misc_feature (3654)..(3654): n is a, c, g, or t
  misc_feature (3658)..(3658): n is a, c, g, or t
  misc_feature (3660)..(3661): n is a, c, g, or t
aagataggcagcattaaaagattttttgaaaaaagataaaaatgtagtttggaaatgtggccagtccctttcatagccaaacggtttgctttcttcttcatagctgttgcagcagccgcagcttcagcaaatggagcagctggtggtcttgctggaacaacaaatggaccatttcgccctttaggaacacagcagcctcagccccagccccagcagcagcccaataacaacctggcatccagttctttctacggcaacaactctctgaacagcaattcacagagcagctccctcttctcccagggctctgcccagcctgccaacacatccttgggattcggaagtagcagttctctcggcgccaccctgggatccgcccttggagggtttggaacagcagttgcaaactccaacactggcagtggctcccgccgtgactccctgactggcagcagtgacctttataagaggacatcgagcagcttgacccccattggacacagtttttataacggccttagcttttcctcctctcctggacccgtgggcatgcctctccctagtcagggaccaggacattcacagacaccacctccttccctctcttcacatggatcctcttcaagcttaaacctgggaggactcacgaatggcagtggaagatacatctctgctgctccaggcgctgaagccaagtaccgcagtgcaagcagcgcctccagcctcttcagcccgagcagcactcttttctcttcctctcgtttgcgatatggaatgtctgatgtcatgccttctggcaggagcaggcttttggaagattttcgaaacaaccggtaccccaatttacaactgcgggagattgctggacatataatggaattttcccaagaccagcatgggtccagattcattcagctgaaactggagcgtgccacaccagctgagcgccagcttgtcttcaatgaaatcctccaggctgcctaccaactcatggtggatgtgtttggtaattacgtcattcagaagttctttgaatttggcagtcttgaacagaagctggctttggcagaacggattcgaggccacgtcctgtcattggcactacagatgtatggctgccgtgttatccagaaagctcttgagtttattccttcagaccagcagaatgagatggttcgggaactagatggccatgtcttgaagtgtgtgaaagatcagaatggcaatcacgtggttcagaaatgcattgaatgtgtacagccccagtctttgcaatttatcatcgatgcgtttaagggacaggtatttgccttatccacacatccttatggctgccgagtgattcagagaatcctggagcactgtctccctgaccagacactccctattttagaggagcttcaccagcacacagagcagcttgtacaggatcaatatggaaattatgtaatccaacatgtactggagcacggtcgtcctgaggataaaagcaaaattgtagcagaaatccgaggcaatgtacttgtattgagtcagcacaaatttgcaagcaatgttgtggagaagtgtgttactcacgcctcacgtacggagcgcgctgtgctcatcgatgaggtgtgcaccatgaacgacggtccccacagtgccttatacaccatgatgaaggaccagtatgccaactacgtggtccagaagatgattgacgtggcggagccaggccagcggaagatcgtcatgcataagatccggccccacatcgcaactcttcgtaagtacacctatggcaagcacattctggccaagctggagaagtactacatgaagaacggtgttgacttagggcccatctgtggcccccctaatggtatcatctgaggcagtgtcacccgctgttccctcattcccgctgacctcactggcccactggcaaatccaaccagcaaccagaaatgttctagtgtagagtctgagacgggcaagtggttgctccaggattactccctcctccaaaaaaggaatcaaatccacgagtggaaaagcctttgtaaatttaattttattacacataacatgtactattttttttaattgactaattgccctgctgttttactggtgtataggatacttgtacataggtaaccaatgtacatgggaggccacatattttgttcactgttgtatctatatttcacatgtggaaactttcagggtggttggtttaacaaaaaaaaaaagctttaaaaaaaaaagaaaaaaaggaaaaggtttttagctcatttgcctggccggcaagttttgcaaatagctcttccccacctcctcattttagtaaaaaacaaacaaaaacaaaaaaacctgagaagtttgaattgtagttaaatgaccccaaactggcatttaacactgtttataaaaaatatatatatatatatatatatataatgaaaaaggtttcagagttgctaaagcttcagtttgtgacattaagtttatgaaattctaaaaaatgccttttttggagactatattatgctgaagaaggctgttcgtgaggaggagatgcgagcacccagaacgtcttttgaggctgggcgggtgtgattgtttactgcctactggatttttttctattaacattgaaaggtaaaatctgattatttagcatgagaaaaaaaaatccaactctgcttttggtcttgcttctataaatatatagtgtatacttggtgtagactttgcatatatacaaatttgtagtattttcttgttttgatgtctaatctgtatctataatgtaccctagtagtcgaacatacttttgattgtacaattgtacatttgtatacctgtaatgtaaatgtggagaagtttgaatcaacataaacacgttttttggtaagaaaagagaattagccagccctgtgcattcagtgtatattctcaccttttatggtcgtagcatatagtgttgtatattgtaaattgtaatttcaaccagaagtaaatttttttcttttgaaggaataaatgttctttatacagcctagttaatgtttaaaaagaaaaaaatagcttggttttatttgtcatctagtctcaagtatagcgagattctttctaaatgttattcaagattgagttctcactagtgtttttttaatcctaaaaaagtaatgttttgattttgtgacagtcaaaaggacgtgcaaaagtctagccttgcccgagctttccttacaatcagagcccctctcaccttgtaaagtgtgaatcgcccttcccttttgtacagaagatgaactgtattttgcattttgtctacttgtaagtgaatgtaacatactgtcaattttccttgtttgaatatagaattgtaacactacacggtgtacatttccagagccttgtgtatatttccaatgaacttttttgcaagcacacttgtaaccatatgtgtataattaacaaacctgtgtatgcttatgcctgggcaactattttttgtaactcttgtgtagattgtctctaaacaatgtgtgatctttattttgaaaaatacagaactttggaatctgaaaaaaaaaaaaaaaaaaaaaaaanaanaaaaanaaaaaacaaaacaaaaacannnaananaaanaaacacaaaanaaanannaaaacacaacaaca

SEQ ID NO: 60801 - DNA, 3502 bp, Homo sapiens
  misc_feature (3430)..(3430): n is a, c, g, or t
  misc_feature (3433)..(3433): n is a, c, g, or t
  misc_feature (3439)..(3439): n is a, c, g, or t
  misc_feature (3459)..(3461): n is a, c, g, or t
  misc_feature (3464)..(3464): n is a, c, g, or t
  misc_feature (3466)..(3466): n is a, c, g, or t
  misc_feature (3470)..(3470): n is a, c, g, or t
  misc_feature (3481)..(3481): n is a, c, g, or t
  misc_feature (3485)..(3485): n is a, c, g, or t
  misc_feature (3487)..(3488): n is a, c, g, or t
acgtggccgaggatcacagccaggaaacacctagccccagcagcagcccaataacaacctggcatccagttctttctacggcaacaactctctgaacagcaattcacagagcagctccctcttctcccagggctctgcccagcctgccaacacatccttgggattcggaagtagcagttctctcggcgccaccctgggatccgcccttggagggtttggaacagcagttgcaaactccaacactggcagtggctcccgccgtgactccctgactggcagcagtgacctttataagaggacatcgagcagcttgacccccattggacacagtttttataacggccttagcttttcctcctctcctggacccgtgggcatgcctctccctagtcagggaccaggacattcacagacaccacctccttccctctcttcacatggatcctcttcaagcttaaacctgggaggactcacgaatggcagtggaagatacatctctgctgctccaggcgctgaagccaagtaccgcagtgcaagcagcgcctccagcctcttcagcccgagcagcactcttttctcttcctctcgtttgcgatatggaatgtctgatgtcatgccttctggcaggagcaggcttttggaagattttcgaaacaaccggtaccccaatttacaactgcgggagattgctggacatataatggaattttcccaagaccagcatgggtccagattcattcagctgaaactggagcgtgccacaccagctgagcgccagcttgtcttcaatgaaatcctccaggctgcctaccaactcatggtggatgtgtttggtaattacgtcattcagaagttctttgaatttggcagtcttgaacagaagctggctttggcagaacggattcgaggccacgtcctgtcattggcactacagatgtatggctgccgtgttatccagaaagctcttgagtttattccttcagaccagcagaatgagatggttcgggaactagatggccatgtcttgaagtgtgtgaaagatcagaatggcaatcacgtggttcagaaatgcattgaatgtgtacagccccagtctttgcaatttatcatcgatgcgtttaagggacaggtatttgccttatccacacatccttatggctgccgagtgattcagagaatcctggagcactgtctccctgaccagacactccctattttagaggagcttcaccagcacacagagcagcttgtacaggatcaatatggaaattatgtaatccaacatgtactggagcacggtcgtcctgaggataaaagcaaaattgtagcagaaatccgaggcaatgtacttgtattgagtcagcacaaatttgcaagcaatgttgtggagaagtgtgttactcacgcctcacgtacggagcgcgctgtgctcatcgatgaggtgtgcaccatgaacgacggtccccacagtgccttatacaccatgatgaaggaccagtatgccaactacgtggtccagaagatgattgacgtggcggagccaggccagcggaagatcgtcatgcataagatccggccccacatcgcaactcttcgtaagtacacctatggcaagcacattctggccaagctggagaagtactacatgaagaacggtgttgacttagggcccatctgtggcccccctaatggtatcatctgaggcagtgtcacccgctgttccctcattcccgctgacctcactggcccactggcaaatccaaccagcaaccagaaatgttctagtgtagagtctgagacgggcaagtggttgctccaggattactccctcctccaaaaaaggaatcaaatccacgagtggaaaagcctttgtaaatttaattttattacacataacatgtactattttttttaattgactaattgccctgctgttttactggtgtataggatacttgtacataggtaaccaatgtacatgggaggccacatattttgttcactgttgtatctatatttcacatgtggaaactttcagggtggttggtttaacaaaaaaaaaaagctttaaaaaaaaaagaaaaaaaggaaaaggtttttagctcatttgcctggccggcaagttttgcaaatagctcttccccacctcctcattttagtaaaaaacaaacaaaaacaaaaaaacctgagaagtttgaattgtagttaaatgaccccaaactggcatttaacactgtttataaaaaatatatatatatatatatatatataatgaaaaaggtttcagagttgctaaagcttcagtttgtgacattaagtttatgaaattctaaaaaatgccttttttggagactatattatgctgaagaaggctgttcgtgaggaggagatgcgagcacccagaacgtcttttgaggctgggcgggtgtgattgtttactgcctactggatttttttctattaacattgaaaggtaaaatctgattatttagcatgagaaaaaaaaatccaactctgcttttggtcttgcttctataaatatatagtgtatacttggtgtagactttgcatatatacaaatttgtagtattttcttgttttgatgtctaatctgtatctataatgtaccctagtagtcgaacatacttttgattgtacaattgtacatttgtatacctgtaatgtaaatgtggagaagtttgaatcaacataaacacgttttttggtaagaaaagagaattagccagccctgtgcattcagtgtatattctcaccttttatggtcgtagcatatagtgttgtatattgtaaattgtaatttcaaccagaagtaaatttttttcttttgaaggaataaatgttctttatacagcctagttaatgtttaaaaagaaaaaaatagcttggttttatttgtcatctagtctcaagtatagcgagattctttctaaatgttattcaagattgagttctcactagtgtttttttaatcctaaaaaagtaatgttttgattttgtgacagtcaaaaggacgtgcaaaagtctagccttgcccgagctttccttacaatcagagcccctctcaccttgtaaagtgtgaatcgcccttcccttttgtacagaagatgaactgtattttgcattttgtctacttgtaagtgaatgtaacatactgtcaattttccttgtttgaatatagaattgtaacactacacggtgtacatttccagagccttgtgtatatttccaatgaacttttttgcaagcacacttgtaaccatatgtgtataattaacaaacctgtgtatgcttatgcctgggcaactattttttgtaactcttgtgtagattgtctctaaacaatgtgtgatctttattttgaaaaatacagaactttggaatctgaaaaaaaaaaaaaaaaaaaaaaaanaanaaaaanaaaaaacaaaacaaaaacannnaananaaanaaacacaaaanaaanannaaaacacaacaaca

SEQ ID NO: 60802 - DNA, 3256 bp, Homo sapiens
  misc_feature (3184)..(3184): n is a, c, g, or t
  misc_feature (3187)..(3187): n is a, c, g, or t
  misc_feature (3193)..(3193): n is a, c, g, or t
  misc_feature (3213)..(3215): n is a, c, g, or t
  misc_feature (3218)..(3218): n is a, c, g, or t
  misc_feature (3220)..(3220): n is a, c, g, or t
  misc_feature (3224)..(3224): n is a, c, g, or t
  misc_feature (3235)..(3235): n is a, c, g, or t
  misc_feature (3239)..(3239): n is a, c, g, or t
  misc_feature (3241)..(3242): n is a, c, g, or t
aacccagtccccagtgggccgccatgttgtgggagtgaaaggtaagggggagcgagagcgccagagagagaagatcggggggctgaaatccatcttcatcctaccgctccgccctcctggacccgtgggcatgcctctccctagtcagggaccaggacattcacagacaccacctccttccctctcttcacatggatcctcttcaagcttaaacctgggaggactcacgaatggcagtggaagatacatctctgctgctccaggcgctgaagccaagtaccgcagtgcaagcagcgcctccagcctcttcagcccgagcagcactcttttctcttcctctcgtttgcgatatggaatgtctgatgtcatgccttctggcaggagcaggcttttggaagattttcgaaacaaccggtaccccaatttacaactgcgggagattgctggacatataatggaattttcccaagaccagcatgggtccagattcattcagctgaaactggagcgtgccacaccagctgagcgccagcttgtcttcaatgaaatcctccaggctgcctaccaactcatggtggatgtgtttggtaattacgtcattcagaagttctttgaatttggcagtcttgaacagaagctggctttggcagaacggattcgaggccacgtcctgtcattggcactacagatgtatggctgccgtgttatccagaaagctcttgagtttattccttcagaccagcagaatgagatggttcgggaactagatggccatgtcttgaagtgtgtgaaagatcagaatggcaatcacgtggttcagaaatgcattgaatgtgtacagccccagtctttgcaatttatcatcgatgcgtttaagggacaggtatttgccttatccacacatccttatggctgccgagtgattcagagaatcctggagcactgtctccctgaccagacactccctattttagaggagcttcaccagcacacagagcagcttgtacaggatcaatatggaaattatgtaatccaacatgtactggagcacggtcgtcctgaggataaaagcaaaattgtagcagaaatccgaggcaatgtacttgtattgagtcagcacaaatttgcaagcaatgttgtggagaagtgtgttactcacgcctcacgtacggagcgcgctgtgctcatcgatgaggtgtgcaccatgaacgacggtccccacagtgccttatacaccatgatgaaggaccagtatgccaactacgtggtccagaagatgattgacgtggcggagccaggccagcggaagatcgtcatgcataagatccggccccacatcgcaactcttcgtaagtacacctatggcaagcacattctggccaagctggagaagtactacatgaagaacggtgttgacttagggcccatctgtggcccccctaatggtatcatctgaggcagtgtcacccgctgttccctcattcccgctgacctcactggcccactggcaaatccaaccagcaaccagaaatgttctagtgtagagtctgagacgggcaagtggttgctccaggattactccctcctccaaaaaaggaatcaaatccacgagtggaaaagcctttgtaaatttaattttattacacataacatgtactattttttttaattgactaattgccctgctgttttactggtgtataggatacttgtacataggtaaccaatgtacatgggaggccacatattttgttcactgttgtatctatatttcacatgtggaaactttcagggtggttggtttaacaaaaaaaaaaagctttaaaaaaaaaagaaaaaaaggaaaaggtttttagctcatttgcctggccggcaagttttgcaaatagctcttccccacctcctcattttagtaaaaaacaaacaaaaacaaaaaaacctgagaagtttgaattgtagttaaatgaccccaaactggcatttaacactgtttataaaaaatatatatatatatatatatatataatgaaaaaggtttcagagttgctaaagcttcagtttgtgacattaagtttatgaaattctaaaaaatgccttttttggagactatattatgctgaagaaggctgttcgtgaggaggagatgcgagcacccagaacgtcttttgaggctgggcgggtgtgattgtttactgcctactggatttttttctattaacattgaaaggtaaaatctgattatttagcatgagaaaaaaaaatccaactctgcttttggtcttgcttctataaatatatagtgtatacttggtgtagactttgcatatatacaaatttgtagtattttcttgttttgatgtctaatctgtatctataatgtaccctagtagtcgaacatacttttgattgtacaattgtacatttgtatacctgtaatgtaaatgtggagaagtttgaatcaacataaacacgttttttggtaagaaaagagaattagccagccctgtgcattcagtgtatattctcaccttttatggtcgtagcatatagtgttgtatattgtaaattgtaatttcaaccagaagtaaatttttttcttttgaaggaataaatgttctttatacagcctagttaatgtttaaaaagaaaaaaatagcttggttttatttgtcatctagtctcaagtatagcgagattctttctaaatgttattcaagattgagttctcactagtgtttttttaatcctaaaaaagtaatgttttgattttgtgacagtcaaaaggacgtgcaaaagtctagccttgcccgagctttccttacaatcagagcccctctcaccttgtaaagtgtgaatcgcccttcccttttgtacagaagatgaactgtattttgcattttgtctacttgtaagtgaatgtaacatactgtcaattttccttgtttgaatatagaattgtaacactacacggtgtacatttccagagccttgtgtatatttccaatgaacttttttgcaagcacacttgtaaccatatgtgtataattaacaaacctgtgtatgcttatgcctgggcaactattttttgtaactcttgtgtagattgtctctaaacaatgtgtgatctttattttgaaaaatacagaactttggaatctgaaaaaaaaaaaaaaaaaaaaaaaanaanaaaaanaaaaaacaaaacaaaaacannnaananaaanaaacacaaaanaaanannaaaacacaacaaca

SEQ ID NO: 60803 - DNA, 3129 bp, Homo sapiens
  misc_feature (3057)..(3057): n is a, c, g, or t
  misc_feature (3060)..(3060): n is a, c, g, or t
  misc_feature (3066)..(3066): n is a, c, g, or t
  misc_feature (3086)..(3088): n is a, c, g, or t
  misc_feature (3091)..(3091): n is a, c, g, or t
  misc_feature (3093)..(3093): n is a, c, g, or t
  misc_feature (3097)..(3097): n is a, c, g, or t
  misc_feature (3108)..(3108): n is a, c, g, or t
  misc_feature (3112)..(3112): n is a, c, g, or t
  misc_feature (3114)..(3115): n is a, c, g, or t
gcggccgcggagcaagaagggcgccgcggcgtgcggcccgcgcagcccccggagccatgggcaagtgcagcgggcgctgcacgctggtcgccttctgctgcctgcagctgtggaagatacatctctgctgctccaggcgctgaagccaagtaccgcagtgcaagcagcgcctccagcctcttcagcccgagcagcactcttttctcttcctctcgtttgcgatatggaatgtctgatgtcatgccttctggcaggagcaggcttttggaagattttcgaaacaaccggtaccccaatttacaactgcgggagattgctggacatataatggaattttcccaagaccagcatgggtccagattcattcagctgaaactggagcgtgccacaccagctgagcgccagcttgtcttcaatgaaatcctccaggctgcctaccaactcatggtggatgtgtttggtaattacgtcattcagaagttctttgaatttggcagtcttgaacagaagctggctttggcagaacggattcgaggccacgtcctgtcattggcactacagatgtatggctgccgtgttatccagaaagctcttgagtttattccttcagaccagcagaatgagatggttcgggaactagatggccatgtcttgaagtgtgtgaaagatcagaatggcaatcacgtggttcagaaatgcattgaatgtgtacagccccagtctttgcaatttatcatcgatgcgtttaagggacaggtatttgccttatccacacatccttatggctgccgagtgattcagagaatcctggagcactgtctccctgaccagacactccctattttagaggagcttcaccagcacacagagcagcttgtacaggatcaatatggaaattatgtaatccaacatgtactggagcacggtcgtcctgaggataaaagcaaaattgtagcagaaatccgaggcaatgtacttgtattgagtcagcacaaatttgcaagcaatgttgtggagaagtgtgttactcacgcctcacgtacggagcgcgctgtgctcatcgatgaggtgtgcaccatgaacgacggtccccacagtgccttatacaccatgatgaaggaccagtatgccaactacgtggtccagaagatgattgacgtggcggagccaggccagcggaagatcgtcatgcataagatccggccccacatcgcaactcttcgtaagtacacctatggcaagcacattctggccaagctggagaagtactacatgaagaacggtgttgacttagggcccatctgtggcccccctaatggtatcatctgaggcagtgtcacccgctgttccctcattcccgctgacctcactggcccactggcaaatccaaccagcaaccagaaatgttctagtgtagagtctgagacgggcaagtggttgctccaggattactccctcctccaaaaaaggaatcaaatccacgagtggaaaagcctttgtaaatttaattttattacacataacatgtactattttttttaattgactaattgccctgctgttttactggtgtataggatacttgtacataggtaaccaatgtacatgggaggccacatattttgttcactgttgtatctatatttcacatgtggaaactttcagggtggttggtttaacaaaaaaaaaaagctttaaaaaaaaaagaaaaaaaggaaaaggtttttagctcatttgcctggccggcaagttttgcaaatagctcttccccacctcctcattttagtaaaaaacaaacaaaaacaaaaaaacctgagaagtttgaattgtagttaaatgaccccaaactggcatttaacactgtttataaaaaatatatatatatatatatatatataatgaaaaaggtttcagagttgctaaagcttcagtttgtgacattaagtttatgaaattctaaaaaatgccttttttggagactatattatgctgaagaaggctgttcgtgaggaggagatgcgagcacccagaacgtcttttgaggctgggcgggtgtgattgtttactgcctactggatttttttctattaacattgaaaggtaaaatctgattatttagcatgagaaaaaaaaatccaactctgcttttggtcttgcttctataaatatatagtgtatacttggtgtagactttgcatatatacaaatttgtagtattttcttgttttgatgtctaatctgtatctataatgtaccctagtagtcgaacatacttttgattgtacaattgtacatttgtatacctgtaatgtaaatgtggagaagtttgaatcaacataaacacgttttttggtaagaaaagagaattagccagccctgtgcattcagtgtatattctcaccttttatggtcgtagcatatagtgttgtatattgtaaattgtaatttcaaccagaagtaaatttttttcttttgaaggaataaatgttctttatacagcctagttaatgtttaaaaagaaaaaaatagcttggttttatttgtcatctagtctcaagtatagcgagattctttctaaatgttattcaagattgagttctcactagtgtttttttaatcctaaaaaagtaatgttttgattttgtgacagtcaaaaggacgtgcaaaagtctagccttgcccgagctttccttacaatcagagcccctctcaccttgtaaagtgtgaatcgcccttcccttttgtacagaagatgaactgtattttgcattttgtctacttgtaagtgaatgtaacatactgtcaattttccttgtttgaatatagaattgtaacactacacggtgtacatttccagagccttgtgtatatttccaatgaacttttttgcaagcacacttgtaaccatatgtgtataattaacaaacctgtgtatgcttatgcctgggcaactattttttgtaactcttgtgtagattgtctctaaacaatgtgtgatctttattttgaaaaatacagaactttggaatctgaaaaaaaaaaaaaaaaaaaaaaaanaanaaaaanaaaaaacaaaacaaaaacannnaananaaanaaacacaaaanaaanannaaaacacaacaaca

SEQ ID NO: 60804 - DNA, 2391 bp, Homo sapiens
  misc_feature (2319)..(2319): n is a, c, g, or t
  misc_feature (2322)..(2322): n is a, c, g, or t
  misc_feature (2328)..(2328): n is a, c, g, or t
  misc_feature (2348)..(2350): n is a, c, g, or t
  misc_feature (2353)..(2353): n is a, c, g, or t
  misc_feature (2355)..(2355): n is a, c, g, or t
  misc_feature (2359)..(2359): n is a, c, g, or t
  misc_feature (2370)..(2370): n is a, c, g, or t
  misc_feature (2374)..(2374): n is a, c, g, or t
  misc_feature (2376)..(2377): n is a, c, g, or t
gcggccgcctactactactaaaggcgcggccgcgtcgatccttatggctgccgagtgattcagagaatcctggagcactgtctccctgaccagacactccctattttagaggagcttcaccagcacacagagcagcttgtacaggatcaatatggaaattatgtaatccaacatgtactggagcacggtcgtcctgaggataaaagcaaaattgtagcagaaatccgaggcaatgtacttgtattgagtcagcacaaatttgcaagcaatgttgtggagaagtgtgttactcacgcctcacgtacggagcgcgctgtgctcatcgatgaggtgtgcaccatgaacgacggtccccacagtgccttatacaccatgatgaaggaccagtatgccaactacgtggtccagaagatgattgacgtggcggagccaggccagcggaagatcgtcatgcataagatccggccccacatcgcaactcttcgtaagtacacctatggcaagcacattctggccaagctggagaagtactacatgaagaacggtgttgacttagggcccatctgtggcccccctaatggtatcatctgaggcagtgtcacccgctgttccctcattcccgctgacctcactggcccactggcaaatccaaccagcaaccagaaatgttctagtgtagagtctgagacgggcaagtggttgctccaggattactccctcctccaaaaaaggaatcaaatccacgagtggaaaagcctttgtaaatttaattttattacacataacatgtactattttttttaattgactaattgccctgctgttttactggtgtataggatacttgtacataggtaaccaatgtacatgggaggccacatattttgttcactgttgtatctatatttcacatgtggaaactttcagggtggttggtttaacaaaaaaaaaaagctttaaaaaaaaaagaaaaaaaggaaaaggtttttagctcatttgcctggccggcaagttttgcaaatagctcttccccacctcctcattttagtaaaaaacaaacaaaaacaaaaaaacctgagaagtttgaattgtagttaaatgaccccaaactggcatttaacactgtttataaaaaatatatatatatatatatatatataatgaaaaaggtttcagagttgctaaagcttcagtttgtgacattaagtttatgaaattctaaaaaatgccttttttggagactatattatgctgaagaaggctgttcgtgaggaggagatgcgagcacccagaacgtcttttgaggctgggcgggtgtgattgtttactgcctactggatttttttctattaacattgaaaggtaaaatctgattatttagcatgagaaaaaaaaatccaactctgcttttggtcttgcttctataaatatatagtgtatacttggtgtagactttgcatatatacaaatttgtagtattttcttgttttgatgtctaatctgtatctataatgtaccctagtagtcgaacatacttttgattgtacaattgtacatttgtatacctgtaatgtaaatgtggagaagtttgaatcaacataaacacgttttttggtaagaaaagagaattagccagccctgtgcattcagtgtatattctcaccttttatggtcgtagcatatagtgttgtatattgtaaattgtaatttcaaccagaagtaaatttttttcttttgaaggaataaatgttctttatacagcctagttaatgtttaaaaagaaaaaaatagcttggttttatttgtcatctagtctcaagtatagcgagattctttctaaatgttattcaagattgagttctcactagtgtttttttaatcctaaaaaagtaatgttttgattttgtgacagtcaaaaggacgtgcaaaagtctagccttgcccgagctttccttacaatcagagcccctctcaccttgtaaagtgtgaatcgcccttcccttttgtacagaagatgaactgtattttgcattttgtctacttgtaagtgaatgtaacatactgtcaattttccttgtttgaatatagaattgtaacactacacggtgtacatttccagagccttgtgtatatttccaatgaacttttttgcaagcacacttgtaaccatatgtgtataattaacaaacctgtgtatgcttatgcctgggcaactattttttgtaactcttgtgtagattgtctctaaacaatgtgtgatctttattttgaaaaatacagaactttggaatctgaaaaaaaaaaaaaaaaaaaaaaaanaanaaaaanaaaaaacaaaacaaaaacannnaananaaanaaacacaaaanaaanannaaaacacaacaaca

SEQ ID NO: 60805 - DNA, 3219 bp, Homo sapiens
gcggccgcggagcaagaagggcgccgcggcgtgcggcccgcgcagcccccggagccatgggcaagtgcagcgggcgctgcacgctggtcgccttctgctgcctgcagctggtggctgcgctggagcggcagatctttgacttcctgggctaccagtgggctcccatcctagccaacttcctgcacatcatggcagtcatcctgggcatctttggcaccgtgcagtaccgctcccggtacctcatcctgtatgcagcctggctggtgctctgggttggctggaatgcatttatcatctgcttctacttggaggttggacagctgtcccaggaccgggacttcatcatgaccttcaacacatccctgcaccgctcctggtggatggagaatgggccaggctgcctggtgacacctgttctgaactcccgcctggctctggaggaccaccatgtcatctctgtcactggctgcctgcttgactacccctacattgaagccctcagcagcgccctgcagatcttcctggcactgttcggcttcgtgttcgcctgctacgtgagcaaagtgttcctggaggaggaggacagctttgacttcatcggcggctttgactcctacggataccaggcgccccagaagacgtcgcatttacagctgcagcctctgtacacgtcggggtagcctctgccccgcgcccaccccggcgcctcgccctgggctgaccgcagctgccgcgagctcgggccaaggcgcaggcgtgtccccctggtggcccgcgctctcactgcagcctgtgcccaaccccgcgtctgcatctggagatgcggacttggacgtggacttggacttggacttggatttgagcttggctcttcgcagcccggacttcggaggagtggggcggggcgggggaggggcaccacgggttttttgttttttgtttgtttgtttttaatctcagccttggcgtgagctggggccttcctctcttctccagcctctccctttcactcttcacccagcatcctgcccccctgtccaaaaacagcaggacatcagacccatcccatcccaccacactcactcaccagctctggggaaagctactgtgaactaggagcaggattcctgggttctaatcgcaggtccatcactgactgtgacgtctagcaaagcccttgccctctctgagcctcggtttccgcacctcaagtaattaatcccttagcaaatggactctttcagacttctcatttaactcaattccctgagctagactgggattaaaattctcattttgcagtacattaaaactgaggcccagagatgtgatttgcttgaggccacacagctagatttttggtggaagtgggccttgaacacagtgtactttctgcagtttctgactgtaaaacccagtgtctgctctctgagttccatttccaagcccccctccatcttggacctatgtggtctccaccatattcacacaccaccgccaccacttgccaatgcctctcttaaagcaatatacccattcgttctcttattgggaactggatggatgaagccccaaattcagccccacccacagagaagccttcctacactcagcctctgtccacccttggcaaatctttcaagctctctcctccaggaaagtggggccccaactcagtcactccacccccttccaggtccctgaggctggttctactgtatccccatcacctccacaactccactcacccctgacggctccatccacctcaccagttggaaggcttgtggtttcagagaggagcaatgctggtcagcgctgcccagactccagtgtttacagatcaccagcatttacaaccaatccaatggccagaagcctcctctaacaagcccagaaggagttctgaaggggcagatgggggtgtgagtagtcggggagtcgggattgccagcaccctcacccttccttgggggcaagtagaggtgagaacactttccccacctccctccacagacactcctgaggacgctgcatcccacgcactgcctggtgcgtccatagagagaggatcaggtctcagcatttcatctgtgaaagaggcatggccctgggttagaaaggagggcaggagacatggaggaactggggggcacccagatggtgcagatggtttgcacacctgagcctgtctgtggtgaccattccgctcctctcccactaccctccaatctatcattccctactctctaaggccaaaatatcctgagcaaggctggcaaccccaccccaccatcccaaatgcaagcagccaggcccaggagttcctctggcccccacaggcatggagctcccagctggtgggtacagcttgagaggggggcagctccctcaggctaagctactgcccttcactgggccagccctgcctccagccctcacctctctcaccccaactctcccccaagcccctttctactcaacgggtgtagccactggtgctttgaagccttttgtttttataagatggtttttgcaaggggaccaggttctcttttcactgggaccttgcaaggaggggagtgctctcctggtttctgtgcaggcgggttgattaaagatggtgttttcttctctatcttcctgtcctgcccattgggtctatagaactttctaagtgagaagtccctgcatgagggcaggcaggaatgatttgatgttgatgttatcaaatattcctggggtggccaggcacggtggctcatgcctgtaatcccaacacttttgaaggctgaggtgggcagatcacgcgaggtcaggagtttgagaccagcctggccaacatgatgaaaccctgtctctactaaaaatacaaaaattaggcagggccgggaggctgaggaaggagaatcacttgaacttgggatgcagaggtggagtgagctcagatggcgccactctaccccagcctgggtgatagagcaagactccatctcaaaacaataaaaaagaaacaaatcctggggcactggcctgtaactctgactgggtgtgtagctttaggcaactcactctccctctctatactcatccaaaaaaaaaaaaaaaaaaaagcagaggtcaaacaaaatcagtgggttcccaaatgtggcttcataatcccttagagatcttcctacttattttcctgataaaatgcattttaagtttatgctttca

SEQ ID NO: 60806 - DNA, 1808 bp, Homo sapiens
  misc_feature (38)..(38): n is a, c, g, or t
  misc_feature (1736)..(1736): n is a, c, g, or t
  misc_feature (1739)..(1739): n is a, c, g, or t
  misc_feature (1745)..(1745): n is a, c, g, or t
  misc_feature (1765)..(1767): n is a, c, g, or t
  misc_feature (1770)..(1770): n is a, c, g, or t
  misc_feature (1772)..(1772): n is a, c, g, or t
  misc_feature (1776)..(1776): n is a, c, g, or t
  misc_feature (1787)..(1787): n is a, c, g, or t
  misc_feature (1791)..(1791): n is a, c, g, or t
  misc_feature (1793)..(1794): n is a, c, g, or t
cattggcttgtgtgttgggttacatttgtcactctaanctgatgccttaagaaggttagggccacacggatttccgataaataattttaggaatcagggaactctagatgcgtctaacagcttgcctgtgccctcgacgccgtggggccacaccaacagcacagcacggtggtggggctttcttcttcctgtttatttcttattttttctattttttttaattgactaattgccctgctgttttactggtgtataggatacttgtacataggtaaccaatgtacatgggaggccacatattttgttcactgttgtatctatatttcacatgtggaaactttcagggtggttggtttaacaaaaaaaaaaagctttaaaaaaaaaagaaaaaaaggaaaaggtttttagctcatttgcctggccggcaagttttgcaaatagctcttccccacctcctcattttagtaaaaaacaaacaaaaacaaaaaaacctgagaagtttgaattgtagttaaatgaccccaaactggcatttaacactgtttataaaaaatatatatatatatatatatatataatgaaaaaggtttcagagttgctaaagcttcagtttgtgacattaagtttatgaaattctaaaaaatgccttttttggagactatattatgctgaagaaggctgttcgtgaggaggagatgcgagcacccagaacgtcttttgaggctgggcgggtgtgattgtttactgcctactggatttttttctattaacattgaaaggtaaaatctgattatttagcatgagaaaaaaaaatccaactctgcttttggtcttgcttctataaatatatagtgtatacttggtgtagactttgcatatatacaaatttgtagtattttcttgttttgatgtctaatctgtatctataatgtaccctagtagtcgaacatacttttgattgtacaattgtacatttgtatacctgtaatgtaaatgtggagaagtttgaatcaacataaacacgttttttggtaagaaaagagaattagccagccctgtgcattcagtgtatattctcaccttttatggtcgtagcatatagtgttgtatattgtaaattgtaatttcaaccagaagtaaatttttttcttttgaaggaataaatgttctttatacagcctagttaatgtttaaaaagaaaaaaatagcttggttttatttgtcatctagtctcaagtatagcgagattctttctaaatgttattcaagattgagttctcactagtgtttttttaatcctaaaaaagtaatgttttgattttgtgacagtcaaaaggacgtgcaaaagtctagccttgcccgagctttccttacaatcagagcccctctcaccttgtaaagtgtgaatcgcccttcccttttgtacagaagatgaactgtattttgcattttgtctacttgtaagtgaatgtaacatactgtcaattttccttgtttgaatatagaattgtaacactacacggtgtacatttccagagccttgtgtatatttccaatgaacttttttgcaagcacacttgtaaccatatgtgtataattaacaaacctgtgtatgcttatgcctgggcaactattttttgtaactcttgtgtagattgtctctaaacaatgtgtgatctttattttgaaaaatacagaactttggaatctgaaaaaaaaaaaaaaaaaaaaaaaanaanaaaaanaaaaaacaaaacaaaaacannnaananaaanaaacacaaaanaaanannaaaacacaacaaca

SEQ ID NO: 60807 - DNA, 2469 bp, Homo sapiens
aacccagtccccagtgggccgccatgttgtgggagtgaaaggtaagggggagcgagagcgccagagagagaagatcggggggctgaaatccatcttcatcctaccgctccgcccgtgttggtggaatgagcgttgcatgtgtcttgaagagaaaagcagtgctttggcaggactctttcagcccccacctgaaacatcaccctcaagaaccagctaatcccaacatgcctgttgttttgacatctggaacagggtcgcaagcgcagccacaaccagctgcaaatcaggctcttgcagctgggactcactccagccctgtcccaggatctataggagttgcaggccgttcccaggacgacgctatggtggactacttctttcagaggcagcatggtgagcagcttgggggaggaggaagtggaggaggcggctataataatagcaaacatcgatggcctactggggataacattcatgcagaacatcaggtgcgttccatggatgaactgaatcatgattttcaagcacttgctctggagggaagagcgatgggagagcagctcttgccaggtaaaaagttttgggaaacagatgaatccagcaaagatggaccaaaaggaatattcctgggtgatcaatggcgagacagtgcctggggaacatcagatcattcagtttcccagccaatcatggtgcagagaagacctggtcagagtttccatgtgaacagtgaggtcaattctgtactgtccccacgatcggagagtgggggactaggcgttagcatggtggagtatgtgttgagctcatccccgggcgattcctgtctaagaaaaggaggatttggcccaagggatgcagacagtgatgaaaacgacaaaggtgaaaagaagaacaagggtacgtttgatggagataagctaggagatttgaaggaggagggtgatgtgatggacaagaccaatggtttaccagtgcagaatgggattgatgcagacgtcaaagattttagccgtacccctggtaattgccagaactctgctaatgaagtggatcttctgggtccaaaccagaatggttctgagggcttagcccagctgaccagcaccaatggtgccaagcctgtggaggatttctccaacatggagtcccagagtgtccccttggaccccatggaacatgtgggcatggagcctcttcagtttgattattcaggcacgcaggtacctgtggactcagcagcagcaactgtgggactttttgactacaattctcaacaacagctgttccaaagacctaatgcgcttgctgtccagcagttgacagctgctcagcagcagcagtatgcactggcagctgctcatcagccgcacatcggtttagctcccgctgcgtttgtccccaatccatacatcatcagcgctgctcccccagggacggacccctacacagctggattggctgcagcagcgacactaggcccagctgtggtccctcaccagtattatggagttactccctggggagtctaccctgccagtcttttccagcagcaagctgccgctgccgctgcagcaactaattcagctaatcaacagaccaccccacaggctcagcaaggacagcagcaggttctccgtggaggagccagccaacgtcctttgaccccaaaccagaaccagcagggacagcaaacggatccccttgtggcagctgcagcagtgaattctgcccttgcatttggacaaggtctggcagcaggcatgccaggttatccggtgttggctcctgctgcttactatgaccaaactggtgcccttgtagtgaatgcaggcgcgagaaatggtcttggagctcctgttcgacttgtagctcctgccccagtcatcattagttcctcagctgcacaagcagctgttgcagcagccgcagcttcagcaaatggagcagctggtggtcttgctggaacaacaaatggaccatttcgccctttaggaacacagcagcctcagccccagccccagcagcagcccaataacaacctggcatccagttctttctacggcaacaactctctgaacagcaattcacagagcagctccctcttctcccagggctctgcccagcctgccaacacatccttgggattcggaagtagcagttctctcggcgccaccctgggatccgcccttggagggtttggaacagcagttgcaaactccaacactggcagtggctcccgccgtgactccctgactggcagcagtgacctttataagaggacatcgagcagcttgacccccattggacacagtttttataacggccttagcttttcctcctctcctggacccgtgggcatgcctctccctagtcagggaccaggacattcacagacaccacctccttccctctcttcacatggatcctcttcaagcttaaacctgggtaagaaccattactctaaca

SEQ ID NO: 60808 - DNA, 863 bp, Homo sapiens
  misc_feature (246)..(246): n is a, c, g, or t
  misc_feature (791)..(791): n is a, c, g, or t
  misc_feature (794)..(794): n is a, c, g, or t
  misc_feature (800)..(800): n is a, c, g, or t
  misc_feature (820)..(822): n is a, c, g, or t
  misc_feature (825)..(825): n is a, c, g, or t
  misc_feature (827)..(827): n is a, c, g, or t
  misc_feature (831)..(831): n is a, c, g, or t
  misc_feature (842)..(842): n is a, c, g, or t
  misc_feature (846)..(846): n is a, c, g, or t
  misc_feature (848)..(849): n is a, c, g, or t
cccccaggccccatgcttgtgccaacaggtcttccacagcttaatgtgatgctttgatgtttttgttgttgtttttgtttttgtattgtttttgtgtttttgttttgaattttttcctttcctgctaagattatgcccagaaaaaagttttgcatgttgtcctgctgtttcttcacaccttcgtatatatcaccttcacctctctgttttctatagtttgtgtaaactgattaatcagtttacacnaaaaaagaaaaaaatagcttggttttatttgtcatctagtctcaagtatagcgagattctttctaaatgttattcaagattgagttctcactagtgtttttttaatcctaaaaaagtaatgttttgattttgtgacagtcaaaaggacgtgcaaaagtctagccttgcccgagctttccttacaatcagagcccctctcaccttgtaaagtgtgaatcgcccttcccttttgtacagaagatgaactgtattttgcattttgtctacttgtaagtgaatgtaacatactgtcaattttccttgtttgaatatagaattgtaacactacacggtgtacatttccagagccttgtgtatatttccaatgaacttttttgcaagcacacttgtaaccatatgtgtataattaacaaacctgtgtatgcttatgcctgggcaactattttttgtaactcttgtgtagattgtctctaaacaatgtgtgatctttattttgaaaaatacagaactttggaatctgaaaaaaaaaaaaaaaaaaaaaaaanaanaaaaanaaaaaacaaaacaaaaacannnaananaaanaaacacaaaanaaanannaaaacacaacaaca

SEQ ID NO: 60809 - DNA, 3125 bp, Homo sapiens
gcggccgcggagcaagaagggcgccgcggcgtgcggcccgcgcagcccccggagccatgggcaagtgcagcgggcgctgcacgctggtcgccttctgctgcctgcagctggtggctgcgctggagcggcagatctttgacttcctgggctaccagtgggctcccatcctagccaacttcctgcacatcatggcagtcatcctgggcatctttggcaccgtgcagtaccgctcccggtacctcatcctgtatgcagcctggctggtgctctgggttggctggaatgcatttatcatctgcttctacttggaggttggacagctgtcccaggaccgggacttcatcatgaccttcaacacatccctgcaccgctcctggtggatggagaatgggccaggctgcctggtgacacctgttctgaactcccgcctggctctggaggaccaccatgtcatctctgtcactggctgcctgcttgactacccctacattgaagccctcagcagcgccctgcagatcttcctggcactgttcggcttcgtgttcgcctgctacgtgagcaaagtgttcctggaggaggaggacagctttgacttcatcggcggctttgactcctacggataccaggcgccccagaagacgtcgcatttacagctgcagcctctgtacacgtcggggtagcctctgccccgcgcccaccccggcgcctcgccctgggctgaccgcagctgccgcgagctcgggccaaggcgcaggcgtgtccccctggtggcccgcgctctcactgcagcctgtgcccaaccccgcgtctgcatctggagatgcggacttggacgtggacttggacttggacttggatttgagcttggctcttcgcagcccggacttcggaggagtggggcggggcgggggaggggcaccacgggttttttgttttttgtttgtttgtttttaatctcagccttggcgtgagctggggccttcctctcttctccagcctctccctttcactcttcacccagcatcctgcccccctgtccaaaaacagcaggacatcagacccatcccatcccaccacactcactcaccagctctggggaaagctactgtgaactaggagcaggattcctgggttctaatcgcaggtccatcactgactgtgacgtctagcaaagcccttgccctctctgagcctcggtttccgcacctcaagtaattaatcccttagcaaatggactctttcagacttctcatttaactcaattccctgagctagactgggattaaaattctcattttgcagtacattaaaactgaggcccagagatgtgatttgcttgaggccacacagctagatttttggtggaagtgggccttgaacacagtgtactttctgcagtttctgactgtaaaacccagtgtctgctctctgagttccatttccaagcccccctccatcttggacctatgtggtctccaccatattcacacaccaccgccaccacttgccaatgcctctcttaaagcaatatacccattcgttctcttattgggaactggatggatgaagccccaaattcagccccacccacagagaagccttcctacactcagcctctgtccacccttggcaaatctttcaagctctctcctccaggaaagtggggccccaactcagtcactccacccccttccaggtccctgaggctggttctactgtatccccatcacctccacaactccactcacccctgacggctccatccacctcaccagttggaaggcttgtggtttcagagaggagcaatgctggtcagcgctgcccagactccagtgtttacagatcaccagcatttacaaccaatccaatggccagaagcctcctctaacaagcccagaaggagttctgaaggggcagatgggggtgtgagtagtcggggagtcgggattgccagcaccctcacccttccttgggggcaagtagaggtgagaacactttccccacctccctccacagacactcctgaggacgctgcatcccacgcactgcctggtgcgtccatagagagaggatcaggtctcagcatttcatctgtgaaagaggcatggccctgggttagaaaggagggcaggagacatggaggaactggggggcacccagatggtgcagatggtttgcacacctgagcctgtctgtggtgaccattccgctcctctcccactaccctccaatctatcattccctactctctaaggccaaaatatcctgagcaaggctggcaaccccaccccaccatcccaaatgcaactactgcccttcactgggccagccctgcctccagccctcacctctctcaccccaactctcccccaagcccctttctactcaacgggtgtagccactggtgctttgaagccttttgtttttataagatggtttttgcaaggggaccaggttctcttttcactgggaccttgcaaggaggggagtgctctcctggtttctgtgcaggcgggttgattaaagatggtgttttcttctctatcttcctgtcctgcccattgggtctatagaactttctaagtgagaagtccctgcatgagggcaggcaggaatgatttgatgttgatgttatcaaatattcctggggtggccaggcacggtggctcatgcctgtaatcccaacacttttgaaggctgaggtgggcagatcacgcgaggtcaggagtttgagaccagcctggccaacatgatgaaaccctgtctctactaaaaatacaaaaattaggcagggccgggaggctgaggaaggagaatcacttgaacttgggatgcagaggtggagtgagctcagatggcgccactctaccccagcctgggtgatagagcaagactccatctcaaaacaataaaaaagaaacaaatcctggggcactggcctgtaactctgactgggtgtgtagctttaggcaactcactctccctctctatactcatccaaaaaaaaaaaaaaaaaaaagcagaggtcaaacaaaatcagtgggttcccaaatgtggcttcataatcccttagagatcttcctacttattttcctgataaaatgcattttaagtttatgctttca

SEQ ID NO: 60810 - DNA, 1106 bp, Homo sapiens
aacccagtccccagtgggccgccatgttgtgggagtgaaaggtaagggggagcgagagcgccagagagagaagatcggggggctgaaatccatcttcatcctaccgctccgcccgtgttggtggaatgagcgttgcatgtgtcttgaagagaaaagcagtgctttggcaggactctttcagcccccacctgaaacatcaccctcaagaaccagctaatcccaacatgcctgttgttttgacatctggaacagggtcgcaagcgcagccacaaccagctgcaaatcaggctcttgcagctgggactcactccagccctgtcccaggatctataggagttgcaggccgttcccaggacgacgctatggtggactacttctttcagaggcagcatggtgagcagcttgggggaggaggaagtggaggaggcggctataataatagcaaacatcgatggcctactggggataacattcatgcagaacatcaggtgcgttccatggatgaactgaatcatgattttcaagcacttgctctggagggaagagcgatgggagagcagctcttgccaggtaaaaagttttgggaaacagatgaatccagcaaagatggaccaaaaggaatattcctgggtgatcaatggcgagacagtgcctggggaacatcagatcattcagtttcccagccaatcatggtgcagagaagacctggtcagagtttccatgtgaacagtgaggtcaattctgtactgtccccacgatcggagagtgggggactaggcgttagcatggtggagtatgtgttgagctcatccccgggcgattcctgtctaagaaaaggaggatttggcccaagggatgcagacagtgatgaaaacgacaaaggtgaaaagaagaacaagggtacgtttgatggagataagctaggagatttgaaggaggagggtgatgtgatggacaagaccaatggtttaccagtgcagaatgggattgatgcagacgtcaaagattttagctaccgtactcctggtattccagactctgctatcactcaggttttctccaagtcaagaacgattgttaacgacggcccagtccaagcgtaagca

SEQ ID NO: 60811 - DNA, 773 bp, Homo sapiens
aacccagtccccagtgggccgccatgttgtgggagtgaaaggtaagggggagcgagagcgccagagagagaagatcggggggctgaaatccatcttcatcctaccgctccgcccgtgttggtggaatgagcgttgcatgtgtcttgaagagaaaagcagtgctttggcaggactctttcagcccccacctgaaacatcaccctcaagaaccagctaatcccaacatgcctgttgttttgacatctggaacagggtcgcaagcgcagccacaaccagctgcaaatcaggctcttgcagctgggactcactccagccctgtcccaggatctataggagttgcaggccgttcccaggacgacgctatggtggactacttctttcagaggcagcatggtgagcagcttgggggaggaggaagtggaggaggcggctataataatagcaaacatcgatggcctactggggataacattcatgcagaacatcaggtgcgttccatggatgaactgaatcatgattttcaagcacttgctctggagggaagagcgatgggagagcagctcttgccaggtaaaaagttttgggaaacagatgaatccagcaaagatggaccaaaaggaatattcctgggtgatcaatggcgagacagtgcctggggaacatcagatcattcagtttcccagccaatcatggtgcagagaagacctggtcagagtttccatgtgaacagtgaggtcaattctgtactgtccgggtaccagctcgattctatc

SEQ ID NO: 60812 - DNA, 268 bp, Homo sapiens
cgttcccaggacgacgctatggtggactacttctttcagaggcagcatggtgagcagcttgggggaggaggaagtggaggaggcggctataataatagcaaacatcgatggcctactggggataacattcatgcagaacatcagaggtaaaaaaaagttcactattttagctttgacattcctttataatcactgtccacttaggatatctgctttcaatgaatgtctttaaaaacttaaattgctgatttcatttggtacaaacagt

SEQ ID NO: 60813 - DNA, 355 bp, Homo sapiens
cgacaaaggtgaaaagaagaacaagggtacgtttgatggagataagctaggagatttgaaggaggagggtgatgtgatggacaagaccaatggtttaccagtgcagaatgggattgatgcagacgtcaaagattttagggtttgtatgttttacacttctgatttttgaatatgggctatgggattttgtttgttttgatttagttttactttgattttcgttttcttcccctcttcatgttttctttttaagaatccaatctagtgtaggctatgctacaaagattgtaaattaactggtgaggtggaattttctaaaaggtgtcaatgcctgaagcgttgccaaaatgataga

SEQ ID NO: 60814 - DNA, 741 bp, Homo sapiens
aacccagtccccagtgggccgccatgttgtgggagtgaaaggtaagggggagcgagagcgccagagagagaagatcggggggctgaaatccatcttcatcctaccgctccgcccgtgttggtggaatgagcgttgcatgtgtcttgaagagaaaagcagtgctttggcaggactctttcagcccccacctgaaacatcaccctcaagaaccagctaatcccaacatgcctgttgttttgacatctggaacagggtcgcaagcgcagccacaaccagctgcaaatcaggctcttgcagctgggactcactccagccctgtcccaggatctataggagttgcaggccgttcccaggacgacgctatggtggactacttctttcagaggcagcatggtgagcagcttgggggaggaggaagtggaggaggcggctataataatagcaaacatcgatggcctactggggataacattcatgcagaacatcagcagagatcacaccattgcactccagcctgagtgacaagagcgaaactctgtctccaaaaaaagaaaaaagaaagattttctctttctttgggatgaagatatgcacagaatttggtgattgaattagaaatcttatatcctggaaagatgaagtaatggaggaaaagtacagagtgcctctggtttgggacacagtgattacatttgataggacacctgttgagtttgaggtagaagcagaatatctgggtgt

SEQ ID NO: 60815 - DNA, 356 bp, Homo sapiens
  misc_feature (284)..(284): n is a, c, g, or t
  misc_feature (287)..(287): n is a, c, g, or t
  misc_feature (293)..(293): n is a, c, g, or t
  misc_feature (313)..(315): n is a, c, g, or t
  misc_feature (318)..(318): n is a, c, g, or t
  misc_feature (320)..(320): n is a, c, g, or t
  misc_feature (324)..(324): n is a, c, g, or t
  misc_feature (335)..(335): n is a, c, g, or t
  misc_feature (339)..(339): n is a, c, g, or t
  misc_feature (341)..(342): n is a, c, g, or t
ggacgcgtgggtttcttctcaaaaaacacatctttaatcacccgcaccctgcctccagccctcacctctctcaccccaactctcccccaagcccctttctactcaacgggtgtagccactggtgctttgaagccttttgtttttataagatggtttttgcaaggggaccaggttctcttttcactgggaccttgcaaggaggggagtgctctcctggtttctgtgcaggcgggttgattaaagatggtgttttcttctcaaaaaaaaaaaaaaaaaaaaaaaanaanaaaaanaaaaaacaaaacaaaaacannnaananaaanaaacacaaaanaaanannaaaacacaacaaca

SEQ ID NO: 60816 - DNA, 5554 bp, Homo sapiens
  misc_feature (5482)..(5482): n is a, c, g, or t
  misc_feature (5485)..(5485): n is a, c, g, or t
  misc_feature (5491)..(5491): n is a, c, g, or t
  misc_feature (5511)..(5513): n is a, c, g, or t
  misc_feature (5516)..(5516): n is a, c, g, or t
  misc_feature (5518)..(5518): n is a, c, g, or t
  misc_feature (5522)..(5522): n is a, c, g, or t
  misc_feature (5533)..(5533): n is a, c, g, or t
  misc_feature (5537)..(5537): n is a, c, g, or t
  misc_feature (5539)..(5540): n is a, c, g, or t
aacccagtccccagtgggccgccatgttgtgggagtgaaaggtaagggggagcgagagcgccagagagagaagatcggggggctgaaatccatcttcatcctaccgctccgcccgtgttggtggaatgagcgttgcatgtgtcttgaagagaaaagcagtgctttggcaggactctttcagcccccacctgaaacatcaccctcaagaaccagctaatcccaacatgcctgttgttttgacatctggaacagggtcgcaagcgcagccacaaccagctgcaaatcaggctcttgcagctgggactcactccagccctgtcccaggatctataggagttgcaggccgttcccaggacgacgctatggtggactacttctttcagaggcagcatggtgagcagcttgggggaggaggaagtggaggaggcggctataataatagcaaacatcgatggcctactggggataacattcatgcagaacatcaggtgcgttccatggatgaactgaatcatgattttcaagcacttgctctggagggaagagcgatgggagagcagctcttgccaggtaaaaagttttgggaaacagatgaatccagcaaagatggaccaaaaggaatattcctgggtgatcaatggcgagacagtgcctggggaacatcagatcattcagtttcccagccaatcatggtgcagagaagacctggtcagagtttccatgtgaacagtgaggtcaattctgtactgtccccacgatcggagagtgggggactaggcgttagcatggtggagtatgtgttgagctcatccccgggcgattcctgtctaagaaaaggaggatttggcccaagggatgcagacagtgatgaaaacgacaaaggtgaaaagaagaacaagggtacgtttgatggagataagctaggagatttgaaggaggagggtgatgtgatggacaagaccaatggtttaccagtgcagaatgggattgatgcagacgtcaaagattttagccgtacccctggtaattgccagaactctgctaatgaagtggatcttctgggtccaaaccagaatggttctgagggcttagcccagctgaccagcaccaatggtgccaagcctgtggaggatttctccaacatggagtcccagagtgtccccttggaccccatggaacatgtgggcatggagcctcttcagtttgattattcaggcacgcaggtacctgtggactcagcagcagcaactgtgggactttttgactacaattctcaacaacagctgttccaaagacctaatgcgcttgctgtccagcagttgacagctgctcagcagcagcagtatgcactggcagctgctcatcagccgcacatcggtttagctcccgctgcgtttgtccccaatccatacatcatcagcgctgctcccccagggacggacccctacacagctggattggctgcagcagcgacactaggcccagctgtggtccctcaccagtattatggagttactccctggggagtctaccctgccagtcttttccagcagcaagctgccgctgccgctgcagcaactaattcagctaatcaacagaccaccccacaggctcagcaaggacagcagcaggttctccgtggaggagccagccaacgtcctttgaccccaaaccagaaccagcagggacagcaaacggatccccttgtggcagctgcagcagtgaattctgcccttgcatttggacaaggtctggcagcaggcatgccaggttatccggtgttggctcctgctgcttactatgaccaaactggtgcccttgtagtgaatgcaggcgcgagaaatggtcttggagctcctgttcgacttgtagctcctgccccagtcatcattagttcctcagctgcacaagcaggtgagcgcacatctgagtggactcctgccagagatctaaaagtggcgactgatagtgagattcttaaactgttgcagcagccgcagcttcagcaaatggagcagctggtggtcttgctggaacaacaaatggaccatttcgccctttaggaacacagcagcctcagccccagccccagcagcagcccaataacaacctggcatccagttctttctacggcaacaactctctgaacagcaattcacagagcagctccctcttctcccagggctctgcccagcctgccaacacatccttgggattcggaagtagcagttctctcggcgccaccctgggatccgcccttggagggtttggaacagcagttgcaaactccaacactggcagtggctcccgccgtgactccctgactggcagcagtgacctttataagaggacatcgagcagcttgacccccattggacacagtttttataacggccttagcttttcctcctctcctggacccgtgggcatgcctctccctagtcagggaccaggacattcacagacaccacctccttccctctcttcacatggatcctcttcaagcttaaacctgggaggactcacgaatggcagtggaagatacatctctgctgctccaggcgctgaagccaagtaccgcagtgcaagcagcgcctccagcctcttcagcccgagcagcactcttttctcttcctctcgtttgcgatatggaatgtctgatgtcatgccttctggcaggagcaggcttttggaagattttcgaaacaaccggtaccccaatttacaactgcgggagattgctggacatataatggaattttcccaagaccagcatgggtccagattcattcagctgaaactggagcgtgccacaccagctgagcgccagcttgtcttcaatgaaatcctccaggctgcctaccaactcatggtggatgtgtttggtaattacgtcattcagaagttctttgaatttggcagtcttgaacagaagctggctttggcagaacggattcgaggccacgtcctgtcattggcactacagatgtatggctgccgtgttatccagaaagctcttgagtttattccttcagaccagcagaatgagatggttcgggaactagatggccatgtcttgaagtgtgtgaaagatcagaatggcaatcacgtggttcagaaatgcattgaatgtgtacagccccagtctttgcaatttatcatcgatgcgtttaagggacaggtatttgccttatccacacatccttatggctgccgagtgattcagagaatcctggagcactgtctccctgaccagacactccctattttagaggagcttcaccagcacacagagcagcttgtacaggatcaatatggaaattatgtaatccaacatgtactggagcacggtcgtcctgaggataaaagcaaaattgtagcagaaatccgaggcaatgtacttgtattgagtcagcacaaatttgcaagcaatgttgtggagaagtgtgttactcacgcctcacgtacggagcgcgctgtgctcatcgatgaggtgtgcaccatgaacgacggtccccacagtgccttatacaccatgatgaaggaccagtatgccaactacgtggtccagaagatgattgacgtggcggagccaggccagcggaagatcgtcatgcataagatccggccccacatcgcaactcttcgtaagtacacctatggcaagcacattctggccaagctggagaagtactacatgaagaacggtgttgacttagggcccatctgtggcccccctaatggtatcatctgaggcagtgtcacccgctgttccctcattcccgctgacctcactggcccactggcaaatccaaccagcaaccagaaatgttctagtgtagagtctgagacgggcaagtggttgctccaggattactccctcctccaaaaaaggaatcaaatccacgagtggaaaagcctttgtaaatttaattttattacacataacatgtactattttttttaattgactaattgccctgctgttttactggtgtataggatacttgtacataggtaaccaatgtacatgggaggccacatattttgttcactgttgtatctatatttcacatgtggaaactttcagggtggttggtttaacaaaaaaaaaaagctttaaaaaaaaaagaaaaaaaggaaaaggtttttagctcatttgcctggccggcaagttttgcaaatagctcttccccacctcctcattttagtaaaaaacaaacaaaaacaaaaaaacctgagaagtttgaattgtagttaaatgaccccaaactggcatttaacactgtttataaaaaatatatatatatatatatatatataatgaaaaaggtttcagagttgctaaagcttcagtttgtgacattaagtttatgaaattctaaaaaatgccttttttggagactatattatgctgaagaaggctgttcgtgaggaggagatgcgagcacccagaacgtcttttgaggctgggcgggtgtgattgtttactgcctactggatttttttctattaacattgaaaggtaaaatctgattatttagcatgagaaaaaaaaatccaactctgcttttggtcttgcttctataaatatatagtgtatacttggtgtagactttgcatatatacaaatttgtagtattttcttgttttgatgtctaatctgtatctataatgtaccctagtagtcgaacatacttttgattgtacaattgtacatttgtatacctgtaatgtaaatgtggagaagtttgaatcaacataaacacgttttttggtaagaaaagagaattagccagccctgtgcattcagtgtatattctcaccttttatggtcgtagcatatagtgttgtatattgtaaattgtaatttcaaccagaagtaaatttttttcttttgaaggaataaatgttctttatacagcctagttaatgtttaaaaagaaaaaaatagcttggttttatttgtcatctagtctcaagtatagcgagattctttctaaatgttattcaagattgagttctcactagtgtttttttaatcctaaaaaagtaatgttttgattttgtgacagtcaaaaggacgtgcaaaagtctagccttgcccgagctttccttacaatcagagcccctctcaccttgtaaagtgtgaatcgcccttcccttttgtacagaagatgaactgtattttgcattttgtctacttgtaagtgaatgtaacatactgtcaattttccttgtttgaatatagaattgtaacactacacggtgtacatttccagagccttgtgtatatttccaatgaacttttttgcaagcacacttgtaaccatatgtgtataattaacaaacctgtgtatgcttatgcctgggcaactattttttgtaactcttgtgtagattgtctctaaacaatgtgtgatctttattttgaaaaatacagaactttggaatctgaaaaaaaaaaaaaaaaaaaaaaaanaanaaaaanaaaaaacaaaacaaaaacannnaananaaanaaacacaaaanaaanannaaaacacaacaaca

SEQ ID NO: 60817 - DNA, 5384 bp, Homo sapiens
  misc_feature (5312)..(5312): n is a, c, g, or t
  misc_feature (5315)..(5315): n is a, c, g, or t
  misc_feature (5321)..(5321): n is a, c, g, or t
  misc_feature (5341)..(5343): n is a, c, g, or t
  misc_feature (5346)..(5346): n is a, c, g, or t
  misc_feature (5348)..(5348): n is a, c, g, or t
  misc_feature (5352)..(5352): n is a, c, g, or t
  misc_feature (5363)..(5363): n is a, c, g, or t
  misc_feature (5367)..(5367): n is a, c, g, or t
  misc_feature (5369)..(5370): n is a, c, g, or t
aacccagtccccagtgggccgccatgttgtgggagtgaaaggtaagggggagcgagagcgccagagagagaagatcggggggctgaaatccatcttcatcctaccgctccgcccgtgttggtggaatgagcgttgcatgtgtcttgaagagaaaagcagtgctttggcaggactctttcagcccccacctgaaacatcaccctcaagaaccagctaatcccaacatgcctgttgttttgacatctggaacagggtcgcaagcgcagccacaaccagctgcaaatcaggctcttgcagctgggactcactccagccctgtcccaggatctataggagttgcaggccgttcccaggacgacgctatggtggactacttctttcagaggcagcatggtgagcagcttgggggaggaggaagtggaggaggcggctataataatagcaaacatcgatggcctactggggataacattcatgcagaacatcaggtgcgttccatggatgaactgaatcatgattttcaagcacttgctctggagggaagagcgatgggagagcagctcttgccaggtaaaaagttttgggaaacagatgaatccagcaaagatggaccaaaaggaatattcctgggtgatcaatggcgagacagtgcctggggaacatcagatcattcagtttcccagccaatcatggtgcagagaagacctggtcagagtttccatgtgaacagtgaggtcaattctgtactgtccccacgatcggagagtgggggactaggcgttagcatggtggagtatgtgttgagctcatccccgggcgattcctgtctaagaaaaggaggatttggcccaagggatgcagacagtgatgaaaacgacaaaggtgaaaagaagaacaagggtacgtttgatggagataagctaggagatttgaaggaggagggtgatgtgatggacaagaccaatggtttaccagtgcagaatgggattgatgcagacgtcaaagattttagccgtacccctggtaattgccagaactctgctaatgaagtggatcttctgggtccaaaccagaatggttctgagggcttagcccagctgaccagcaccaatggtgccaagcctgtggaggatttctccaacatggagtcccagagtgtccccttggaccccatggaacatgtgggcatggagcctcttcagtttgattattcaggcacgcaggtacctgtggactcagcagcagcaactgtgggactttttgactacaattctcaacaacagctgttccaaagacctaatgcgcttgctgtccagcagttgacagctgctcagcagcagcagtatgcactggcagctgctcatcagccgcacatcggcccagctgtggtccctcaccagtattatggagttactccctggggagtctaccctgccagtcttttccagcagcaagctgccgctgccgctgcagcaactaattcagctaatcaacagaccaccccacaggctcagcaaggacagcagcaggttctccgtggaggagccagccaacgtcctttgaccccaaaccagaaccagcagggacagcaaacggatccccttgtggcagctgcagcagtgaattctgcccttgcatttggacaaggtctggcagcaggcatgccaggttatccggtgttggctcctgctgcttactatgaccaaactggtgcccttgtagtgaatgcaggcgcgagaaatggtcttggagctcctgttcgacttgtagctcctgccccagtcatcattagttcctcagctgcacaagcagctgttgcagcagccgcagcttcagcaaatggagcagctggtggtcttgctggaacaacaaatggaccatttcgccctttaggaacacagcagcctcagccccagccccagcagcagcccaataacaacctggcatccagttctttctacggcaacaactctctgaacagcaattcacagagcagctccctcttctcccagggctctgcccagcctgccaacacatccttgggattcggaagtagcagttctctcggcgccaccctgggatccgcccttggagggtttggaacagcagttgcaaactccaacactggcagtggctcccgccgtgactccctgactggcagcagtgacctttataagaggacatcgagcagcttgacccccattggacacagtttttataacggccttagcttttcctcctctcctggacccgtgggcatgcctctccctagtcagggaccaggacattcacagacaccacctccttccctctcttcacatggatcctcttcaagcttaaacctgggaggactcacgaatggcagtggaagatacatctctgctgctccaggcgctgaagccaagtaccgcagtgcaagcagcgcctccagcctcttcagcccgagcagcactcttttctcttcctctcgtttgcgatatggaatgtctgatgtcatgccttctggcaggagcaggcttttggaagattttcgaaacaaccggtaccccaatttacaactgcgggagattgctggacatataatggaattttcccaagaccagcatgggtccagattcattcagctgaaactggagcgtgccacaccagctgagcgccagcttgtcttcaatgaaatcctccaggctgcctaccaactcatggtggatgtgtttggtaattacgtcattcagaagttctttgaatttggcagtcttgaacagaagctggctttggcagaacggattcgaggccacgtcctgtcattggcactacagatgtatggctgccgtgttatccagaaagctcttgagtttattccttcagaccagcagaatgagatggttcgggaactagatggccatgtcttgaagtgtgtgaaagatcagaatggcaatcacgtggttcagaaatgcattgaatgtgtacagccccagtctttgcaatttatcatcgatgcgtttaagggacaggtatttgccttatccacacatccttatggctgccgagtgattcagagaatcctggagcactgtctccctgaccagacactccctattttagaggagcttcaccagcacacagagcagcttgtacaggatcaatatggaaattatgtaatccaacatgtactggagcacggtcgtcctgaggataaaagcaaaattgtagcagaaatccgaggcaatgtacttgtattgagtcagcacaaatttgcaagcaatgttgtggagaagtgtgttactcacgcctcacgtacggagcgcgctgtgctcatcgatgaggtgtgcaccatgaacgacggtccccacagtgccttatacaccatgatgaaggaccagtatgccaactacgtggtccagaagatgattgacgtggcggagccaggccagcggaagatcgtcatgcataagatccggccccacatcgcaactcttcgtaagtacacctatggcaagcacattctggccaagctggagaagtactacatgaagaacggtgttgacttagggcccatctgtggcccccctaatggtatcatctgaggcagtgtcacccgctgttccctcattcccgctgacctcactggcccactggcaaatccaaccagcaaccagaaatgttctagtgtagagtctgagacgggcaagtggttgctccaggattactccctcctccaaaaaaggaatcaaatccacgagtggaaaagcctttgtaaatttaattttattacacataacatgtactattttttttaattgactaattgccctgctgttttactggtgtataggatacttgtacataggtaaccaatgtacatgggaggccacatattttgttcactgttgtatctatatttcacatgtggaaactttcagggtggttggtttaacaaaaaaaaaaagctttaaaaaaaaaagaaaaaaaggaaaaggtttttagctcatttgcctggccggcaagttttgcaaatagctcttccccacctcctcattttagtaaaaaacaaacaaaaacaaaaaaacctgagaagtttgaattgtagttaaatgaccccaaactggcatttaacactgtttataaaaaatatatatatatatatatatatataatgaaaaaggtttcagagttgctaaagcttcagtttgtgacattaagtttatgaaattctaaaaaatgccttttttggagactatattatgctgaagaaggctgttcgtgaggaggagatgcgagcacccagaacgtcttttgaggctgggcgggtgtgattgtttactgcctactggatttttttctattaacattgaaaggtaaaatctgattatttagcatgagaaaaaaaaatccaactctgcttttggtcttgcttctataaatatatagtgtatacttggtgtagactttgcatatatacaaatttgtagtattttcttgttttgatgtctaatctgtatctataatgtaccctagtagtcgaacatacttttgattgtacaattgtacatttgtatacctgtaatgtaaatgtggagaagtttgaatcaacataaacacgttttttggtaagaaaagagaattagccagccctgtgcattcagtgtatattctcaccttttatggtcgtagcatatagtgttgtatattgtaaattgtaatttcaaccagaagtaaatttttttcttttgaaggaataaatgttctttatacagcctagttaatgtttaaaaagaaaaaaatagcttggttttatttgtcatctagtctcaagtatagcgagattctttctaaatgttattcaagattgagttctcactagtgtttttttaatcctaaaaaagtaatgttttgattttgtgacagtcaaaaggacgtgcaaaagtctagccttgcccgagctttccttacaatcagagcccctctcaccttgtaaagtgtgaatcgcccttcccttttgtacagaagatgaactgtattttgcattttgtctacttgtaagtgaatgtaacatactgtcaattttccttgtttgaatatagaattgtaacactacacggtgtacatttccagagccttgtgtatatttccaatgaacttttttgcaagcacacttgtaaccatatgtgtataattaacaaacctgtgtatgcttatgcctgggcaactattttttgtaactcttgtgtagattgtctctaaacaatgtgtgatctttattttgaaaaatacagaactttggaatctgaaaaaaaaaaaaaaaaaaaaaaaanaanaaaaanaaaaaacaaaacaaaaacannnaananaaanaaacacaaaanaaanannaaaacacaacaaca

SEQ ID NO: 60818 - DNA, 5391 bp, Homo sapiens
  misc_feature (5319)..(5319): n is a, c, g, or t
  misc_feature (5322)..(5322): n is a, c, g, or t
  misc_feature (5328)..(5328): n is a, c, g, or t
  misc_feature (5348)..(5350): n is a, c, g, or t
  misc_feature (5353)..(5353): n is a, c, g, or t
  misc_feature (5355)..(5355): n is a, c, g, or t
  misc_feature (5359)..(5359): n is a, c, g, or t
  misc_feature (5370)..(5370): n is a, c, g, or t
  misc_feature (5374)..(5374): n is a, c, g, or t
  misc_feature (5376)..(5377): n is a, c, g, or t
aacccagtccccagtgggccgccatgttgtgggagtgaaaggtaagggggagcgagagcgccagagagagaagatcggggggctgaaatccatcttcatcctaccgctccgcccgtgttggtggaatgagcgttgcatgtgtcttgaagagaaaagcagtgctttggcaggactctttcagcccccacctgaaacatcaccctcaagaaccagctaatcccaacatgcctgttgttttgacatctggaacagggtcgcaagcgcagccacaaccagctgcaaatcaggctcttgcagctgggactcactccagccctgtcccaggatctataggagttgcaggccgttcccaggacgacgctatggtggactacttctttcagaggcagcatggtgcgttccatggatgaactgaatcatgattttcaagcacttgctctggagggaagagcgatgggagagcagctcttgccaggtaaaaagttttgggaaacagatgaatccagcaaagatggaccaaaaggaatattcctgggtgatcaatggcgagacagtgcctggggaacatcagatcattcagtttcccagccaatcatggtgcagagaagacctggtcagagtttccatgtgaacagtgaggtcaattctgtactgtccccacgatcggagagtgggggactaggcgttagcatggtggagtatgtgttgagctcatccccgggcgattcctgtctaagaaaaggaggatttggcccaagggatgcagacagtgatgaaaacgacaaaggtgaaaagaagaacaagggtacgtttgatggagataagctaggagatttgaaggaggagggtgatgtgatggacaagaccaatggtttaccagtgcagaatgggattgatgcagacgtcaaagattttagccgtacccctggtaattgccagaactctgctaatgaagtggatcttctgggtccaaaccagaatggttctgagggcttagcccagctgaccagcaccaatggtgccaagcctgtggaggatttctccaacatggagtcccagagtgtccccttggaccccatggaacatgtgggcatggagcctcttcagtttgattattcaggcacgcaggtacctgtggactcagcagcagcaactgtgggactttttgactacaattctcaacaacagctgttccaaagacctaatgcgcttgctgtccagcagttgacagctgctcagcagcagcagtatgcactggcagctgctcatcagccgcacatcggtttagctcccgctgcgtttgtccccaatccatacatcatcagcgctgctcccccagggacggacccctacacagctggattggctgcagcagcgacactaggcccagctgtggtccctcaccagtattatggagttactccctggggagtctaccctgccagtcttttccagcagcaagctgccgctgccgctgcagcaactaattcagctaatcaacagaccaccccacaggctcagcaaggacagcagcaggttctccgtggaggagccagccaacgtcctttgaccccaaaccagaaccagcagggacagcaaacggatccccttgtggcagctgcagcagtgaattctgcccttgcatttggacaaggtctggcagcaggcatgccaggttatccggtgttggctcctgctgcttactatgaccaaactggtgcccttgtagtgaatgcaggcgcgagaaatggtcttggagctcctgttcgacttgtagctcctgccccagtcatcattagttcctcagctgcacaagcagctgttgcagcagccgcagcttcagcaaatggagcagctggtggtcttgctggaacaacaaatggaccatttcgccctttaggaacacagcagcctcagccccagccccagcagcagcccaataacaacctggcatccagttctttctacggcaacaactctctgaacagcaattcacagagcagctccctcttctcccagggctctgcccagcctgccaacacatccttgggattcggaagtagcagttctctcggcgccaccctgggatccgcccttggagggtttggaacagcagttgcaaactccaacactggcagtggctcccgccgtgactccctgactggcagcagtgacctttataagaggacatcgagcagcttgacccccattggacacagtttttataacggccttagcttttcctcctctcctggacccgtgggcatgcctctccctagtcagggaccaggacattcacagacaccacctccttccctctcttcacatggatcctcttcaagcttaaacctgggaggactcacgaatggcagtggaagatacatctctgctgctccaggcgctgaagccaagtaccgcagtgcaagcagcgcctccagcctcttcagcccgagcagcactcttttctcttcctctcgtttgcgatatggaatgtctgatgtcatgccttctggcaggagcaggcttttggaagattttcgaaacaaccggtaccccaatttacaactgcgggagattgctggacatataatggaattttcccaagaccagcatgggtccagattcattcagctgaaactggagcgtgccacaccagctgagcgccagcttgtcttcaatgaaatcctccaggctgcctaccaactcatggtggatgtgtttggtaattacgtcattcagaagttctttgaatttggcagtcttgaacagaagctggctttggcagaacggattcgaggccacgtcctgtcattggcactacagatgtatggctgccgtgttatccagaaagctcttgagtttattccttcagaccagcagaatgagatggttcgggaactagatggccatgtcttgaagtgtgtgaaagatcagaatggcaatcacgtggttcagaaatgcattgaatgtgtacagccccagtctttgcaatttatcatcgatgcgtttaagggacaggtatttgccttatccacacatccttatggctgccgagtgattcagagaatcctggagcactgtctccctgaccagacactccctattttagaggagcttcaccagcacacagagcagcttgtacaggatcaatatggaaattatgtaatccaacatgtactggagcacggtcgtcctgaggataaaagcaaaattgtagcagaaatccgaggcaatgtacttgtattgagtcagcacaaatttgcaagcaatgttgtggagaagtgtgttactcacgcctcacgtacggagcgcgctgtgctcatcgatgaggtgtgcaccatgaacgacggtccccacagtgccttatacaccatgatgaaggaccagtatgccaactacgtggtccagaagatgattgacgtggcggagccaggccagcggaagatcgtcatgcataagatccggccccacatcgcaactcttcgtaagtacacctatggcaagcacattctggccaagctggagaagtactacatgaagaacggtgttgacttagggcccatctgtggcccccctaatggtatcatctgaggcagtgtcacccgctgttccctcattcccgctgacctcactggcccactggcaaatccaaccagcaaccagaaatgttctagtgtagagtctgagacgggcaagtggttgctccaggattactccctcctccaaaaaaggaatcaaatccacgagtggaaaagcctttgtaaatttaattttattacacataacatgtactattttttttaattgactaattgccctgctgttttactggtgtataggatacttgtacataggtaaccaatgtacatgggaggccacatattttgttcactgttgtatctatatttcacatgtggaaactttcagggtggttggtttaacaaaaaaaaaaagctttaaaaaaaaaagaaaaaaaggaaaaggtttttagctcatttgcctggccggcaagttttgcaaatagctcttccccacctcctcattttagtaaaaaacaaacaaaaacaaaaaaacctgagaagtttgaattgtagttaaatgaccccaaactggcatttaacactgtttataaaaaatatatatatatatatatatatataatgaaaaaggtttcagagttgctaaagcttcagtttgtgacattaagtttatgaaattctaaaaaatgccttttttggagactatattatgctgaagaaggctgttcgtgaggaggagatgcgagcacccagaacgtcttttgaggctgggcgggtgtgattgtttactgcctactggatttttttctattaacattgaaaggtaaaatctgattatttagcatgagaaaaaaaaatccaactctgcttttggtcttgcttctataaatatatagtgtatacttggtgtagactttgcatatatacaaatttgtagtattttcttgttttgatgtctaatctgtatctataatgtaccctagtagtcgaacatacttttgattgtacaattgtacatttgtatacctgtaatgtaaatgtggagaagtttgaatcaacataaacacgttttttggtaagaaaagagaattagccagccctgtgcattcagtgtatattctcaccttttatggtcgtagcatatagtgttgtatattgtaaattgtaatttcaaccagaagtaaatttttttcttttgaaggaataaatgttctttatacagcctagttaatgtttaaaaagaaaaaaatagcttggttttatttgtcatctagtctcaagtatagcgagattctttctaaatgttattcaagattgagttctcactagtgtttttttaatcctaaaaaagtaatgttttgattttgtgacagtcaaaaggacgtgcaaaagtctagccttgcccgagctttccttacaatcagagcccctctcaccttgtaaagtgtgaatcgcccttcccttttgtacagaagatgaactgtattttgcattttgtctacttgtaagtgaatgtaacatactgtcaattttccttgtttgaatatagaattgtaacactacacggtgtacatttccagagccttgtgtatatttccaatgaacttttttgcaagcacacttgtaaccatatgtgtataattaacaaacctgtgtatgcttatgcctgggcaactattttttgtaactcttgtgtagattgtctctaaacaatgtgtgatctttattttgaaaaatacagaactttggaatctgaaaaaaaaaaaaaaaaaaaaaaaanaanaaaaanaaaaaacaaaacaaaaacannnaananaaanaaacacaaaanaaanannaaaacacaacaaca

SEQ ID NO: 60819 - DNA, 5031 bp, Homo sapiens
  misc_feature (4959)..(4959): n is a, c, g, or t
  misc_feature (4962)..(4962): n is a, c, g, or t
  misc_feature (4968)..(4968): n is a, c, g, or t
  misc_feature (4988)..(4990): n is a, c, g, or t
  misc_feature (4993)..(4993): n is a, c, g, or t
  misc_feature (4995)..(4995): n is a, c, g, or t
  misc_feature (4999)..(4999): n is a, c, g, or t
  misc_feature (5010)..(5010): n is a, c, g, or t
  misc_feature (5014)..(5014): n is a, c, g, or t
  misc_feature (5016)..(5017): n is a, c, g, or t
aacccagtccccagtgggccgccatgttgtgggagtgaaaggtaagggggagcgagagcgccagagagagaagatcggggggctgaaatccatcttcatcctaccgctccgcccgtgttggtggaatgagcgttgcatgtgtcttgaagagaaaagcagtgctttggcaggactctttcagcccccacctgaaacatcaccctcaagaaccagctaatcccaacatgcctgttgttttgacatctggaacagggtcgcaagcgcagccacaaccagctgcaaatcaggctcttgcagctgggactcactccagccctgtcccaggatctataggagttgcaggccgttcccaggacgacgctatggtggactacttctttcagaggcagcatggtgagcagcttgggggaggaggaagtggaggaggcggctataataatagcaaacatcgatggcctactggggataacattcatgcagaacatcaggtgcgttccatggatgaactgaatcatgattttcaagcacttgctctggagggaagagcgatgggagagccgtacccctggtaattgccagaactctgctaatgaagtggatcttctgggtccaaaccagaatggttctgagggcttagcccagctgaccagcaccaatggtgccaagcctgtggaggatttctccaacatggagtcccagagtgtccccttggaccccatggaacatgtgggcatggagcctcttcagtttgattattcaggcacgcaggtacctgtggactcagcagcagcaactgtgggactttttgactacaattctcaacaacagctgttccaaagacctaatgcgcttgctgtccagcagttgacagctgctcagcagcagcagtatgcactggcagctgctcatcagccgcacatcggtttagctcccgctgcgtttgtccccaatccatacatcatcagcgctgctcccccagggacggacccctacacagctggattggctgcagcagcgacactaggcccagctgtggtccctcaccagtattatggagttactccctggggagtctaccctgccagtcttttccagcagcaagctgccgctgccgctgcagcaactaattcagctaatcaacagaccaccccacaggctcagcaaggacagcagcaggttctccgtggaggagccagccaacgtcctttgaccccaaaccagaaccagcagggacagcaaacggatccccttgtggcagctgcagcagtgaattctgcccttgcatttggacaaggtctggcagcaggcatgccaggttatccggtgttggctcctgctgcttactatgaccaaactggtgcccttgtagtgaatgcaggcgcgagaaatggtcttggagctcctgttcgacttgtagctcctgccccagtcatcattagttcctcagctgcacaagcagctgttgcagcagccgcagcttcagcaaatggagcagctggtggtcttgctggaacaacaaatggaccatttcgccctttaggaacacagcagcctcagccccagccccagcagcagcccaataacaacctggcatccagttctttctacggcaacaactctctgaacagcaattcacagagcagctccctcttctcccagggctctgcccagcctgccaacacatccttgggattcggaagtagcagttctctcggcgccaccctgggatccgcccttggagggtttggaacagcagttgcaaactccaacactggcagtggctcccgccgtgactccctgactggcagcagtgacctttataagaggacatcgagcagcttgacccccattggacacagtttttataacggccttagcttttcctcctctcctggacccgtgggcatgcctctccctagtcagggaccaggacattcacagacaccacctccttccctctcttcacatggatcctcttcaagcttaaacctgggaggactcacgaatggcagtggaagatacatctctgctgctccaggcgctgaagccaagtaccgcagtgcaagcagcgcctccagcctcttcagcccgagcagcactcttttctcttcctctcgtttgcgatatggaatgtctgatgtcatgccttctggcaggagcaggcttttggaagattttcgaaacaaccggtaccccaatttacaactgcgggagattgctggacatataatggaattttcccaagaccagcatgggtccagattcattcagctgaaactggagcgtgccacaccagctgagcgccagcttgtcttcaatgaaatcctccaggctgcctaccaactcatggtggatgtgtttggtaattacgtcattcagaagttctttgaatttggcagtcttgaacagaagctggctttggcagaacggattcgaggccacgtcctgtcattggcactacagatgtatggctgccgtgttatccagaaagctcttgagtttattccttcagaccagcagaatgagatggttcgggaactagatggccatgtcttgaagtgtgtgaaagatcagaatggcaatcacgtggttcagaaatgcattgaatgtgtacagccccagtctttgcaatttatcatcgatgcgtttaagggacaggtatttgccttatccacacatccttatggctgccgagtgattcagagaatcctggagcactgtctccctgaccagacactccctattttagaggagcttcaccagcacacagagcagcttgtacaggatcaatatggaaattatgtaatccaacatgtactggagcacggtcgtcctgaggataaaagcaaaattgtagcagaaatccgaggcaatgtacttgtattgagtcagcacaaatttgcaagcaatgttgtggagaagtgtgttactcacgcctcacgtacggagcgcgctgtgctcatcgatgaggtgtgcaccatgaacgacggtccccacagtgccttatacaccatgatgaaggaccagtatgccaactacgtggtccagaagatgattgacgtggcggagccaggccagcggaagatcgtcatgcataagatccggccccacatcgcaactcttcgtaagtacacctatggcaagcacattctggccaagctggagaagtactacatgaagaacggtgttgacttagggcccatctgtggcccccctaatggtatcatctgaggcagtgtcacccgctgttccctcattcccgctgacctcactggcccactggcaaatccaaccagcaaccagaaatgttctagtgtagagtctgagacgggcaagtggttgctccaggattactccctcctccaaaaaaggaatcaaatccacgagtggaaaagcctttgtaaatttaattttattacacataacatgtactattttttttaattgactaattgccctgctgttttactggtgtataggatacttgtacataggtaaccaatgtacatgggaggccacatattttgttcactgttgtatctatatttcacatgtggaaactttcagggtggttggtttaacaaaaaaaaaaagctttaaaaaaaaaagaaaaaaaggaaaaggtttttagctcatttgcctggccggcaagttttgcaaatagctcttccccacctcctcattttagtaaaaaacaaacaaaaacaaaaaaacctgagaagtttgaattgtagttaaatgaccccaaactggcatttaacactgtttataaaaaatatatatatatatatatatatataatgaaaaaggtttcagagttgctaaagcttcagtttgtgacattaagtttatgaaattctaaaaaatgccttttttggagactatattatgctgaagaaggctgttcgtgaggaggagatgcgagcacccagaacgtcttttgaggctgggcgggtgtgattgtttactgcctactggatttttttctattaacattgaaaggtaaaatctgattatttagcatgagaaaaaaaaatccaactctgcttttggtcttgcttctataaatatatagtgtatacttggtgtagactttgcatatatacaaatttgtagtattttcttgttttgatgtctaatctgtatctataatgtaccctagtagtcgaacatacttttgattgtacaattgtacatttgtatacctgtaatgtaaatgtggagaagtttgaatcaacataaacacgttttttggtaagaaaagagaattagccagccctgtgcattcagtgtatattctcaccttttatggtcgtagcatatagtgttgtatattgtaaattgtaatttcaaccagaagtaaatttttttcttttgaaggaataaatgttctttatacagcctagttaatgtttaaaaagaaaaaaatagcttggttttatttgtcatctagtctcaagtatagcgagattctttctaaatgttattcaagattgagttctcactagtgtttttttaatcctaaaaaagtaatgttttgattttgtgacagtcaaaaggacgtgcaaaagtctagccttgcccgagctttccttacaatcagagcccctctcaccttgtaaagtgtgaatcgcccttcccttttgtacagaagatgaactgtattttgcattttgtctacttgtaagtgaatgtaacatactgtcaattttccttgtttgaatatagaattgtaacactacacggtgtacatttccagagccttgtgtatatttccaatgaacttttttgcaagcacacttgtaaccatatgtgtataattaacaaacctgtgtatgcttatgcctgggcaactattttttgtaactcttgtgtagattgtctctaaacaatgtgtgatctttattttgaaaaatacagaactttggaatctgaaaaaaaaaaaaaaaaaaaaaaaanaanaaaaanaaaaaacaaaacaaaaacannnaananaaanaaacacaaaanaaanannaaaacacaacaaca

SEQ ID NO: 60820 - DNA, 4121 bp, Homo sapiens
  misc_feature (4049)..(4049): n is a, c, g, or t
  misc_feature (4052)..(4052): n is a, c, g, or t
  misc_feature (4058)..(4058): n is a, c, g, or t
  misc_feature (4078)..(4080): n is a, c, g, or t
  misc_feature (4083)..(4083): n is a, c, g, or t
  misc_feature (4085)..(4085): n is a, c, g, or t
  misc_feature (4089)..(4089): n is a, c, g, or t
  misc_feature (4100)..(4100): n is a, c, g, or t
  misc_feature (4104)..(4104): n is a, c, g, or t
  misc_feature (4106)..(4107): n is a, c, g, or t
ggctgagatgagcctcagtagttcagactttctttacctttcttttgctatttttaggcccagctgtggtccctcaccagtattatggagttactccctggggagtctaccctgccagtcttttccagcagcaagctgccgctgccgctgcagcaactaattcagctaatcaacagaccaccccacaggctcagcaaggacagcagcaggttctccgtggaggagccagccaacgtcctttgaccccaaaccagaaccagcagggacagcaaacggatccccttgtggcagctgcagcagtgaattctgcccttgcatttggacaaggtctggcagcaggcatgccaggtgcggctgcattgttattcctaatactttggcagggaaaaaggctgcacgtttgaggttatccggtgttggctcctgctgcttactatgaccaaactggtgcccttgtagtgaatgcaggcgcgagaaatggtcttggagctcctgttcgacttgtagctcctgccccagtcatcattagttcctcagctgcacaagcagctgttgcagcagccgcagcttcagcaaatggagcagctggtggtcttgctggaacaacaaatggaccatttcgccctttaggaacacagcagcctcagccccagccccagcagcagcccaataacaacctggcatccagttctttctacggcaacaactctctgaacagcaattcacagagcagctccctcttctcccagggctctgcccagcctgccaacacatccttgggattcggaagtagcagttctctcggcgccaccctgggatccgcccttggagggtttggaacagcagttgcaaactccaacactggcagtggctcccgccgtgactccctgactggcagcagtgacctttataagaggacatcgagcagcttgacccccattggacacagtttttataacggccttagcttttcctcctctcctggacccgtgggcatgcctctccctagtcagggaccaggacattcacagacaccacctccttccctctcttcacatggatcctcttcaagcttaaacctgggaggactcacgaatggcagtggaagatacatctctgctgctccaggcgctgaagccaagtaccgcagtgcaagcagcgcctccagcctcttcagcccgagcagcactcttttctcttcctctcgtttgcgatatggaatgtctgatgtcatgccttctggcaggagcaggcttttggaagattttcgaaacaaccggtaccccaatttacaactgcgggagattgctggacatataatggaattttcccaagaccagcatgggtccagattcattcagctgaaactggagcgtgccacaccagctgagcgccagcttgtcttcaatgaaatcctccaggctgcctaccaactcatggtggatgtgtttggtaattacgtcattcagaagttctttgaatttggcagtcttgaacagaagctggctttggcagaacggattcgaggccacgtcctgtcattggcactacagatgtatggctgccgtgttatccagaaagctcttgagtttattccttcagaccagcagaatgagatggttcgggaactagatggccatgtcttgaagtgtgtgaaagatcagaatggcaatcacgtggttcagaaatgcattgaatgtgtacagccccagtctttgcaatttatcatcgatgcgtttaagggacaggtatttgccttatccacacatccttatggctgccgagtgattcagagaatcctggagcactgtctccctgaccagacactccctattttagaggagcttcaccagcacacagagcagcttgtacaggatcaatatggaaattatgtaatccaacatgtactggagcacggtcgtcctgaggataaaagcaaaattgtagcagaaatccgaggcaatgtacttgtattgagtcagcacaaatttgcaagcaatgttgtggagaagtgtgttactcacgcctcacgtacggagcgcgctgtgctcatcgatgaggtgtgcaccatgaacgacggtccccacagtgccttatacaccatgatgaaggaccagtatgccaactacgtggtccagaagatgattgacgtggcggagccaggccagcggaagatcgtcatgcataagatccggccccacatcgcaactcttcgtaagtacacctatggcaagcacattctggccaagctggagaagtactacatgaagaacggtgttgacttagggcccatctgtggcccccctaatggtatcatctgaggcagtgtcacccgctgttccctcattcccgctgacctcactggcccactggcaaatccaaccagcaaccagaaatgttctagtgtagagtctgagacgggcaagtggttgctccaggattactccctcctccaaaaaaggaatcaaatccacgagtggaaaagcctttgtaaatttaattttattacacataacatgtactattttttttaattgactaattgccctgctgttttactggtgtataggatacttgtacataggtaaccaatgtacatgggaggccacatattttgttcactgttgtatctatatttcacatgtggaaactttcagggtggttggtttaacaaaaaaaaaaagctttaaaaaaaaaagaaaaaaaggaaaaggtttttagctcatttgcctggccggcaagttttgcaaatagctcttccccacctcctcattttagtaaaaaacaaacaaaaacaaaaaaacctgagaagtttgaattgtagttaaatgaccccaaactggcatttaacactgtttataaaaaatatatatatatatatatatatataatgaaaaaggtttcagagttgctaaagcttcagtttgtgacattaagtttatgaaattctaaaaaatgccttttttggagactatattatgctgaagaaggctgttcgtgaggaggagatgcgagcacccagaacgtcttttgaggctgggcgggtgtgattgtttactgcctactggatttttttctattaacattgaaaggtaaaatctgattatttagcatgagaaaaaaaaatccaactctgcttttggtcttgcttctataaatatatagtgtatacttggtgtagactttgcatatatacaaatttgtagtattttcttgttttgatgtctaatctgtatctataatgtaccctagtagtcgaacatacttttgattgtacaattgtacatttgtatacctgtaatgtaaatgtggagaagtttgaatcaacataaacacgttttttggtaagaaaagagaattagccagccctgtgcattcagtgtatattctcaccttttatggtcgtagcatatagtgttgtatattgtaaattgtaatttcaaccagaagtaaatttttttcttttgaaggaataaatgttctttatacagcctagttaatgtttaaaaagaaaaaaatagcttggttttatttgtcatctagtctcaagtatagcgagattctttctaaatgttattcaagattgagttctcactagtgtttttttaatcctaaaaaagtaatgttttgattttgtgacagtcaaaaggacgtgcaaaagtctagccttgcccgagctttccttacaatcagagcccctctcaccttgtaaagtgtgaatcgcccttcccttttgtacagaagatgaactgtattttgcattttgtctacttgtaagtgaatgtaacatactgtcaattttccttgtttgaatatagaattgtaacactacacggtgtacatttccagagccttgtgtatatttccaatgaacttttttgcaagcacacttgtaaccatatgtgtataattaacaaacctgtgtatgcttatgcctgggcaactattttttgtaactcttgtgtagattgtctctaaacaatgtgtgatctttattttgaaaaatacagaactttggaatctgaaaaaaaaaaaaaaaaaaaaaaaanaanaaaaanaaaaaacaaaacaaaaacannnaananaaanaaacacaaaanaaanannaaaacacaacaaca

SEQ ID NO: 60821 - DNA, 3768 bp, Homo sapiens
  misc_feature (3741)..(3741): n is a, c, g, or t
aacccagtccccagtgggccgccatgttgtgggagtgaaaggtaagggggagcgagagcgccagagagagaagatcggggggctgaaatccatcttcatcctaccgctccgcccgtgttggtggaatgagcgttgcatgtgtcttgaagagaaaagcagtgctttggcaggactctttcagcccccacctgaaacatcaccctcaagaaccagctaatcccaacatgcctgttgttttgacatctggaacagggtcgcaagcgcagccacaaccagctgcaaatcaggctcttgcagctgggactcactccagccctgtcccaggatctataggagttgcaggccgttcccaggacgacgctatggtggactacttctttcagaggcagcatggtgagcagcttgggggaggaggaagtggaggaggcggctataataatagcaaacatcgatggcctactggggataacattcatgcagaacatcaggtgcgttccatggatgaactgaatcatgattttcaagcacttgctctggagggaagagcgatgggagagcagctcttgccaggtaaaaagttttgggaaacagatgaatccagcaaagatggaccaaaaggaatattcctgggtgatcaatggcgagacagtgcctggggaacatcagatcattcagtttcccagccaatcatggtgcagagaagacctggtcagagtttccatgtgaacagtgaggtcaattctgtactgtccccacgatcggagagtgggggactaggcgttagcatggtggagtatgtgttgagctcatccccgggcgattcctgtctaagaaaaggaggatttggcccaagggatgcagacagtgatgaaaacgacaaaggtgaaaagaagaacaagggtacgtttgatggagataagctaggagatttgaaggaggagggtgatgtgatggacaagaccaatggtttaccagtgcagaatgggattgatgcagacgtcaaagattttagccgtacccctggtaattgccagaactctgctaatgaagtggatcttctgggtccaaaccagaatggttctgagggcttagcccagctgaccagcaccaatggtgccaagcctgtggaggatttctccaacatggagtcccagagtgtccccttggaccccatggaacatgtgggcatggagcctcttcagtttgattattcaggcacgcaggtacctgtggactcagcagcagcaactgtgggactttttgactacaattctcaacaacagctgttccaaagacctaatgcgcttgctgtccagcagttgacagctgctcagcagcagcagtatgcactggcagctgctcatcagccgcacatcggtttagctcccgctgcgtttgtccccaatccatacatcatcagcgctgctcccccagggacggacccctacacagctggattggctgcagcagcgacactaggcccagctgtggtccctcaccagtattatggagttactccctggggagtctaccctgccagtcttttccagcagcaagctgccgctgccgctgcagcaactaattcagctaatcaacagaccaccccacaggctcagcaaggacagcagcaggttctccgtggaggagccagccaacgtcctttgaccccaaaccagaaccagcagggacagcaaacggatccccttgtggcagctgcagcagtgaattctgcccttgcatttggacaaggtctggcagcaggcatgccaggttatccggtgttggctcctgctgcttactatgaccaaactggtgcccttgtagtgaatgcaggcgcgagaaatggtcttggagctcctgttcgacttgtagctcctgccccagtcatcattagttcctcagctgcacaagcagctgttgcagcagccgcagcttcagcaaatggagcagctggtggtcttgctggaacaacaaatggaccatttcgccctttaggaacacagcagcctcagccccagccccagcagcagcccaataacaacctggcatccagttctttctacggcaacaactctctgaacagcaattcacagagcagctccctcttctcccagggctctgcccagcctgccaacacatccttgggattcggaagtagcagttctctcggcgccaccctgggatccgcccttggagggtttggaacagcagttgcaaactccaacactggcagtggctcccgccgtgactccctgactggcagcagtgacctttataagaggacatcgagcagcttgacccccattggacacagtttttataacggccttagcttttcctcctctcctggacccgtgggcatgcctctccctagtcagggaccaggacattcacagacaccacctccttccctctcttcacatggatcctcttcaagcttaaacctgggaggactcacgaatggcagtggaagatacatctctgctgctccaggcgctgaagccaagtaccgcagtgcaagcagcgcctccagcctcttcagcccgagcagcactcttttctcttcctctcgtttgcgatatggaatgtctgatgtcatgccttctggcaggagcaggcttttggaagattttcgaaacaaccggtaccccaatttacaactgcgggagattgctggacatataatggaattttcccaagaccagcatgggtccagattcattcagctgaaactggagcgtgccacaccagctgagcgccagcttgtcttcaatgaaatcctccaggctgcctaccaactcatggtggatgtgtttggtaattacgtcattcagaagttctttgaatttggcagtcttgaacagaagctggctttggcagaacggattcgaggccacgtcctgtcattggcactacagatgtatggctgccgtgttatccagaaagctcttgagtttattccttcagaccagcagaatgagatggttcgggaactagatggccatgtcttgaagtgtgtgaaagatcagaatggcaatcacgtggttcagaaatgcattgaatgtgtacagccccagtctttgcaatttatcatcgatgcgtttaagggacaggtatttgccttatccacacatccttatggctgccgagtgattcagagaatcctggagcactgtctccctgaccagacactccctattttagaggagcttcaccagcacacagagcagcttgtacaggatcaatatggaaattatgtaatccaacatgtactggagcacggtcgtcctgaggataaaagcaaaattgtagcagaaatccgaggcaatgtacttgtattgagtcagcacaaatttgcaagcaatgttgtggagaagtgtgttactcacgcctcacgtacggagcgcgctgtgctcatcgatgaggtgtgcaccatgaacgacggtccccacagtgccttatacaccatgatgaaggaccagtatgccaactacgtggtccagaagatgattgacgtggcggagccaggccagcggaagatcgtcatgcataagatccggccccacatcgcaactcttcgtaagtacacctatggcaagcacattctggccaagctggagaagtactacatgaagaacggtgttgacttagggcccatctgtggcccccctaatggtatcatctgaggcagtgtcacccgctgttccctcattcccgctgacctcactggcccactggcgnttgctcaagaatactcccctcttcaaa

SEQ ID NO: 60822 - DNA, 3533 bp, Homo sapiens
aacccagtccccagtgggccgccatgttgtgggagtgaaaggtaagggggagcgagagcgccagagagagaagatcggggggctgaaatccatcttcatcctaccgctccgcccgtgttggtggaatgagcgttgcatgtgtcttgaagagaaaagcagtgctttggcaggactctttcagcccccacctgaaacatcaccctcaagaaccagctaatcccaacatgcctgttgttttgacatctggaacagggtcgcaagcgcagccacaaccagctgcaaatcaggctcttgcagctgggactcactccagccctgtcccaggatctataggagttgcaggccgttcccaggacgacgctatggtggactacttctttcagaggcagcatggtgagcagcttgggggaggaggaagtggaggaggcggctataataatagcaaacatcgatggcctactggggataacattcatgcagaacatcaggtgcgttccatggatgaactgaatcatgattttcaagcacttgctctggagggaagagcgatgggagagcagctcttgccaggtaaaaagttttgggaaacagatgaatccagcaaagatggaccaaaaggaatattcctgggtgatcaatggcgagacagtgcctggggaacatcagatcattcagtttcccagccaatcatggtgcagagaagacctggtcagagtttccatgtgaacagtgaggtcaattctgtactgtccccacgatcggagagtgggggactaggcgttagcatggtggagtatgtgttgagctcatccccgggcgattcctgtctaagaaaaggaggatttggcccaagggatgcagacagtgatgaaaacgacaaaggtgaaaagaagaacaagggtacgtttgatggagataagctaggagatttgaaggaggagggtgatgtgatggacaagaccaatggtttaccagtgcagaatgggattgatgcagacgtcaaagattttagccgtacccctggtaattgccagaactctgctaatgaagtggatcttctgggtccaaaccagaatggttctgagggcttagcccagctgaccagcaccaatggtgccaagcctgtggaggatttctccaacatggagtcccagagtgtccccttggaccccatggaacatgtgggcatggagcctcttcagtttgattattcaggcacgcaggtacctgtggactcagcagcagcaactgtgggactttttgactacaattctcaacaacagctgttccaaagacctaatgcgcttgctgtccagcagttgacagctgctcagcagcagcagtatgcactggcagctgctcatcagccgcacatcggtttagctcccgctgcgtttgtccccaatccatacatcatcagcgctgctcccccagggacggacccctacacagctggattggctgcagcagcgacactaggcccagctgtggtccctcaccagtattatggagttactccctggggagtctaccctgccagtcttttccagcagcaagctgccgctgccgctgcagcaactaattcagctaatcaacagaccaccccacaggctcagcaaggacagcagcaggttctccgtggaggagccagccaacgtcctttgaccccaaaccagaaccagcagggacagcaaacggatccccttgtggcagctgcagcagtgaattctgcccttgcatttggacaaggtctggcagcaggcatgccaggttatccggtgttggctcctgctgcttactatgaccaaactggtgcccttgtagtgaatgcaggcgcgagaaatggtcttggagctcctgttcgacttgtagctcctgccccagtcatcattagttcctcagctgcacaagcagctgttgcagcagccgcagcttcagcaaatggagcagctggtggtcttgctggaacaacaaatggaccatttcgccctttaggaacacagcagcctcagccccagccccagcagcagcccaataacaacctggcatccagttctttctacggcaacaactctctgaacagcaattcacagagcagctccctcttctcccagggctctgcccagcctgccaacacatccttgggattcggaagtagcagttctctcggcgccaccctgggatccgcccttggagggtttggaacagcagttgcaaactccaacactggcagtggctcccgccgtgactccctgactggcagcagtgacctttataagaggacatcgagcagcttgacccccattggacacagtttttataacggccttagcttttcctcctctcctggacccgtgggcatgcctctccctagtcagggaccaggacattcacagacaccacctccttccctctcttcacatggatcctcttcaagcttaaacctgggaggactcacgaatggcagtggaagatacatctctgctgctccaggcgctgaagccaagtaccgcagtgcaagcagcgcctccagcctcttcagcccgagcagcactcttttctcttcctctcgtttgcgatatggaatgtctgatgtcatgccttctggcaggagcaggcttttggaagattttcgaaacaaccggtaccccaatttacaactgcgggagattgctggacatataatggaattttcccaagaccagcatgggtccagattcattcagctgaaactggagcgtgccacaccagctgagcgccagcttgtcttcaatgaaatcctccaggctgcctaccaactcatggtggatgtgtttggtaattacgtcattcagaagttctttgaatttggcagtcttgaacagaagctggctttggcagaacggattcgaggccacgtcctgtcattggcactacagatgtatggctgccgtgttatccagaaagctcttgagtttattccttcagaccagcagaatgagatggttcgggaactagatggccatgtcttgaagtgtgtgaaagatcagaatggcaatcacgtggttcagaaatgcattgaatgtgtacagccccagtctttgcaatttatcatcgatgcgtttaagggacaggtatttgccttatccacacatccttatggctgccgagtgattcagagaatcctggagcactgtctccctgaccagacactccctattttagaggagcttcaccagcacacagagcagcttgtacagcataaatgcattatatctcatcggctgcttctttatttatgtcactatctcttgtgttaaaaaaagcctggggaggttctgtgggcaactgggttctccactgggcaaccccccgggaaagaaggaatttatgtcccaagggaacaagatgctgctgaccttccacacagacttctccaacgaggagaatgggaccattatgttctacaagggcttcctggcctactaccaagctgtggaccttgatgaatgtgcttcccggagcaaatcaggagaggaggatccccagcccca

SEQ ID NO: 60823 - DNA, 1538 bp, Homo sapiens
ggctaggagaggacgtggggtgaatcggacgaggctgtatccccatcacctccacaactccactcacccctgacggctccatccacctcaccagttggaaggcttgtggtttcagagaggagcaatgctggtcagcgctgcccagactccagtgtttacagatcaccagcatttacaaccaatccaatggccagaagcctcctctaacaagcccagaaggagttctgaaggggcagatgggggtgtgagtagtcggggagtcgggattgccagcaccctcacccttccttgggggcaagtagaggtgagaacactttccccacctccctccacagacactcctgaggacgctgcatcccacgcactgcctggtgcgtccatagagagaggatcaggtctcagcatttcatctgtgaaagaggcatggccctgggttagaaaggagggcaggagacatggaggaactggggggcacccagatggtgcagatggtttgcacacctgagcctgtctgtggtgaccattccgctcctctcccactaccctccaatctatcattccctactctctaaggccaaaatatcctgagcaaggctggcaaccccaccccaccatcccaaatgcaagcagccaggcccaggagttcctctggcccccacaggcatggagctcccagctggtgggtacagcttgagaggggggcagctccctcaggctaagctactgcccttcactgggccagccctgcctccagccctcacctctctcaccccaactctcccccaagcccctttctactcaacgggtgtagccactggtgctttgaagccttttgtttttataagatggtttttgcaaggggaccaggttctcttttcactgggaccttgcaaggaggggagtgctctcctggtttctgtgcaggcgggttgattaaagatggtgttttcttctctatcttcctgtcctgcccattgggtctatagaactttctaagtgagaagtccctgcatgagggcaggcaggaatgatttgatgttgatgttatcaaatattcctggggtggccaggcacggtggctcatgcctgtaatcccaacacttttgaaggctgaggtgggcagatcacgcgaggtcaggagtttgagaccagcctggccaacatgatgaaaccctgtctctactaaaaatacaaaaattaggcagggccgggaggctgaggaaggagaatcacttgaacttgggatgcagaggtggagtgagctcagatggcgccactctaccccagcctgggtgatagagcaagactccatctcaaaacaataaaaaagaaacaaatcctggggcactggcctgtaactctgactgggtgtgtagctttaggcaactcactctccctctctatactcatccaaaaaaaaaaaaaaaaaaaagcagaggtcaaacaaaatcagtgggttcccaaatgtggcttcataatcccttagagatcttcctacttattttcctgataaaatgcattttaagtttatgctttca

SEQ ID NO: 60824 - DNA, 4168 bp, Homo sapiens
cgtagcgcccgcagagcaacgcaaagaggaagaacagagaaacggctatgagaaaaagggccgaagagtgagaagcagagggccttacccgagggggcggcaaccgggggccccacggtcctccggccgcgcccgcgctggcgctgatagcgggctcacaacgatgacgtagcgaggagcggaaaacgcggtaaccaaggcggccccaggcgcgcacttccgcccggccttccaccggtccaggtctgcccctccgcagcgatagttcacgctctcggcggggctgtaccggaagttgcctctacttcgccgttccggggcggggcttacttcgcagcgactacttgccgcacttccgggctgccaggcagctgctgtggctccaggatgatggagacagagcgacttgtgctaccccctccagatcccctggacctaccccttcgggccgtggagctcggatgcacggggcactgggagctgctgaacttgcctggagctccagagagtagccttccccatggcctccctccttgtgccccagatctgcagcaagaagcagaacagttgtttctgtcatccccagcctggctgcctctgcatggtgtggagcactcagcccgaaaatggcagaggaagacggatccctggtctcttttggctgtcctgggagccccagtcccatccgacctacaggcccaaagacacccaaccacaggccagatactgggttacaaagaggtcttgctggagaacacaaatctctcggctacaacctccttgtctcttcgccggcctccagggccagcctcccagtccttatggggaaatccaactcggtatcccttctggccaggggggatggatgaacccaccataacagatctgaacacacgggaggaggctgaggaggagatagactttgagaaagatcttcttactattccacctggtttcaagaaaggcatggactttgcaccaaaagattgtccaactccagctcctggactactaagccttagctgtctgttggagcctctggatttgggtgggggtgacgaggatgagaatgaggcagtgggacagccaggaggtcccagaggggacactgtttcagcctctccctgcagtgctcccctggcccgagcaagcagcttggaagacctagtgttgaaggaagcgtccacagctgtatccaccccagaggccccagagcctccatctcaggagcagtgggccatccctgtggacgccacctcccctgttggtgatttctatcgcctcattccccagccagccttccagtgggcatttgagccagatgtgtttcagaaacaggccatcctgcacttggaacggcatgactctgtctttgtcgcagctcacacatctgcaggaaaaacagttgtggctgaatatgccattgccctggcccagaaacacatgacacgcaccatctacacttcgcccatcaaggccctgagcaaccagaagttccgggacttccgaaacacattcggggatgtggggctgctcaccggggatgtacagctgcatccggaggcctcctgcctcatcatgaccacagagatccttcgctccatgctgtacagtggctcagatgttattcgggacctggagtgggtcatctttgatgaggttcactatatcaacgatgtcgagcgtggggtcgtgtgggaggaggtgcttatcatgctacctgaccacgtttctatcatccttctgagtgccaccgtccccaacgcccttgagtttgctgactggattgggcggctgaagcgtcgtcagatctatgtgattagcactgtaacccgccccgtgcccctggagcactatcttttcacagggaacagctccaagacccagggggagctctttttgttgctggactcccgaggagccttccatacaaaagggtactatgcagctgtggaggccaagaaggagagaatgagcaaacacgcccagacctttggggccaagcagcccacacatcaggggggccctgcacaggaccgcggagtgtacctgtccctcctggcctccctccgcacacgtgcccagttgcccgtggtggtgttcaccttctcccggggccgctgtgatgagcaggcctcaggcctcacctcccttgacctcaccaccagttcggagaagagcgagatccacctcttcctgcagcgctgccttgctcgcctccgtggctctgaccgccagctgccccaggtcctgcacatgtcagagctcctgaatcgcggcctgggtgtgcaccatagcggcatcctgcccatcctcaaggagatcgtggagatgctcttcagccgtggcctggtcaaggtcttgtttgccacagagacctttgccatgggagtaaacatgcctgctcgtacagtagtgtttgactccatgcgcaaacacgatggctccaccttccgggacctgctccctggggagtatgtgcagatggcaggccgggcagggcggaggggcctggaccccacaggcaccgttatcctgctctgcaagggccgagtgcccgagatggcagacctgcaccgcatgatgatggggaagccgtcccagctgcagtcccagttccgcctcacgtacactatgatcctcaacttgctgcgagtggatgccctcagggtggaggacatgatgaagaggagcttctctgagtttccctcccgcaaagacagcaaggcccatgaacaggccctggctgaactgaccaagaggctgggagctttggaggagcctgacatgactggccaactggtcgacctgcctgaatattacagctggggggaggaactgacagagacccagcacatgatccagcgacgcatcatggagtctgtgaacgggctgaagtctctctcagcaggaagggtggtggttgtgaagaatcaggagcatcacaacgcattgggagtgatcctacaggtctcctcgaactccaccagcagagtattcacaaccctggtcttgtgtgataagcccttgtcccaggacccacaggacagggggccagccactgcagaggtgccctatccagatgacctcgtgggattcaagctgttcctgcctgaagggccttgtgaccacaccgtggtcaagctccagccaggagatatggctgccatcaccaccaaggtgctccgggtgaatggggagaagatcttggaggacttcagcaagaggcagcagccaaaattcaagaaggatcctccccttgcagccgtgaccactgctgtccaggaactgctgcgtctggctcaggcccacccagccggacctcccaccctcgaccctgtcaatgacctgcagctcaaagatatgtcagttgtagagggtgggctccgggcccggaagctggaggagctgatccagggggctcagtgtgtacacagcccccgttttcctgcccagtacctgaagctgcgggagcgaatgcagatacagaaggagatggagcggctgcgcttcctactgtcggatcagtcattgctgctgcttcctgagtaccatcagcgagtagaggtgctccgaaccctgggttacgtggacgaggcgggcactgtgaagctggcagggcgggtggcttgtgccatgagcagccatgagttgctcctcactgagctcatgtttgacaatgcactgagcaccctgcggcctgaggagattgctgccttgctctctggcctggtctgccagagccctggggacgctggggatcagctcccaaacaccctcaagcagggaatagaacgtgtccgggctgtggccaagcggattggtgaggtccaggtggcttgtggcctgaaccagacggtggaggaatttgtgggggagctgaattttgggctggttgaggttgtatatgagtgggcccggggcatgcccttctccgagttggcagggctctcagggacccctgagggcctggtggtccgctgcattcagcgcctggctgagatgtgtcgctcactgcggggggcagcccgcctggtaggagagcctgtgctgggtgccaagatggagacagcggctaccttgctacggcgggacatcgtatttgcggccagcctctacacccagtgaatgccccatgtaaaaacatgatgataaaacagcaaagcac

SEQ ID NO: 60825 - DNA, 4452 bp, Homo sapiens
cgtagcgcccgcagagcaacgcaaagaggaagaacagagaaacggctatgagaaaaagggccgaagagtgagaagcagagggccttacccgagggggcggcaaccgggggccccacggtcctccggccgcgcccgcgctggcgctgatagcgggctcacaacgatgacgtagcgaggagcggaaaacgcggtaaccaaggcggccccaggcgcgcacttccgcccggccttccaccggtccaggtctgcccctccgcagcgatagttcacgctctcggcggggctgtaccggaagttgcctctacttcgccgttccggggcggggcttacttcgcagcgactacttgccgcacttccgggctgccaggcagctgctgtggctccaggatgatggagacagagcgacttgtgctaccccctccagatcccctggacctaccccttcgggccgtggagctcggatgcacggggcactgggagctgctgaacttgcctggagctccagagagtagccttccccatggcctccctccttgtgccccagatctgcagcaagaagcagaacagttgtttctgtcatccccagcctggctgcctctgcatggtgtggagcactcagcccgaaaatggcagaggaagacggatccctggtctcttttggctgtcctgggagccccagtcccatccgacctacaggcccaaagacacccaaccacaggccagatactgggttacaaagaggtcttgctggagaacacaaatctctcggctacaacctccttgtctcttcgccggcctccagggccagcctcccagtccttatggggaaatccaactcggtatcccttctggccaggggggatggatgaacccaccataacagatctgaacacacgggaggaggctgaggaggagatagactttgagaaagatcttcttactattccacctggtttcaagaaaggcatggactttgcaccaaaagattgtccaactccagctcctggactactaagccttagctgtctgttggagcctctggatttgggtgggggtgacgaggatgagaatgaggcagtgggacagccaggaggtcccagaggggacactgtttcagcctctccctgcagtgctcccctggcccgagcaagcagcttggaagacctagtgttgaaggaagcgtccacagctgtatccaccccagaggccccagagcctccatctcaggagcagtgggccatccctgtggacgccacctcccctgttggtgatttctatcgcctcattccccagccagccttccagtgggcatttgagccagatgtgtttcagaaacaggccatcctgcacttggaacggcatgactctgtctttgtcgcagctcacacatctgcaggaaaaacagttgtggctgaatatgccattgccctggcccagaaacacatgacacgcaccatctacacttcgcccatcaaggccctgagcaaccagaagttccgggacttccgaaacacattcggggatgtggggctgctcaccggggatgtacagctgcatccggaggcctcctgcctcatcatgaccacagagatccttcgctccatgctgtacagtggctcagatgttattcgggacctggagtgggtcatctttgatgaggttcactatatcaacgatgtcgagcgtggggtcgtgtgggaggaggtgcttatcatgctacctgaccacgtttctatcatccttctgagtgccaccgtccccaacgcccttgagtttgctgactggattgggcggctgaagcgtcgtcagatctatgtgattagcactgtaacccgccccgtgcccctggagcactatcttttcacagggaacagctccaagacccagggggagctctttttgttgctggactcccgaggagccttccatacaaaagggtactatgcagctgtggaggccaagaaggagagaatgagcaaacacgcccagacctttggggccaagcagcccacacatcaggggggccctgcacaggaccgcggagtgtacctgtccctcctggcctccctccgcacacgtgcccagttgcccgtggtggtgttcaccttctcccggggccgctgtgatgagcaggcctcaggcctcacctcccttgacctcaccaccagttcggagaagagcgagatccacctcttcctgcagcgctgccttgctcgcctccgtggctctgaccgccagctgccccaggtcctgcacatgtcagagctcctgaatcgcggcctgggtgtgcaccatagcggcatcctgcccatcctcaaggagatcgtggagatgctcttcagccgtggcctggtcaaggtcttgtttgccacagagacctttgccatgggagtaaacatgcctgctcgtacagtagtgtttgactccatgcgcaaacacgatggctccaccttccgggacctgctccctggggagtatgtgcagatggcaggccgggcagggcggaggggcctggaccccacaggcaccgttatcctgctctgcaagggccgagtgcccgagatggcagacctgcaccgcatgatgatggggaagccgtcccagctgcagtcccagttccgcctcacgtacactatgatcctcaacttgctgcgagtggatgccctcagggtggaggacatgatgaagaggagcttctctgagtttccctcccgcaaagacagcaaggcccatgaacaggccctggctgaactgaccaagaggctgggagctttggaggagcctgacatgactggccaactggtcgacctgcctgaatattacagctggggggaggaactgacagagacccagcacatgatccagcgacgcatcatggagtctgtgaacgggctgaagtctctctcagcaggaagggtggtggttgtgaagaatcaggagcatcacaacgcattgggagtgatcctacaggtctcctcgaactccaccagcagagtattcacaaccctggtcttgtgtgataagcccttgtcccaggacccacaggacagggggccagccactgcagaggtgccctatccagatgacctcgtgggattcaagctgttcctgcctgaagggccttgtgaccacaccgtggtcaagctccagccaggagatatggctgccatcaccaccaaggtgctccgggtgaatggggagaagatcttggaggacttcagcaagaggcagcagccaaaattcaagaaggatcctccccttgcagccgtgaccactgctgtccaggaactgctgcgtctggctcaggcccacccagccggacctcccaccctcgaccctgtcaatgacctgcagctcaaagatatgtcagttgtagagggtgggctccgggcccggaagctggaggagctgatccagggggctcagtgtgtacacagcccccgttttcctgcccagtacctgaagctgcgggagcgaatgcagatacagaaggagatggagcggctgcgcttcctactgtcggatcagtcattgctgctgcttcctgagtaccatcagcgagtagaggtgctccgaaccctgggttacgtggacgaggcgggcactgtgaagctggcagggcgggtggcttgtgccatgagcagccatgagttgctcctcactgagctcatgtttgacaatgcactgagcaccctgcggcctgaggagattgctgccttgctctctggcctggtctgccagagccctggggacgctggggatcagctcccaaacaccctcaagcaggtaggggacaccacccctttctccctgccagggctgtggcattcctgaccttcaccttcaggtagtcccccaggtgaccccctccagccctgtaagtgccccaaggatggaaaatggctgccttcttgatctggtccttccctgtcctggagcaggaaggcaggccttaacctctccttctttcctgcagggaatagaacgtgtccgggctgtggccaagcggattggtgaggtccaggtggcttgtggcctgaaccagacggtggaggaatttgtgggggagctgaattttgggctggttgaggttgtatatgagtgggcccggggcatggtgagtacctgaggtttgggattttgcagacggctggctggggagaacctgcccaggctgagtgcatccagtcctcaccctactttccccacagcccttctccgagttggcagggctctcagggacccctgagggcctggtggtccgctgcattcagcgcctggctgagatgtgtcgctcactgcggggggcagcccgcctggtaggagagcctgtgctgggtgccaagatggagacagcggctaccttgctacggcgggacatcgtatttgcggccagcctctacacccagtgaatgccccatgtaaaaacatgatgataaaacagcaaagcac

SEQ ID NO: 60826 - DNA, 3966 bp, Homo sapiens
  misc_feature (3766)..(3766): n is a, c, g, or t
cgtagcgcccgcagagcaacgcaaagaggaagaacagagaaacggctatgagaaaaagggccgaagagtgagaagcagagggccttacccgagggggcggcaaccgggggccccacggtcctccggccgcgcccgcgctggcgctgatagcgggctcacaacgatgacgtagcgaggagcggaaaacgcggtaaccaaggcggccccaggcgcgcacttccgcccggccttccaccggtccaggtctgcccctccgcagcgatagttcacgctctcggcggggctgtaccggaagttgcctctacttcgccgttccggggcggggcttacttcgcagcgactacttgccgcacttccgggctgccaggcagctgctgtggctccaggatgatggagacagagcgacttgtgctaccccctccagatcccctggacctaccccttcgggccgtggagctcggatgcacggggcactgggagctgctgaacttgcctggagctccagagagtagccttccccatggcctccctccttgtgccccagatctgcagcaagaagcagaacagttgtttctgtcatccccagcctggctgcctctgcatggtgtggagcactcagcccgaaaatggcagaggaagacggatccctggtctcttttggctgtcctgggagccccagtcccatccgacctacaggcccaaagacacccaaccacaggccagatactgggttacaaagaggtcttgctggagaacacaaatctctcggctacaacctccttgtctcttcgccggcctccagggccagcctcccagtccttatggggaaatccaactcggtatcccttctggccaggggggatggatgaacccaccataacagatctgaacacacgggaggaggctgaggaggagatagactttgagaaagatcttcttactattccacctggtttcaagaaaggcatggactttgcaccaaaagattgtccaactccagctcctggactactaagccttagctgtctgttggagcctctggatttgggtgggggtgacgaggatgagaatgaggcagtgggacagccaggaggtcccagaggggacactgtttcagcctctccctgcagtgctcccctggcccgagcaagcagcttggaagacctagtgttgaaggaagcgtccacagctgtatccaccccagaggccccagagcctccatctcaggagcagtgggccatccctgtggacgccacctcccctgttggtgatttctatcgcctcattccccagccagccttccagtgggcatttgagccagatgtgtttcagaaacaggccatcctgcacttggaacggcatgactctgtctttgtcgcagctcacacatctgcaggaaaaacagttgtggctgaatatgccattgccctggcccagaaacacatgacacgcaccatctacacttcgcccatcaaggccctgagcaaccagaagttccgggacttccgaaacacattcggggatgtggggctgctcaccggggatgtacagctgcatccggaggcctcctgcctcatcatgaccacagagatccttcgctccatgctgtacagtggctcagatgttattcgggacctggagtgggtcatctttgatgaggttcactatatcaacgatgtcgagcgtggggtcgtgtgggaggaggtgcttatcatgctacctgaccacgtttctatcatccttctgagtgccaccgtccccaacgcccttgagtttgctgactggattgggcggctgaagcgtcgtcagatctatgtgattagcactgtaacccgccccgtgcccctggagcactatcttttcacagggaacagctccaagacccagggggagctctttttgttgctggactcccgaggagccttccatacaaaagggtactatgcagctgtggaggccaagaaggagagaatgagcaaacacgcccagacctttggggccaagcagcccacacatcaggggggccctgcacaggaccgcggagtgtacctgtccctcctggcctccctccgcacacgtgcccagttgcccgtggtggtgttcaccttctcccggggccgctgtgatgagcaggcctcaggcctcacctcccttgacctcaccaccagttcggagaagagcgagatccacctcttcctgcagcgctgccttgctcgcctccgtggctctgaccgccagctgccccaggtcctgcacatgtcagagctcctgaatcgcggcctgggtgtgcaccatagcggcatcctgcccatcctcaaggagatcgtggagatgctcttcagccgtggcctggtcaaggtcttgtttgccacagagacctttgccatgggagtaaacatgcctgctcgtacagtagtgtttgactccatgcgcaaacacgatggctccaccttccgggacctgctccctggggagtatgtgcagatggcaggccgggcagggcggaggggcctggaccccacaggcaccgttatcctgctctgcaagggccgagtgcccgagatggcagacctgcaccgcatgatgatggggaagccgtcccagctgcagtcccagttccgcctcacgtacactatgatcctcaacttgctgcgagtggatgccctcagggtggaggacatgatgaagaggagcttctctgagtttccctcccgcaaagacagcaaggcccatgaacaggccctggctgaactgaccaagaggctgggagctttggaggagcctgacatgactggccaactggtcgacctgcctgaatattacagctggggggaggaactgacagagacccagcacatgatccagcgacgcatcatggagtctgtgaacgggctgaagtctctctcagcaggaagggtggtggttgtgaagaatcaggagcatcacaacgcattgggagtgatcctacaggtctcctcgaactccaccagcagagtattcacaaccctggtcttgtgtgataagcccttgtcccaggacccacaggacagggggccagccactgcagaggtgccctatccagatgacctcgtgggattcaagctgttcctgcctgaagggccttgtgaccacaccgtggtcaagctccagccaggagatatggctgccatcaccaccaaggtgctccgggtgaatggggagaagatcttggaggacttcagcaagaggcagcagccaaaattcaagtcagagatgctagggaggcccttctcctccagaggggcacgtagaggcagggaggggcagtggtctgggagtttcctccagcctgagggagaccatgaagtggtggggttgtagtgagggggctcccccagcctaagggagactgtgaagtggaggttgtagtaagagggcttccacagcctgagggaggcttctgggggagagaagatcttaccccagatcttaagatctgctccctcttcaggaaggatcctccccttgcagccgtgaccactgctgtccaggaactgctgcgtctggctcaggcccacccagccggacctcccaccctcgaccctgtcaatgacctgcagctcaaagatatgtcagttgtagagggtgggctccgggcccggaagctggaggagctgatccagggggctcagtgtgtacacagcccccgttttcctgcccagtacctgaagctgcgggagcgaatgcagatacagaaggagatggggaaagatgaaacacatagatnatcctggaaaatttttctgattaataaaattctccatcctttgtgtgctccaggaacagtttatggaaagaaacacccttcccattatgagttagatggtgctctcttttcttacctatcacacagccagacacacactctgcacattttctctttctcattaaaaaaaaatcagctgaatttgttttcagtggtcataa

SEQ ID NO: 60827 - DNA, 3865 bp, Homo sapiens
cgtagcgcccgcagagcaacgcaaagaggaagaacagagaaacggctatgagaaaaagggccgaagagtgagaagcagagggccttacccgagggggcggcaaccgggggccccacggtcctccggccgcgcccgcgctggcgctgatagcgggctcacaacgatgacgtagcgaggagcggaaaacgcggtaaccaaggcggccccaggcgcgcacttccgcccggccttccaccggtccaggtctgcccctccgcagcgatagttcacgctctcggcggggctgtaccggaagttgcctctacttcgccgttccggggcggggcttacttcgcagcgactacttgccgcacttccgggctgccaggcagctgctgtggctccaggatgatggagacagagcgacttgtgctaccccctccagatcccctggacctaccccttcgggccgtggagctcggatgcacggggcactgggagctgctgaacttgcctggagctccagagagtagccttccccatggcctccctccttgtgccccagatctgcagcaagaagcagaacagttgtttctgtcatccccagcctggctgcctctgcatggtgtggagcactcagcccgaaaatggcagaggaagacggatccctggtctcttttggctgtcctgggagccccagtcccatccgacctacaggcccaaagacacccaaccacaggccagatactgggttacaaagaggtcttgctggagaacacaaatctctcggctacaacctccttgtctcttcgccggcctccagggccagcctcccagtccttatggggaaatccaactcggtatcccttctggccaggggggatggatgaacccaccataacagatctgaacacacgggaggaggctgaggaggagatagactttgagaaagatcttcttactattccacctggtttcaagaaaggcatggactttgcaccaaaagattgtccaactccagctcctggactactaagccttagctgtctgttggagcctctggatttgggtgggggtgacgaggatgagaatgaggcagtgggacagccaggaggtcccagaggggacactgtttcagcctctccctgcagtgctcccctggcccgagcaagcagcttggaagacctagtgttgaaggaagcgtccacagctgtatccaccccagaggccccagagcctccatctcaggagcagtgggccatccctgtggacgccacctcccctgttggtgatttctatcgcctcattccccagccagccttccagtgggcatttgagccagatgtgtttcagaaacaggccatcctgcacttggaacggcatgactctgtctttgtcgcagctcacacatctgcaggaaaaacagttgtggctgaatatgccattgccctggcccagaaacacatgacacgcaccatctacacttcgcccatcaaggccctgagcaaccagaagttccgggacttccgaaacacattcggggatgtggggctgctcaccggggatgtacagctgcatccggaggcctcctgcctcatcatgaccacagagatccttcgctccatgctgtacagtggctcagatgttattcgggacctggagtgggtcatctttgatgaggttcactatatcaacgatgtcgagcgtggggtcgtgtgggaggaggtgcttatcatgctacctgaccacgtttctatcatccttctgagtgccaccgtccccaacgcccttgagtttgctgactggattgggcggctgaagcgtcgtcagatctatgtgattagcactgtaacccgccccgtgcccctggagcactatcttttcacagggaacagctccaagacccagggggagctctttttgttgctggactcccgaggagccttccatacaaaagggtactatgcagctgtggaggccaagaaggagagaatgagcaaacacgcccagacctttggggccaagcagcccacacatcaggggggccctgcacaggaccgcggagtgtacctgtccctcctggcctccctccgcacacgtgcccagttgcccgtggtggtgttcaccttctcccggggccgctgtgatgagcaggcctcaggcctcacctcccttgacctcaccaccagttcggagaagagcgagatccacctcttcctgcagcgctgccttgctcgcctccgtggctctgaccgccagctgccccaggtcctgcacatgtcagagctcctgaatcgcggcctgggtgtgcaccatagcggcatcctgcccatcctcaaggagatcgtggagatgctcttcagccgtggcctggtcaaggtcttgtttgccacagagacctttgccatgggagtaaacatgcctgctcgtacagtagtgtttgactccatgcgcaaacacgatggctccaccttccgggacctgctccctggggagtatgtgcagatggcaggccgggcagggcggaggggcctggaccccacaggcaccgttatcctgctctgcaagggccgagtgcccgagatggcagacctgcaccgcatgatgatggggaagccgtcccagctgcagtcccagttccgcctcacgtacactatgatcctcaacttgctgcgagtggatgccctcagggtggaggacatgatgaagaggagcttctctgagtttccctcccgcaaagacagcaaggcccatgaacaggccctggctgaactgaccaagaggctgggagctttggaggagcctgacatgactggccaactggtcgacctgcctgaatattacagctggggggaggaactgacagagacccagcacatgatccagcgacgcatcatggagtctgtgaacgggctgaagtctctctcagcaggaagggtggtggttgtgaagaatcaggagcatcacaacgcattgggagtgatcctacaggtctcctcgaactccaccagcagagtattcacaaccctggtcttgtgtgataagcccttgtcccaggacccacaggacagggggccagccactgcagaggtgccctatccagatgacctcgtgggattcaagctgttcctgcctgaagggccttgtgaccacaccgtggtcaagctccagccaggagatatggctgccatcaccaccaaggtgctccgggtgaatggggagaagatcttggaggacttcagcaagaggcagcagccaaaattcaagaaggatcctccccttgcagccgtgaccactgctgtccaggaactgctgcgtctggctcaggcccacccagccggacctcccaccctcgaccctgtcaatgacctgcagctcaaagatatgtcagttgtagagggtgggctccgggcccggaagctggaggagctgatccagggggctcagtgtgtacacagcccccgttttcctgcccagcccttgtcctcagctgcacccctgcttaccgggcgccaccgcgacaggcctgacggcgtggctctcttgcagtaccctgcaccgctgccggcgagcgacttgccgaattcacgacacgcgactgcgagccgcgcttgcgccttccttactgtccggaatccgtcacttgctgctgcttccctgcaactacccattcacgcgagctaccacgcgtgcctcccgaaacccctgagcgctttacaccgttgcgcaccgctaaggcgccgctcgcacccattgcctcgaatcgcccttgcgccacgccggcctgggccctggagcccctatgggtggcaccactgccactcccacaggtcccaattgtaccgctttggcctcccactatccacctctcacaccccctctactt

SEQ ID NO: 60828 - DNA, 284 bp, Homo sapiens
gcagtggttggggcaggggggctaggggacagcagtgtgtccaatgcccaccctttttcttgcaggtgctccgaaccctgggttacgtggacgaggcgggcactgtgaagctggcagggcgggtggcttgtgccatgagcagccatgagttgctcctcactgagctcatgtttgacaatgcactgagcaccctgcggcctgaggagattgctgccttgctctctggcctggtctgccagagccctggggacgctggggatcagctcccaaacaccctcaagcag

SEQ ID NO: 60829 - DNA, 4413 bp, Homo sapiens
cgtagcgcccgcagagcaacgcaaagaggaagaacagagaaacggctatgagaaaaagggccgaagagtgagaagcagagggccttacccgagggggcggcaaccgggggccccacggtcctccggccgcgcccgcgctggcgctgatagcgggctcacaacgatgacgtagcgaggagcggaaaacgcggtaaccaaggcggccccaggcgcgcacttccgcccggccttccaccggtccaggtctgcccctccgcagcgatagttcacgctctcggcggggctgtaccggaagttgcctctacttcgccgttccggggcggggcttacttcgcagcgactacttgccgcacttccgggctgccaggcagctgctgtggctccaggatgatggagacagagcgacttgtgctaccccctccagatcccctggacctaccccttcgggccgtggagctcggatgcacggggcactgggagctgctgaacttgcctggagctccagagagtagccttccccatggcctccctccttgtgccccagatctgcagcaagaagcagaacagttgtttctgtcatccccagcctggctgcctctgcatggtgtggagcactcagcccgaaaatggcagaggaagacggatccctggtctcttttggctgtcctgggagccccagtcccatccgacctacaggcccaaagacacccaaccacaggccagatactgggttacaaagaggtcttgctggagaacacaaatctctcggctacaacctccttgtctcttcgccggcctccagggccagcctcccagtccttatggggaaatccaactcggtatcccttctggccaggggggatggatgaacccaccataacagatctgaacacacgggaggaggctgaggaggagatagactttgagaaagatcttcttactattccacctggtttcaagaaaggcatggactttgcaccaaaagattgtccaactccagctcctggactactaagccttagctgtctgttggagcctctggatttgggtgggggtgacgaggatgagaatgaggcagtgggacagccaggaggtcccagaggggacactgtttcagcctctccctgcagtgctcccctggcccgagcaagcagcttggaagacctagtgttgaaggaagcgtccacagctgtatccaccccagaggccccagagcctccatctcaggagcagtgggccatccctgtggacgccacctcccctgttggtgatttctatcgcctcattccccagccagccttccagtgggcatttgagccagatgtgtttcagaaacaggccatcctgcacttggaacggcatgactctgtctttgtcgcagctcacacatctgcaggaaaaacagttgtggctgaatatgccattgccctggcccagaaacacatgacacgcaccatctacacttcgcccatcaaggccctgagcaaccagaagttccgggacttccgaaacacattcggggatgtggggctgctcaccggggatgtacagctgcatccggaggcctcctgcctcatcatgaccacagagatccttcgctccatgctgtacagtggctcagatgttattcgggacctggagtgggtcatctttgatgaggttcactatatcaacgatgtcgagcgtggggtcgtgtgggaggaggtgcttatcatgctacctgaccacgtttctatcatccttctgagtgccaccgtccccaacgcccttgagtttgctgactggattgggcggctgaagcgtcgtcagatctatgtgattagcactgtaacccgccccgtgcccctggagcactatcttttcacagggaacagctccaagacccagggggagctctttttgttgctggactcccgaggagccttccatacaaaagggtactatgcagctgtggaggccaagaaggagagaatgagcaaacacgcccagacctttggggccaagcagcccacacatcaggggggccctgcacaggaccgcggagtgtacctgtccctcctggcctccctccgcacacgtgcccagttgcccgtggtggtgttcaccttctcccggggccgctgtgatgagcaggcctcaggcctcacctcccttgacctcaccaccagttcggagaagagcgagatccacctcttcctgcagcgctgccttgctcgcctccgtggctctgaccgccagctgccccaggtcctgcacatgtcagagctcctgaatcgcggcctgggtgtgcaccatagcggcatcctgcccatcctcaaggagatcgtggagatgctcttcagccgtggcctggtcaaggtcttgtttgccacagagacctttgccatgggagtaaacatgcctgctcgtacagtagtgtttgactccatgcgcaaacacgatggctccaccttccgggacctgctccctggggagtatgtgcagatggcaggccgggcagggcggaggggcctggaccccacaggcaccgttatcctgctctgcaagggccgagtgcccgagatggcagacctgcaccgcatgatgatggggaagccgtcccagctgcagtcccagttccgcctcacgtacactatgatcctcaacttgctgcgagtggatgccctcagggtggaggacatgatgaagaggagcttctctgagtttccctcccgcaaagacagcaaggcccatgaacaggccctggctgaactgaccaagaggctgggagctttggaggagcctgacatgactggccaactggtcgacctgcctgaatattacagctggggggaggaactgacagagacccagcacatgatccagcgacgcatcatggagtctgtgaacgggctgaagtctctctcagcaggaagggtggtggttgtgaagaatcaggagcatcacaacgcattgggagtgatcctacaggtctcctcgaactccaccagcagagtattcacaaccctggtcttgtgtgataagcccttgtcccaggacccacaggacagggggccagccactgcagaggtgccctatccagatgacctcgtgggattcaagctgttcctgcctgaagggccttgtgaccacaccgtggtcaagctccagccaggagatatggctgccatcaccaccaaggtgctccgggtgaatggggagaagatcttggaggacttcagcaagaggcagcagccaaaattcaagtcagagatgctagggaggcccttctcctccagaggggcacgtagaggcagggaggggcagtggtctgggagtttcctccagcctgagggagaccatgaagtggtggggttgtagtgagggggctcccccagcctaagggagactgtgaagtggaggttgtagtaagagggcttccacagcctgagggaggcttctgggggagagaagatcttaccccagatcttaagatctgctccctcttcaggaaggatcctccccttgcagccgtgaccactgctgtccaggaactgctgcgtctggctcaggcccacccagccggacctcccaccctcgaccctgtcaatgacctgcagctcaaagatatgtcagttgtagagggtgggctccgggcccggaagctggaggagctgatccagggggctcagtgtgtacacagcccccgttttcctgcccagtacctgaagctgcgggagcgaatgcagatacagaaggagatggagcggctgcgcttcctactgtcggatcagtcattgctgctgcttcctgagtaccatcagcgagtagaggtgctccgaaccctgggttacgtggacgaggcgggcactgtgaagctggcagggcgggtggcttgtgccatgagcagccatgagttgctcctcactgagctcatgtttgacaatgcactgagcaccctgcggcctgaggagattgctgccttgctctctggcctggtctgccagagccctggggacgctggggatcagctcccaaacaccctcaagcagggaatagaacgtgtccgggctgtggccaagcggattggtgaggtccaggtggcttgtggcctgaaccagacggtggaggaatttgtgggggagctgaattttgggctggttgaggttgtatatgagtgggcccggggcatgcccttctccgagttggcagggctctcagggacccctgagggcctggtggtccgctgcattcagcgcctggctgagatgtgtcgctcactgcggggggcagcccgcctggtaggagagcctgtgctgggtgccaagatggagacagcggctaccttgctacggcgggacatcgtatttgcggccagcctctacacccagtgaatgccccatgtaaaaacatgatgataaaacagcaaagcac

SEQ ID NO: 60830 - DNA, 4262 bp, Homo sapiens
cgtagcgcccgcagagcaacgcaaagaggaagaacagagaaacggctatgagaaaaagggccgaagagtgagaagcagagggccttacccgagggggcggcaaccgggggccccacggtcctccggccgcgcccgcgctggcgctgatagcgggctcacaacgatgacgtagcgaggagcggaaaacgcggtaaccaaggcggccccaggcgcgcacttccgcccggccttccaccggtccaggtctgcccctccgcagcgatagttcacgctctcggcggggctgtaccggaagttgcctctacttcgccgttccggggcggggcttacttcgcagcgactacttgccgcacttccgggctgccaggcagctgctgtggctccaggatgatggagacagagcgacttgtgctaccccctccagatcccctggacctaccccttcgggccgtggagctcggatgcacggggcactgggagctgctgaacttgcctggagctccagagagtagccttccccatggcctccctccttgtgccccagatctgcagcaagaagcagaacagttgtttctgtcatccccagcctggctgcctctgcatggtgtggagcactcagcccgaaaatggcagaggaagacggatccctggtctcttttggctgtcctgggagccccagtcccatccgacctacaggcccaaagacacccaaccacaggccagatactgggttacaaagaggtcttgctggagaacacaaatctctcggctacaacctccttgtctcttcgccggcctccagggccagcctcccagtccttatggggaaatccaactcggtatcccttctggccaggggggatggatgaacccaccataacagatctgaacacacgggaggaggctgaggaggagatagactttgagaaagatcttcttactattccacctggtttcaagaaaggcatggactttgcaccaaaagattgtccaactccagctcctggactactaagccttagctgtctgttggagcctctggatttgggtgggggtgacgaggatgagaatgaggcagtgggacagccaggaggtcccagaggggacactgtttcagcctctccctgcagtgctcccctggcccgagcaagcagcttggaagacctagtgttgaaggaagcgtccacagctgtatccaccccagaggccccagagcctccatctcaggagcagtgggccatccctgtggacgccacctcccctgttggtgatttctatcgcctcattccccagccagccttccagtgggcatttgagccagatgtgtttcagaaacaggccatcctgcacttggaacggcatgactctgtctttgtcgcagctcacacatctgcaggaaaaacagttgtggctgaatatgccattgccctggcccagaaacacatgacacgcaccatctacacttcgcccatcaaggccctgagcaaccagaagttccgggacttccgaaacacattcggggatgtggggctgctcaccggggatgtacagctgcatccggaggcctcctgcctcatcatgaccacagagatccttcgctccatgctgtacagtggctcagatgttattcgggacctggagtgggtcatctttgatgaggttcactatatcaacgatgtcgagcgtggggtcgtgtgggaggaggtgcttatcatgctacctgaccacgtttctatcatccttctgagtgccaccgtccccaacgcccttgagtttgctgactggattgggcggctgaagcgtcgtcagatctatgtgattagcactgtaacccgccccgtgcccctggagcactatcttttcacagggaacagctccaagacccagggggagctctttttgttgctggactcccgaggagccttccatacaaaagggtactatgcagctgtggaggccaagaaggagagaatgagcaaacacgcccagacctttggggccaagcagcccacacatcaggggggccctgcacaggaccgcggagtgtacctgtccctcctggcctccctccgcacacgtgcccagttgcccgtggtggtgttcaccttctcccggggccgctgtgatgagcaggcctcaggcctcacctcccttgacctcaccaccagttcggagaagagcgagatccacctcttcctgcagcgctgccttgctcgcctccgtggctctgaccgccagctgccccaggtcctgcacatgtcagagctcctgaatcgcggcctgggtgtgcaccatagcggcatcctgcccatcctcaaggagatcgtggagatgctcttcagccgtggcctggtcaaggtcttgtttgccacagagacctttgccatgggagtaaacatgcctgctcgtacagtagtgtttgactccatgcgcaaacacgatggctccaccttccgggacctgctccctggggagtatgtgcagatggcaggccgggcagggcggaggggcctggaccccacaggcaccgttatcctgctctgcaagggccgagtgcccgagatggcagacctgcaccgcatgatgatggggaagccgtcccagctgcagtcccagttccgcctcacgtacactatgatcctcaacttgctgcgagtggatgccctcagggtggaggacatgatgaagaggagcttctctgagtttccctcccgcaaagacagcaaggcccatgaacaggccctggctgaactgaccaagaggctgggagctttggaggagcctgacatgactggccaactggtcgacctgcctgaatattacagctggggggaggaactgacagagacccagcacatgatccagcgacgcatcatggagtctgtgaacgggctgaagtctctctcagcaggaagggtggtggttgtgaagaatcaggagcatcacaacgcattgggagtgatcctacaggtctcctcgaactccaccagcagagtattcacaaccctggtcttgtgtgataagcccttgtcccaggacccacaggacagggggccagccactgcagaggtgccctatccagatgacctcgtgggattcaagctgttcctgcctgaagggccttgtgaccacaccgtggtcaagctccagccaggagatatggctgccatcaccaccaaggtgctccgggtgaatggggagaagatcttggaggacttcagcaagaggcagcagccaaaattcaagaaggatcctccccttgcagccgtgaccactgctgtccaggaactgctgcgtctggctcaggcccacccagccggacctcccaccctcgaccctgtcaatgacctgcagctcaaagatatgtcagttgtagagggtgggctccgggcccggaagctggaggagctgatccagggggctcagtgtgtacacagcccccgttttcctgcccagtacctgaagctgcgggagcgaatgcagatacagaaggagatggagcggctgcgcttcctactgtcggatcagtcattgctgctgcttcctgagtaccatcagcgagtagaggtgctccgaaccctgggttacgtggacgaggcgggcactgtgaagctggcagggcgggtggcttgtgccatgagcagccatgagttgctcctcactgagctcatgtttgacaatgcactgagcaccctgcggcctgaggagattgctgccttgctctctggcctggtctgccagagccctggggacgctggggatcagctcccaaacaccctcaagcagggaatagaacgtgtccgggctgtggccaagcggattggtgaggtccaggtggcttgtggcctgaaccagacggtggaggaatttgtgggggagctgaattttgggctggttgaggttgtatatgagtgggcccggggcatggtgagtacctgaggtttgggattttgcagacggctggctggggagaacctgcccaggctgagtgcatccagtcctcaccctactttccccacagcccttctccgagttggcagggctctcagggacccctgagggcctggtggtccgctgcattcagcgcctggctgagatgtgtcgctcactgcggggggcagcccgcctggtaggagagcctgtgctgggtgccaagatggagacagcggctaccttgctacggcgggacatcgtatttgcggccagcctctacacccagtgaatgccccatgtaaaaacatgatgataaaacagcaaagcac

SEQ ID NO: 60831 - DNA, 835 bp, Homo sapiens
ggagaaggctgacgggtggctctctgcagtacctgaagctgcgggagcgaatgcagatacagaaggagatggagcggctgcgcttcctactgtcggatcagtcattgctgctgcttcctgagtaccatcagcgagtagaggtgctccgaaccctgggttacgtggacgaggcgggcactgtgaagctggcagggcgggtggcttgtgccatgagcagccatgagttgctcctcactgagctcatgtttgacaatgcactgagcaccctgcggcctgaggagattgctgccttgctctctggcctggtctgccagagccctggggacgctggggatcagctcccaaacaccctcaagcagggaatagaacgtgtccgggctgtggccaagcggattggtgaggtccaggtggcttgtggcctgaaccagacggtggaggaatttgtgggggagctgaattttgggctggttgaggttgtatatgagtgggcccggggcatggtgagtacctgaggtttgggattttgcagacggctggctggggagaacctgcccaggctgagtgcatccagtcctcaccctactttccccacagcccttctccgagttggcagggctctcagggacccctgagggcctggtggtccgctgcattcagcgcctggctgagatgtgtcgctcactgcggggggcagcccgcctggtaggagagcctgtgctgggtgccaagatggagacagcggctaccttgctacggcgggacatcgtatttgcggccagcctctacacccagtgaatgccccatgtaaaaacatgatgataaaacagcaaagcac

SEQ ID NO: 60832 - DNA, 444 bp, Homo sapiens
ggttgcagtgaacccgaatggtgccactgcactccagcatgggtgatagagagagactgtctcaaaaaaaaaaaaaaaaaagttaaaatagctaaaattatttttagtaatatattttatttatcccagtttatacaaaatatcatttcaacatgttgtcaatattaaaattactgagatattaaaaaaaatcttggtactaagtctttgaaatctggtattttacacctaaagcacatctcaattcacagaagccacatttcaaatcttcaactgtcacatgtggccactggctagtactggacagtgcaactctagaatatttaaattataaagtaatacttagaacttttatcaggaaattgaggtaaaactcacacttacacttaaagctttagtaaaattagagacgctgatcataacattcatgagactggatgcaaa

SEQ ID NO: 60833 - DNA, 691 bp, Homo sapiens
taggacttttaccttaaagtggaatacttcagaccttgaagtggaatacttctagtcagactaggtaaaaacttgggtcataccttaaaaaacaacaacaaacaaaactatcacacaggatagataagaagattggttaaacagttttgtgtagatctttttggtgctgaactatgacatgagccttatagattgtaaaatagggatagttggaactaatgtacagaactaaattttttaaactttatttgctgttaaattctgtgaagtttcagttatctaaaataaatatacacaaatatgaaatataatgtttcagattgcaaggtaatatgtaatagtagtgtttgtaagatactcttgtctaatattaactagtagtattttgatttgtacagtcataatttgttaaaatgacttcatttaacattcactgatgtagattaataatgtaagttctgatttaaagaatggtggcaaaatggtgcatgtaatacttttgcaagtgttggggagatcggtatgttttgaaaagagtaatttaacttttgggtgccaggaaatgggttttctcaaagtccattgccggcaatgggcaggcctgcaaatactggcacagagcattaatcatacaccttattaacggtgaggtgaataactttgaaataaagttttagagaaatgtttcaga

SEQ ID NO: 60834 - DNA, 691 bp, Homo sapiens
gaaaaactactttaatgtcatatggaccacaaaagagctgcatagccaagcaatcctaagcaatgagaacaaagctggagaatcatactatctgacttcctgatgggagaagatgcgcctcttggctccctcaggtatctgcttggttatcttaccaggtctcctatggctactctctataaaacaagccccatcatcccctagtctctaggctccttaccccgccttcttttgcatagcactgatcagcagctggcgttttatttatgcatatctaattatcgaaccacctccagctctcttgtgcaatgctgtatcctcagtgtaacagacagaaattattctataaacatctgtggaataaatgcataactggttctataaacatcatgctgatgggagcaagactggcgcatcttctcccatcaggaaggaacgtggtacttagttagggtggatgaaaagcacagaagaacttacgctcggcgtcccactccaaatgatgacactttggatgaaggagtaggacttgtgcattcaaacatagcaactgagcatattccaagccctgccaagaaagtaccaagactccctgccacagcagcagaacctgaagcagctgtcattagtaatggggaacattaagatactctatggacgcaactcgcggggtcctctggcgtcgctccgc

SEQ ID NO: 60835 - DNA, 3457 bp, Homo sapiens
accgtcccgcctcccagcgactctcggcggtgccggagtcgggtgggttggcggctataaagctggtggcgaaggggaggcgccgcggactgtcctttcgtggctcactccctttcctctgctgccgctcggtcacgcttgtgcccgaaggaggaaacagtgacagacctggagactgcagttctctatccttcacacagctctttcaccatgcctggatcacttcctttgaatgcagaagcttgctggccaaaagatgtgggaattgttgcccttgagatctattttccttctcaatatgttgatcaagcagagttggaaaaatatgatggtgtagatgctggaaagtataccattggcttgggccaggccaagatgggcttctgcacagatagagaagatattaactctctttgcatgactgtggttcagaatcttatggagagaaataacctttcctatgattgcattgggcggctggaagttggaacagagacaatcatcgacaaatcaaagtctgtgaagactaatttgatgcagctgtttgaagagtctgggaatacagatatagaaggaatcgacacaactaatgcatgctatggaggcacagctgctgtcttcaatgctgttaactggattgagtccagctcttgggatggacggtatgccctggtagttgcaggagatattgctgtatatgccacaggaaatgctagacctacaggtggagttggagcagtagctctgctaattgggccaaatgctcctttaatttttgaacgagggcttcgtgggacacatatgcaacatgcctatgatttttacaagcctgatatgctatctgaatatcctatagtagatggaaaactctccatacagtgctacctcagtgcattagaccgctgctattctgtctactgcaaaaagatccatgcccagtggcagaaagagggaaatgataaagattttaccttgaatgattttggcttcatgatctttcactcaccatattgtaaactggttcagaaatctctagctcggatgttgctgaatgacttccttaatgaccagaatagagataaaaatagtatctatagtggcctggaagcctttggggatgttaaattagaagacacctactttgatagagatgtggagaaggcatttatgaaggctagctctgaactcttcagtcagaaaacaaaggcatctttacttgtatcaaatcaaaatggaaatatgtacacatcttcagtatatggttcccttgcatctgttctagcacagtactcacctcagcaattagcagggaagagaattggagtgttttcttatggttctggtttggctgccactctgtactctcttaaagtcacacaagatgctacaccggggtctgctcttgataaaataacagcaagtttatgtgatcttaaatcaaggcttgattcaagaactggtgtggcaccagatgtcttcgctgaaaacatgaagctcagagaggacacccatcatttggtcaactatattccccagggttcaatagattcactctttgaaggaacgtggtacttagttagggtggatgaaaagcacagaagaacttacgctcggcgtcccactccaaatgatgacactttggatgaaggagtaggacttgtgcattcaaacatagcaactgagcatattccaagccctgccaagaaagtaccaagactccctgccacagcagcagaacctgaagcagctgtcattagtaatggggaacattaagatactctgtgaggtgcaagacttcagggtggggtgggcatggggtgggggtatgggaacagttggaggaatgggatatctggggataattttaaaggattacatgttatgtaaatttttatgtgactgacatggagcctggatgactatcgtgtacttgggaaagtctctttgctctatttgctgacatgcttcctgttgtggtctggccaatgccaaatgtactcgaatgatgttaagggctctgtaaaacttcatacctctttggccatttgtatgcatgatgtttggtttttaaacatggtataatgaattgtgtacttctgtcagaagaaagcagaggtactaatctccaattaaaaaattttttaacatgtaagaattttgtactttgaacaacaagattacagaaagtacctgtggtttttggaaaacatttctagcttggggaatgtgacaacattccccagtgtggtaaaattggggtaaaatgtggtaaaatgtgatacgcacaaaccctttgaaaatagcataacaaacatgccctttttctaaaattgataaatcctaaagaggaagaaaagagctgggacaataaaacactggctctggaatctggaatgttaagtccaggccagcagtgacaaaagttattgtaatgacctctgaacagagaaacactgccattgaagaggcttctggtatagaaaacatggtacattcaggagctgtgaatatagctctaggtgtgctcctgaatcagttcatggtagattatgctgaacaacagtgagatgttattggaggtgtggatgagggagtttgttgttgcagtccttctttgcaccttattttaaagaataaatgaaacatttttctggttacttttttaaaaatttaatgttataaattcaacatagaggctgacaacctaaattcatggtgtaacacagctcttttccttttcctttttttttttttttgggtatctgttcaatgaaaataaggtatgacccaagtttttacctagtctgactagaagtattccacttcaaggtctgaagtaggacttttaccttaaaaaacaacaacaaacaaaactatcacacaggatagataagaagattggttaaacagttttgtgtagatctttttggtgctgaactatgacatgagccttatagattgtaaaatagggatagttggaactaatgtacagaactaaattttttaaactttatttgctgttaaattctgtgaagtttcagttatctaaaataaatatacacaaatatgaaatataatgtttcagattgcaaggtaatatgtaatagtagtgtttgtaagatactcttgtctaatattaactagtagtattttgatttgtacagtcataatttgttaaaatgacttcatttaacattcactgatgtagattaataatgtaagttctgatttaaagaatggtggcaaaatggtgcatgtaatacttttgcaagtgttggggagatcggtatgttttgaaaagagtaatttaacttttgggtgccaggaaatgggttttctcaaagtccattgccggcaatgggcaggcctgcaaatactggcacagagcattaatcatacaccttattaacggtgaggtgaataactttgaaataaagttttagagaaatgtttcaga

SEQ ID NO: 60836 - DNA, 3700 bp, Homo sapiens
accgtcccgcctcccagcgactctcggcggtgccggagtcgggtgggttggcggctataaagctggtggcgaaggggaggcgccgcggactgtcctttcgtggctcactccctttcctctgctgccgctcggtcacgcttgtgcccgaaggaggaaacagtgacagacctggagactgcagttctctatccttcacacagctctttcaccatgcctggatcacttcctttgaatgcagaagcttgctggccaaaagatgtgggaattgttgcccttgagatctattttccttctcaatatgttgatcaagcagagttggaaaaatatgatggtgtagatgctggaaagtataccattggcttgggccaggccaagatgggcttctgcacagatagagaagatattaactctctttgcatgactgtggttcagaatcttatggagagaaataacctttcctatgattgcattgggcggctggaagttggaacagagacaatcatcgacaaatcaaagtctgtgaagactaatttgatgcagctgtttgaagagtctgggaatacagatatagaaggaatcgacacaactaatgcatgctatggaggcacagctgctgtcttcaatgctgttaactggattgagtccagctcttgggatggacggtatgccctggtagttgcaggagatattgctgtatatgccacaggaaatgctagacctacaggtggagttggagcagtagctctgctaattgggccaaatgctcctttaatttttgaacgagggcttcgtgggacacatatgcaacatgcctatgatttttacaagcctgatatgctatctgaatatcctatagtagatggaaaactctccatacagtgctacctcagtgcattagaccgctgctattctgtctactgcaaaaagatccatgcccagtggcagaaagagggaaatgataaagattttaccttgaatgattttggcttcatgatctttcactcaccatattgtaaactggttcagaaatctctagctcggatgttgctgaatgacttccttaatgaccagaatagagataaaaatagtatctatagtggcctggaagcctttggggatgttaaattagaagacacctactttgatagagatgtggagaaggcatttatgaaggctagctctgaactcttcagtcagaaaacaaaggcatctttacttgtatcaaatcaaaatggaaatatgtacacatcttcagtatatggttcccttgcatctgttctagcacagtactcacctcagcaattagcagggaagagaattggagtgttttcttatggttctggtttggctgccactctgtactctcttaaagtcacacaagatgctacaccggggtctgctcttgataaaataacagcaagtttatgtgatcttaaatcaaggcttgattcaagaactggtgtggcaccagatgtcttcgctgaaaacatgaagctcagagaggacacccatcatttggtcaactatattccccagggttcaatagattcactctttgaaggaacgtggtacttagttagggtggatgaaaagcacagaagaacttacgctcggcgtcccactccaaatgatgacactttggatgaaggagtaggacttgtgcattcaaacatagcaactgagcatattccaagccctgccaagaaagtaccaagactccctgccacagcagcagaacctgaagcagctgtcattagtaatggggaacattaagatactctgtgaggtgcaagacttcagggtggggtgggcatggggtgggggtatgggaacagttggaggaatgggatatctggggataattttaaaggattacatgttatgtaaatttttatgtgactgacatggagcctggatgactatcgtgtacttgggaaagtctctttgctctatttgctgacatgcttcctgttgtggtctggccaatgccaaatgtactcgaatgatgttaagggctctgtaaaacttcatacctctttggccatttgtatgcatgatgtttggtttttaaacatggtataatgaattgtgtacttctgtcagaagaaagcagaggtactaatctccaattaaaaaattttttaacatgtaagaattttgtactttgaacaacaagattacagaaagtacctgtggtttttggaaaacatttctagcttggggaatgtgacaacattccccagtgtggtaaaattggggtaaaatgtggtaaaatgtgatacgcacaaaccctttgaaaatagcataacaaacatgccctttttctaaaattgataaatcctaaagaggaagaaaagagctgggacaataaaacactggctctggaatctggaatgttaagtccaggccagcagtgacaaaagttattgtaatgacctctgaacagagaaacactgccattgaagaggcttctggtatagaaaacatggtacattcaggagctgtgaatatagctctaggtgtgctcctgaatcagttcatggtagattatgctgaacaacagtgagatgttattggaggtgtggatgagggagtttgttgttgcagtccttctttgcaccttattttaaagaataaatgaaacatttttctggttacttttttaaaaatttaaaatggaagggaagaataggggcagggcattattaggctatttctgatgcttcagtgttataaattcaacatagaggctgacaacctaaattcatggtgtaacacagctcttttccttttcctttttttttttttttgggtatctgttcaatgaaaataaggtatgacccaagtttttacctagtctgactagaagtattccacttcaaggtctgaagtaggacttttaccttaaaaaacaacaacaaacaaaactatcacacaggatagataagaagattggttaaacagttttgtgtagatctttttggtgctgaactatgacatgagccttatagattgtaaaatagggatagttggaactaatgtacagaactaaattttttaaactttatttgctgttaaattctgtgaagtttcagttatctaaaataaatatacacaaatatgaaatataatgtttcagattgcaaggtaatatgtaatagtagtgtttgtaagatactcttgtctaatattaactagtagtattttgatttgtacagtcataatttgttaaaatgacttcatttaacattcactgatgtagattaataatgtaagttctgatttaaagaatggtggcaaaatggtgcatgtaatacttttgcaagtgttggggagatcggtatgttttgaaaagagtaatttaacttttgggtgccaggaaatgggttttctcaaagtccattgccggcaatgggcaggcctgcaaatactggcacagagcattaatcatacaccttattaacggtgaggtgaataactttgaaataaagttttagagaaatgtttcagaaaaaaaaatataatacatgtagatacgagacaaaaaaaaaaaaaaatgaaaaaaaataaaaaaaaaagagagggggacagatatatattcaggggagagaaaaaagacagattatagaaaggcccaaaataaaaaaagaagaaggggtataaatcggaaaaatgtgtgtaagacaactgtggagaaaac

SEQ ID NO: 60837 - DNA, 3395 bp, Homo sapiens
atccttaattaaattaatccccgcgccgcggactgtcctttcgtggctcactccctttcctctgctgccgctcggtcacgcttgctctttcaccatgcctggatcacttcctttgaatgcagaagcttgctggccaaaagatgtgggaattgttgcccttgagatctattttccttctcaatatgttgatcaagcagagttggaaaaatatgatggtgtagatgctggaaagtataccattggcttgggccaggccaagatgggcttctgcacagatagagaagatattaactctctttgcatgactgtggttcagaatcttatggagagaaataacctttcctatgattgcattgggcggctggaagttggaacagagacaatcatcgacaaatcaaagtctgtgaagactaatttgatgcagctgtttgaagagtctgggaatacagatatagaaggaatcgacacaactaatgcatgctatggaggcacagctgctgtcttcaatgctgttaactggattgagtccagctcttgggatggacggtatgccctggtagttgcaggagatattgctgtatatgccacaggaaatgctagacctacaggtggagttggagcagtagctctgctaattgggccaaatgctcctttaatttttgaacgagggcttcgtgggacacatatgcaacatgcctatgatttttacaagcctgatatgctatctgaatatcctatagtagatggaaaactctccatacagtgctacctcagtgcattagaccgctgctattctgtctactgcaaaaagatccatgcccagtggcagaaagagggaaatgataaagattttaccttgaatgattttggcttcatgatctttcactcaccatattgtaaactggttcagaaatctctagctcggatgttgctgaatgacttccttaatgaccagaatagagataaaaatagtatctatagtggcctggaagcctttggggatgttaaattagaagacacctactttgatagagatgtggagaaggcatttatgaaggctagctctgaactcttcagtcagaaaacaaaggcatctttacttgtatcaaatcaaaatggaaatatgtacacatcttcagtatatggttcccttgcatctgttctagcacagtactcacctcagcaattagcagggaagagaattggagtgttttcttatggttctggtttggctgccactctgtactctcttaaagtcacacaagatgctacaccggggtctgctcttgataaaataacagcaagtttatgtgatcttaaatcaaggcttgattcaagaactggtgtggcaccagatgtcttcgctgaaaacatgaagctcagagaggacacccatcatttggtcaactatattccccagggttcaatagattcactctttgaaggaacgtggtacttagttagggtggatgaaaagcacagaagaacttacgctcggcgtcccactccaaatgatgacactttggatgaaggagtaggacttgtgcattcaaacatagcaactgagcatattccaagccctgccaagaaagtaccaagactccctgccacagcagcagaacctgaagcagctgtcattagtaatggggaacattaagatactctgtgaggtgcaagacttcagggtggggtgggcatggggtgggggtatgggaacagttggaggaatgggatatctggggataattttaaaggattacatgttatgtaaatttttatgtgactgacatggagcctggatgactatcgtgtacttgggaaagtctctttgctctatttgctgacatgcttcctgttgtggtctggccaatgccaaatgtactcgaatgatgttaagggctctgtaaaacttcatacctctttggccatttgtatgcatgatgtttggtttttaaacatggtataatgaattgtgtacttctgtcagaagaaagcagaggtactaatctccaattaaaaaattttttaacatgtaagaattttgtactttgaacaacaagattacagaaagtacctgtggtttttggaaaacatttctagcttggggaatgtgacaacattccccagtgtggtaaaattggggtaaaatgtggtaaaatgtgatacgcacaaaccctttgaaaatagcataacaaacatgccctttttctaaaattgataaatcctaaagaggaagaaaagagctgggacaataaaacactggctctggaatctggaatgttaagtccaggccagcagtgacaaaagttattgtaatgacctctgaacagagaaacactgccattgaagaggcttctggtatagaaaacatggtacattcaggagctgtgaatatagctctaggtgtgctcctgaatcagttcatggtagattatgctgaacaacagtgagatgttattggaggtgtggatgagggagtttgttgttgcagtccttctttgcaccttattttaaagaataaatgaaacatttttctggttacttttttaaaaatttaaaatggaagggaagaataggggcagggcattattaggctatttctgatgcttcagtgttataaattcaacatagaggctgacaacctaaattcatggtgtaacacagctcttttccttttcctttttttttttttttgggtatctgttcaatgaaaataaggtatgacccaagtttttacctagtctgactagaagtattccacttcaaggtctgaagtaggacttttaccttaaaaaacaacaacaaacaaaactatcacacaggatagataagaagattggttaaacagttttgtgtagatctttttggtgctgaactatgacatgagccttatagattgtaaaatagggatagttggaactaatgtacagaactaaattttttaaactttatttgctgttaaattctgtgaagtttcagttatctaaaataaatatacacaaatatgaaatataatgtttcagattgcaaggtaatatgtaatagtagtgtttgtaagatactcttgtctaatattaactagtagtattttgatttgtacagtcataatttgttaaaatgacttcatttaacattcactgatgtagattaataatgtaagttctgatttaaagaatggtggcaaaatggtgcatgtaatacttttgcaagtgttggggagatcggtatgttttgaaaagagtaatttaacttttgggtgccaggaaatgggttttctcaaagtccattgccggcaatgggcaggcctgcaaatactggcacagagcattaatcatacaccttattaacggtgaggtgaataactttgaaataaagttttagagaaatgtttcaga

SEQ ID NO: 60838 - DNA, 3986 bp, Homo sapiens
accgtcccgcctcccagcgactctcggcggtgccggagtcgggtgggttggcggctataaagctggtggcgaaggggaggcgccgcggactgtcctttcgtggctcactccctttcctctgctgccgctcggtcacgcttgtgcccgaaggaggaaacagtgacagacctggagactgcagttctctatccttcacacagctctttcaccatgcctggatcacttcctttgaatgcagaagcttgctggccaaaagatgtgggaattgttgcccttgagatctattttccttctcaatatgttgatcaagcagagttggaaaaatatgatggtgtagatgctggaaagtataccattggcttgggccaggccaagatgggcttctgcacagatagagaagatattaactctctttgcatgactgtggttcagaatcttatggagagaaataacctttcctatgattgcattgggcggctggaagttggaacagagacaatcatcgacaaatcaaagtctgtgaagactaatttgatgcagctgtttgaagagtctgggaatacagatatagaaggaatcgacacaactaatgcatgctatggaggcacagctgctgtcttcaatgctgttaactggattgagtccagctcttgggatggacggtatgccctggtagttgcaggagatattgctgtatatgccacaggaaatgctagacctacaggtggagttggagcagtagctctgctaattgggccaaatgctcctttaatttttgaacgagggcttcgtgggacacatatgcaacatgcctatgatttttacaagcctgatatgctatctgaatatcctatagtagatggaaaactctccatacagtgctacctcagtgcattagaccgctgctattctgtctactgcaaaaagatccatgcccagtggcagaaagagggaaatgataaagattttaccttgaatgattttggcttcatgatctttcactcaccatattgtaaactggttcagaaatctctagctcggatgttgctgaatgacttccttaatgaccagaatagagataaaaatagtatctatagtggcctggaagcctttggggatgttaaattagaagacacctactttgatagagatgtggagaaggcatttatgaaggctagctctgaactcttcagtcagaaaacaaaggcatctttacttgtatcaaatcaaaatggaaatatgtacacatcttcagtatatggttcccttgcatctgttctagcacagtaagtataaatttcacctactacttaactccccttatttgggagatgttagatttctaagaccaaatctagtgtcaagcatgttggtggtagatcacagaaaattttatcttgaggctctctaatctgctattgtccattgacttgaaagatgtatgggttgaggctacagttcttccagaagtatttgttaatttcatactggctttcctggcttctgttttcatggttttttaattcttgacctacagttgaaccataaatacctggttgatgaagtaacttgttttgtggcatgactttcacaagctctgtcattccccacaagatgaaaactcacatgcctgcaatattaaaactaagttatattccctactgcaatattaacactttgagttagatcctttttatagcttcccacacgctgtagctttggatcagttaaacttctgaactattgttacaccctacataggtactcacctcagcaattagcagggaagagaattggagtgttttcttatggttctggtttggctgccactctgtactctcttaaagtcacacaagatgctacaccggggtctgctcttgataaaataacagcaagtttatgtgatcttaaatcaaggcttgattcaagaactggtgtggcaccagatgtcttcgctgaaaacatgaagctcagagaggacacccatcatttggtcaactatattccccagggttcaatagattcactctttgaaggaacgtggtacttagttagggtggatgaaaagcacagaagaacttacgctcggcgtcccactccaaatgatgacactttggatgaaggagtaggacttgtgcattcaaacatagcaactgagcatattccaagccctgccaagaaagtaccaagactccctgccacagcagcagaacctgaagcagctgtcattagtaatggggaacattaagatactctgtgaggtgcaagacttcagggtggggtgggcatggggtgggggtatgggaacagttggaggaatgggatatctggggataattttaaaggattacatgttatgtaaatttttatgtgactgacatggagcctggatgactatcgtgtacttgggaaagtctctttgctctatttgctgacatgcttcctgttgtggtctggccaatgccaaatgtactcgaatgatgttaagggctctgtaaaacttcatacctctttggccatttgtatgcatgatgtttggtttttaaacatggtataatgaattgtgtacttctgtcagaagaaagcagaggtactaatctccaattaaaaaattttttaacatgtaagaattttgtactttgaacaacaagattacagaaagtacctgtggtttttggaaaacatttctagcttggggaatgtgacaacattccccagtgtggtaaaattggggtaaaatgtggtaaaatgtgatacgcacaaaccctttgaaaatagcataacaaacatgccctttttctaaaattgataaatcctaaagaggaagaaaagagctgggacaataaaacactggctctggaatctggaatgttaagtccaggccagcagtgacaaaagttattgtaatgacctctgaacagagaaacactgccattgaagaggcttctggtatagaaaacatggtacattcaggagctgtgaatatagctctaggtgtgctcctgaatcagttcatggtagattatgctgaacaacagtgagatgttattggaggtgtggatgagggagtttgttgttgcagtccttctttgcaccttattttaaagaataaatgaaacatttttctggttacttttttaaaaatttaaaatggaagggaagaataggggcagggcattattaggctatttctgatgcttcagtgttataaattcaacatagaggctgacaacctaaattcatggtgtaacacagctcttttccttttcctttttttttttttttgggtatctgttcaatgaaaataaggtatgacccaagtttttacctagtctgactagaagtattccacttcaaggtctgaagtaggacttttaccttaaaaaacaacaacaaacaaaactatcacacaggatagataagaagattggttaaacagttttgtgtagatctttttggtgctgaactatgacatgagccttatagattgtaaaatagggatagttggaactaatgtacagaactaaattttttaaactttatttgctgttaaattctgtgaagtttcagttatctaaaataaatatacacaaatatgaaatataatgtttcagattgcaaggtaatatgtaatagtagtgtttgtaagatactcttgtctaatattaactagtagtattttgatttgtacagtcataatttgttaaaatgacttcatttaacattcactgatgtagattaataatgtaagttctgatttaaagaatggtggcaaaatggtgcatgtaatacttttgcaagtgttggggagatcggtatgttttgaaaagagtaatttaacttttgggtgccaggaaatgggttttctcaaagtccattgccggcaatgggcaggcctgcaaatactggcacagagcattaatcatacaccttattaacggtgaggtgaataactttgaaataaagttttagagaaatgtttcaga

SEQ ID NO: 60839 - DNA, 3004 bp, Homo sapiens
ctgctacttggcttttaataaatgagaaaacaattatatacacttaaagatttgaatcctaattaggcctgctgtttagtgtaataaaaacataggctttaaacactgtaaaactgtaaaataaatctttcagggatgttaaattagaagacacctactttgatagagatgtggagaaggcatttatgaaggctagctctgaactcttcagtcagaaaacaaaggcatctttacttgtatcaaatcaaaatggaaatatgtacacatcttcagtatatggttcccttgcatctgttctagcacagtaagtataaatttcacctactacttaactccccttatttgggagatgttagatttctaagaccaaatctagtgtcaagcatgttggtggtagatcacagaaaattttatcttgaggctctctaatctgctattgtccattgacttgaaagatgtatgggttgaggctacagttcttccagaagtatttgttaatttcatactggctttcctggcttctgttttcatggttttttaattcttgacctacagttgaaccataaatacctggttgatgaagtaacttgttttgtggcatgactttcacaagctctgtcattccccacaagatgaaaactcacatgcctgcaatattaaaactaagttatattccctactgcaatattaacactttgagttagatcctttttatagcttcccacacgctgtagctttggatcagttaaacttctgaactattgttacaccctacataggtactcacctcagcaattagcagggaagagaattggagtgttttcttatggttctggtttggctgccactctgtactctcttaaagtcacacaagatgctacaccggggtctgctcttgataaaataacagcaagtttatgtgatcttaaatcaaggcttgattcaagaactggtgtggcaccagatgtcttcgctgaaaacatgaagctcagagaggacacccatcatttggtcaactatattccccagggttcaatagattcactctttgaaggaacgtggtacttagttagggtggatgaaaagcacagaagaacttacgctcggcgtcccactccaaatgatgacactttggatgaaggagtaggacttgtgcattcaaacatagcaactgagcatattccaagccctgccaagaaagtaccaagactccctgccacagcagcagaacctgaagcagctgtcattagtaatggggaacattaagatactctgtgaggtgcaagacttcagggtggggtgggcatggggtgggggtatgggaacagttggaggaatgggatatctggggataattttaaaggattacatgttatgtaaatttttatgtgactgacatggagcctggatgactatcgtgtacttgggaaagtctctttgctctatttgctgacatgcttcctgttgtggtctggccaatgccaaatgtactcgaatgatgttaagggctctgtaaaacttcatacctctttggccatttgtatgcatgatgtttggtttttaaacatggtataatgaattgtgtacttctgtcagaagaaagcagaggtactaatctccaattaaaaaattttttaacatgtaagaattttgtactttgaacaacaagattacagaaagtacctgtggtttttggaaaacatttctagcttggggaatgtgacaacattccccagtgtggtaaaattggggtaaaatgtggtaaaatgtgatacgcacaaaccctttgaaaatagcataacaaacatgccctttttctaaaattgataaatcctaaagaggaagaaaagagctgggacaataaaacactggctctggaatctggaatgttaagtccaggccagcagtgacaaaagttattgtaatgacctctgaacagagaaacactgccattgaagaggcttctggtatagaaaacatggtacattcaggagctgtgaatatagctctaggtgtgctcctgaatcagttcatggtagattatgctgaacaacagtgagatgttattggaggtgtggatgagggagtttgttgttgcagtccttctttgcaccttattttaaagaataaatgaaacatttttctggttacttttttaaaaatttaaaatggaagggaagaataggggcagggcattattaggctatttctgatgcttcagtgttataaattcaacatagaggctgacaacctaaattcatggtgtaacacagctcttttccttttcctttttttttttttttgggtatctgttcaatgaaaataaggtatgacccaagtttttacctagtctgactagaagtattccacttcaaggtctgaagtaggacttttaccttaaaaaacaacaacaaacaaaactatcacacaggatagataagaagattggttaaacagttttgtgtagatctttttggtgctgaactatgacatgagccttatagattgtaaaatagggatagttggaactaatgtacagaactaaattttttaaactttatttgctgttaaattctgtgaagtttcagttatctaaaataaatatacacaaatatgaaatataatgtttcagattgcaaggtaatatgtaatagtagtgtttgtaagatactcttgtctaatattaactagtagtattttgatttgtacagtcataatttgttaaaatgacttcatttaacattcactgatgtagattaataatgtaagttctgatttaaagaatggtggcaaaatggtgcatgtaatacttttgcaagtgttggggagatcggtatgttttgaaaagagtaatttaacttttgggtgccaggaaatgggttttctcaaagtccattgccggcaatgggcaggcctgcaaatactggcacagagcattaatcatacaccttattaacggtgaggtgaataactttgaaataaagttttagagaaatgtttcaga

SEQ ID NO: 60840 - DNA, 2951 bp, Homo sapiens
ctgctacttggcttttaataaatgagaaaacaattatatacacttaaagatttgaatcctaattaggcctgctgtttagtgtaataaaaacataggctttaaacactgtaaaactgtaaaataaatctttcagggatgttaaattagaagacacctactttgatagagatgtggagaaggcatttatgaaggctagctctgaactcttcagtcagaaaacaaaggcatctttacttgtatcaaatcaaaatggaaatatgtacacatcttcagtatatggttcccttgcatctgttctagcacagtaagtataaatttcacctactacttaactccccttatttgggagatgttagatttctaagaccaaatctagtgtcaagcatgttggtggtagatcacatgtatgggttgaggctacagttcttccagaagtatttgttaatttcatactggctttcctggcttctgttttcatggttttttaattcttgacctacagttgaaccataaatacctggttgatgaagtaacttgttttgtggcatgactttcacaagctctgtcattccccacaagatgaaaactcacatgcctgcaatattaaaactaagttatattccctactgcaatattaacactttgagttagatcctttttatagcttcccacacgctgtagctttggatcagttaaacttctgaactattgttacaccctacataggtactcacctcagcaattagcagggaagagaattggagtgttttcttatggttctggtttggctgccactctgtactctcttaaagtcacacaagatgctacaccggggtctgctcttgataaaataacagcaagtttatgtgatcttaaatcaaggcttgattcaagaactggtgtggcaccagatgtcttcgctgaaaacatgaagctcagagaggacacccatcatttggtcaactatattccccagggttcaatagattcactctttgaaggaacgtggtacttagttagggtggatgaaaagcacagaagaacttacgctcggcgtcccactccaaatgatgacactttggatgaaggagtaggacttgtgcattcaaacatagcaactgagcatattccaagccctgccaagaaagtaccaagactccctgccacagcagcagaacctgaagcagctgtcattagtaatggggaacattaagatactctgtgaggtgcaagacttcagggtggggtgggcatggggtgggggtatgggaacagttggaggaatgggatatctggggataattttaaaggattacatgttatgtaaatttttatgtgactgacatggagcctggatgactatcgtgtacttgggaaagtctctttgctctatttgctgacatgcttcctgttgtggtctggccaatgccaaatgtactcgaatgatgttaagggctctgtaaaacttcatacctctttggccatttgtatgcatgatgtttggtttttaaacatggtataatgaattgtgtacttctgtcagaagaaagcagaggtactaatctccaattaaaaaattttttaacatgtaagaattttgtactttgaacaacaagattacagaaagtacctgtggtttttggaaaacatttctagcttggggaatgtgacaacattccccagtgtggtaaaattggggtaaaatgtggtaaaatgtgatacgcacaaaccctttgaaaatagcataacaaacatgccctttttctaaaattgataaatcctaaagaggaagaaaagagctgggacaataaaacactggctctggaatctggaatgttaagtccaggccagcagtgacaaaagttattgtaatgacctctgaacagagaaacactgccattgaagaggcttctggtatagaaaacatggtacattcaggagctgtgaatatagctctaggtgtgctcctgaatcagttcatggtagattatgctgaacaacagtgagatgttattggaggtgtggatgagggagtttgttgttgcagtccttctttgcaccttattttaaagaataaatgaaacatttttctggttacttttttaaaaatttaaaatggaagggaagaataggggcagggcattattaggctatttctgatgcttcagtgttataaattcaacatagaggctgacaacctaaattcatggtgtaacacagctcttttccttttcctttttttttttttttgggtatctgttcaatgaaaataaggtatgacccaagtttttacctagtctgactagaagtattccacttcaaggtctgaagtaggacttttaccttaaaaaacaacaacaaacaaaactatcacacaggatagataagaagattggttaaacagttttgtgtagatctttttggtgctgaactatgacatgagccttatagattgtaaaatagggatagttggaactaatgtacagaactaaattttttaaactttatttgctgttaaattctgtgaagtttcagttatctaaaataaatatacacaaatatgaaatataatgtttcagattgcaaggtaatatgtaatagtagtgtttgtaagatactcttgtctaatattaactagtagtattttgatttgtacagtcataatttgttaaaatgacttcatttaacattcactgatgtagattaataatgtaagttctgatttaaagaatggtggcaaaatggtgcatgtaatacttttgcaagtgttggggagatcggtatgttttgaaaagagtaatttaacttttgggtgccaggaaatgggttttctcaaagtccattgccggcaatgggcaggcctgcaaatactggcacagagcattaatcatacaccttattaacggtgaggtgaataactttgaaataaagttttagagaaatgtttcaga

SEQ ID NO: 60841 - DNA, 2161 bp, Homo sapiens
  misc_feature (22)..(22): n is a, c, g, or t
tggctggtacggtcagccgttntgatcaggatgctacagccgcggtctgctcttgataaaataacagcaagtttatgtgatcttaaatcaaggcttgattcaagaactggtgtggcaccagatgtcttcgctgaaaacatgaagctcagagaggacacccatcatttggtcaactatattccccagggttcaatagattcactctttgaaggaacgtggtacttagttagggtggatgaaaagcacagaagaacttacgctcggcgtcccactccaaatgatgacactttggatgaaggagtaggacttgtgcattcaaacatagcaactgagcatattccaagccctgccaagaaagtaccaagactccctgccacagcagcagaacctgaagcagctgtcattagtaatggggaacattaagatactctgtgaggtgcaagacttcagggtggggtgggcatggggtgggggtatgggaacagttggaggaatgggatatctggggataattttaaaggattacatgttatgtaaatttttatgtgactgacatggagcctggatgactatcgtgtacttgggaaagtctctttgctctatttgctgacatgcttcctgttgtggtctggccaatgccaaatgtactcgaatgatgttaagggctctgtaaaacttcatacctctttggccatttgtatgcatgatgtttggtttttaaacatggtataatgaattgtgtacttctgtcagaagaaagcagaggtactaatctccaattaaaaaattttttaacatgtaagaattttgtactttgaacaacaagattacagaaagtacctgtggtttttggaaaacatttctagcttggggaatgtgacaacattccccagtgtggtaaaattggggtaaaatgtggtaaaatgtgatacgcacaaaccctttgaaaatagcataacaaacatgccctttttctaaaattgataaatcctaaagaggaagaaaagagctgggacaataaaacactggctctggaatctggaatgttaagtccaggccagcagtgacaaaagttattgtaatgacctctgaacagagaaacactgccattgaagaggcttctggtatagaaaacatggtacattcaggagctgtgaatatagctctaggtgtgctcctgaatcagttcatggtagattatgctgaacaacagtgagatgttattggaggtgtggatgagggagtttgttgttgcagtccttctttgcaccttattttaaagaataaatgaaacatttttctggttacttttttaaaaatttaaaatggaagggaagaataggggcagggcattattaggctatttctgatgcttcagtgttataaattcaacatagaggctgacaacctaaattcatggtgtaacacagctcttttccttttcctttttttttttttttgggtatctgttcaatgaaaataaggtatgacccaagtttttacctagtctgactagaagtattccacttcaaggtctgaagtaggacttttaccttaaaaaacaacaacaaacaaaactatcacacaggatagataagaagattggttaaacagttttgtgtagatctttttggtgctgaactatgacatgagccttatagattgtaaaatagggatagttggaactaatgtacagaactaaattttttaaactttatttgctgttaaattctgtgaagtttcagttatctaaaataaatatacacaaatatgaaatataatgtttcagattgcaaggtaatatgtaatagtagtgtttgtaagatactcttgtctaatattaactagtagtattttgatttgtacagtcataatttgttaaaatgacttcatttaacattcactgatgtagattaataatgtaagttctgatttaaagaatggtggcaaaatggtgcatgtaatacttttgcaagtgttggggagatcggtatgttttgaaaagagtaatttaacttttgggtgccaggaaatgggttttctcaaagtccattgccggcaatgggcaggcctgcaaatactggcacagagcattaatcatacaccttattaacggtgaggtgaataactttgaaataaagttttagagaaatgtttcaga

SEQ ID NO: 60842 - DNA, 1829 bp, Homo sapiens
aaaagcccagatatgaccaccatacccccaccccatgcccaccccagcagcagaacctgaagcagctgtcattagtaatggggaacattaagatactctgtgaggtgcaagacttcagggtggggtgggcatggggtgggggtatgggaacagttggaggaatgggatatctggggataattttaaaggattacatgttatgtaaatttttatgtgactgacatggagcctggatgactatcgtgtacttgggaaagtctctttgctctatttgctgacatgcttcctgttgtggtctggccaatgccaaatgtactcgaatgatgttaagggctctgtaaaacttcatacctctttggccatttgtatgcatgatgtttggtttttaaacatggtataatgaattgtgtacttctgtcagaagaaagcagaggtactaatctccaattaaaaaattttttaacatgtaagaattttgtactttgaacaacaagattacagaaagtacctgtggtttttggaaaacatttctagcttggggaatgtgacaacattccccagtgtggtaaaattggggtaaaatgtggtaaaatgtgatacgcacaaaccctttgaaaatagcataacaaacatgccctttttctaaaattgataaatcctaaagaggaagaaaagagctgggacaataaaacactggctctggaatctggaatgttaagtccaggccagcagtgacaaaagttattgtaatgacctctgaacagagaaacactgccattgaagaggcttctggtatagaaaacatggtacattcaggagctgtgaatatagctctaggtgtgctcctgaatcagttcatggtagattatgctgaacaacagtgagatgttattggaggtgtggatgagggagtttgttgttgcagtccttctttgcaccttattttaaagaataaatgaaacatttttctggttacttttttaaaaatttaaaatggaagggaagaataggggcagggcattattaggctatttctgatgcttcagtgttataaattcaacatagaggctgacaacctaaattcatggtgtaacacagctcttttccttttcctttttttttttttttgggtatctgttcaatgaaaataaggtatgacccaagtttttacctagtctgactagaagtattccacttcaaggtctgaagtaggacttttaccttaaaaaacaacaacaaacaaaactatcacacaggatagataagaagattggttaaacagttttgtgtagatctttttggtgctgaactatgacatgagccttatagattgtaaaatagggatagttggaactaatgtacagaactaaattttttaaactttatttgctgttaaattctgtgaagtttcagttatctaaaataaatatacacaaatatgaaatataatgtttcagattgcaaggtaatatgtaatagtagtgtttgtaagatactcttgtctaatattaactagtagtattttgatttgtacagtcataatttgttaaaatgacttcatttaacattcactgatgtagattaataatgtaagttctgatttaaagaatggtggcaaaatggtgcatgtaatacttttgcaagtgttggggagatcggtatgttttgaaaagagtaatttaacttttgggtgccaggaaatgggttttctcaaagtccattgccggcaatgggcaggcctgcaaatactggcacagagcattaatcatacaccttattaacggtgaggtgaataactttgaaataaagttttagagaaatgtttcaga

SEQ ID NO: 60843 - DNA, 1642 bp, Homo sapiens
cttcatacctctacggccatttgtatgcagttttacagagcccttaacatcattcgagtacatttggcattggccagaccacaacaggaagcatgtcagcaaatagagcaaagagactttcccaagtactcgaatgatgttaagggctctgtaaaacttcatacctctttggccatttgtatgcatgatgtttggtttttaaacatggtataatgaattgtgtacttctgtcagaagaaagcagaggtactaatctccaattaaaaaattttttaacatgtaagaattttgtactttgaacaacaagattacagaaagtacctgtggtttttggaaaacatttctagcttggggaatgtgacaacattccccagtgtggtaaaattggggtaaaatgtggtaaaatgtgatacgcacaaaccctttgaaaatagcataacaaacatgccctttttctaaaattgataaatcctaaagaggaagaaaagagctgggacaataaaacactggctctggaatctggaatgttaagtccaggccagcagtgacaaaagttattgtaatgacctctgaacagagaaacactgccattgaagaggcttctggtatagaaaacatggtacattcaggagctgtgaatatagctctaggtgtgctcctgaatcagttcatggtagattatgctgaacaacagtgagatgttattggaggtgtggatgagggagtttgttgttgcagtccttctttgcaccttattttaaagaataaatgaaacatttttctggttacttttttaaaaatttaaaatggaagggaagaataggggcagggcattattaggctatttctgatgcttcagtgttataaattcaacatagaggctgacaacctaaattcatggtgtaacacagctcttttccttttcctttttttttttttttgggtatctgttcaatgaaaataaggtatgacccaagtttttacctagtctgactagaagtattccacttcaaggtctgaagtaggacttttaccttaaaaaacaacaacaaacaaaactatcacacaggatagataagaagattggttaaacagttttgtgtagatctttttggtgctgaactatgacatgagccttatagattgtaaaatagggatagttggaactaatgtacagaactaaattttttaaactttatttgctgttaaattctgtgaagtttcagttatctaaaataaatatacacaaatatgaaatataatgtttcagattgcaaggtaatatgtaatagtagtgtttgtaagatactcttgtctaatattaactagtagtattttgatttgtacagtcataatttgttaaaatgacttcatttaacattcactgatgtagattaataatgtaagttctgatttaaagaatggtggcaaaatggtgcatgtaatacttttgcaagtgttggggagatcggtatgttttgaaaagagtaatttaacttttgggtgccaggaaatgggttttctcaaagtccattgccggcaatgggcaggcctgcaaatactggcacagagcattaatcatacaccttattaacggtgaggtgaataactttgaaataaagttttagagaaatgtttcaga

SEQ ID NO: 60844 - DNA, 1521 bp, Homo sapiens
cgtgacgcgtgggtcgacccacgcgtccgtcctctgctgccgctcggtcacgcttgtgtatgcatgatgtttggtttttaaacatggtataatgaattgtgtacttctgtcagaagaaagcagaggtactaatctccaattaaaaaattttttaacatgtaagaattttgtactttgaacaacaagattacagaaagtacctgtggtttttggaaaacatttctagcttggggaatgtgacaacattccccagtgtggtaaaattggggtaaaatgtggtaaaatgtgatacgcacaaaccctttgaaaatagcataacaaacatgccctttttctaaaattgataaatcctaaagaggaagaaaagagctgggacaataaaacactggctctggaatctggaatgttaagtccaggccagcagtgacaaaagttattgtaatgacctctgaacagagaaacactgccattgaagaggcttctggtatagaaaacatggtacattcaggagctgtgaatatagctctaggtgtgctcctgaatcagttcatggtagattatgctgaacaacagtgagatgttattggaggtgtggatgagggagtttgttgttgcagtccttctttgcaccttattttaaagaataaatgaaacatttttctggttacttttttaaaaatttaaaatggaagggaagaataggggcagggcattattaggctatttctgatgcttcagtgttataaattcaacatagaggctgacaacctaaattcatggtgtaacacagctcttttccttttcctttttttttttttttgggtatctgttcaatgaaaataaggtatgacccaagtttttacctagtctgactagaagtattccacttcaaggtctgaagtaggacttttaccttaaaaaacaacaacaaacaaaactatcacacaggatagataagaagattggttaaacagttttgtgtagatctttttggtgctgaactatgacatgagccttatagattgtaaaatagggatagttggaactaatgtacagaactaaattttttaaactttatttgctgttaaattctgtgaagtttcagttatctaaaataaatatacacaaatatgaaatataatgtttcagattgcaaggtaatatgtaatagtagtgtttgtaagatactcttgtctaatattaactagtagtattttgatttgtacagtcataatttgttaaaatgacttcatttaacattcactgatgtagattaataatgtaagttctgatttaaagaatggtggcaaaatggtgcatgtaatacttttgcaagtgttggggagatcggtatgttttgaaaagagtaatttaacttttgggtgccaggaaatgggttttctcaaagtccattgccggcaatgggcaggcctgcaaatactggcacagagcattaatcatacaccttattaacggtgaggtgaataactttgaaataaagttttagagaaatgtttcaga

SEQ ID NO: 60845 - DNA, 1486 bp, Homo sapiens
acgcgtccgcggacgcgtgggtgtatgcatgatgtttggtttttaaacatggtataatgaattgtgtacttctgtcagaagaaagcagaggtactaatctccaattaaaaaattttttaacatgtaagaattttgtactttgaacaacaagattacagaaagtacctgtggtttttggaaaacatttctagcttggggaatgtgacaacattccccagtgtggtaaaattggggtaaaatgtggtaaaatgtgatacgcacaaaccctttgaaaatagcataacaaacatgccctttttctaaaattgataaatcctaaagaggaagaaaagagctgggacaataaaacactggctctggaatctggaatgttaagtccaggccagcagtgacaaaagttattgtaatgacctctgaacagagaaacactgccattgaagaggcttctggtatagaaaacatggtacattcaggagctgtgaatatagctctaggtgtgctcctgaatcagttcatggtagattatgctgaacaacagtgagatgttattggaggtgtggatgagggagtttgttgttgcagtccttctttgcaccttattttaaagaataaatgaaacatttttctggttacttttttaaaaatttaaaatggaagggaagaataggggcagggcattattaggctatttctgatgcttcagtgttataaattcaacatagaggctgacaacctaaattcatggtgtaacacagctcttttccttttcctttttttttttttttgggtatctgttcaatgaaaataaggtatgacccaagtttttacctagtctgactagaagtattccacttcaaggtctgaagtaggacttttaccttaaaaaacaacaacaaacaaaactatcacacaggatagataagaagattggttaaacagttttgtgtagatctttttggtgctgaactatgacatgagccttatagattgtaaaatagggatagttggaactaatgtacagaactaaattttttaaactttatttgctgttaaattctgtgaagtttcagttatctaaaataaatatacacaaatatgaaatataatgtttcagattgcaaggtaatatgtaatagtagtgtttgtaagatactcttgtctaatattaactagtagtattttgatttgtacagtcataatttgttaaaatgacttcatttaacattcactgatgtagattaataatgtaagttctgatttaaagaatggtggcaaaatggtgcatgtaatacttttgcaagtgttggggagatcggtatgttttgaaaagagtaatttaacttttgggtgccaggaaatgggttttctcaaagtccattgccggcaatgggcaggcctgcaaatactggcacagagcattaatcatacaccttattaacggtgaggtgaataactttgaaataaagttttagagaaatgtttcaga

SEQ ID NO: 60846 - DNA, 1228 bp, Homo sapiens
cggtaccggtccgccagctgttggataaacatgccctttttctaaaattgataaatcctaaagaggaagaaaagagctgggacaataaaacactggctctggaatctggaatgttaagtccaggccagcagtgacaaaagttattgtaatgacctctgaacagagaaacactgccattgaagaggcttctggtatagaaaacatggtacattcaggagctgtgaatatagctctaggtgtgctcctgaatcagttcatggtagattatgctgaacaacagtgagatgttattggaggtgtggatgagggagtttgttgttgcagtccttctttgcaccttattttaaagaataaatgaaacatttttctggttacttttttaaaaatttaaaatggaagggaagaataggggcagggcattattaggctatttctgatgcttcagtgttataaattcaacatagaggctgacaacctaaattcatggtgtaacacagctcttttccttttcctttttttttttttttgggtatctgttcaatgaaaataaggtatgacccaagtttttacctagtctgactagaagtattccacttcaaggtctgaagtaggacttttaccttaaaaaacaacaacaaacaaaactatcacacaggatagataagaagattggttaaacagttttgtgtagatctttttggtgctgaactatgacatgagccttatagattgtaaaatagggatagttggaactaatgtacagaactaaattttttaaactttatttgctgttaaattctgtgaagtttcagttatctaaaataaatatacacaaatatgaaatataatgtttcagattgcaaggtaatatgtaatagtagtgtttgtaagatactcttgtctaatattaactagtagtattttgatttgtacagtcataatttgttaaaatgacttcatttaacattcactgatgtagattaataatgtaagttctgatttaaagaatggtggcaaaatggtgcatgtaatacttttgcaagtgttggggagatcggtatgttttgaaaagagtaatttaacttttgggtgccaggaaatgggttttctcaaagtccattgccggcaatgggcaggcctgcaaatactggcacagagcattaatcatacaccttattaacggtgaggtgaataactttgaaataaagttttagagaaatgtttcaga

SEQ ID NO: 60847 - DNA, 1855 bp, Homo sapiens
  misc_feature (1812)..(1812): n is a, c, g, or t
accgtcccgcctcccagcgactctcggcggtgccggagtcgggtgggttggcggctataaagctggtggcgaaggggaggcgccgcggactgtcctttcgtggctcactccctttcctctgctgccgctcggtcacgcttgtgcccgaaggaggaaacagtgacagacctggagactgcagttctctatccttcacacagctctttcaccatgcctggatcacttcctttgaatgcagaagcttgctggccaaaagatgtgggaattgttgcccttgagatctattttccttctcaatatgttgatcaagcagagttggaaaaatatgatggtgtagatgctggaaagtataccattggcttgggccaggccaagatgggcttctgcacagatagagaagatattaactctctttgcatgactgtggttcagaatcttatggagagaaataacctttcctatgattgcattgggcggctggaagttggaacagagacaatcatcgacaaatcaaagtctgtgaagactaatttgatgcagctgtttgaagagtctgggaatacagatatagaaggaatcgacacaactaatgcatgctatggaggcacagctgctgtcttcaatgctgttaactggattgagtccagctcttgggatggacggtatgccctggtagttgcaggagatattgctgtatatgccacaggaaatgctagacctacaggtggagttggagcagtagctctgctaattgggccaaatgctcctttaatttttgaacgagggcttcgtgggacacatatgcaacatgcctatgatttttacaagcctgatatgctatctgaatatcctatagtagatggaaaactctccatacagtgctacctcagtgcattagaccgctgctattctgtctactgcaaaaagatccatgcccagtggcagaaagagggaaatgataaagattttaccttgaatgattttggcttcatgatctttcactcaccatattgtaaactggttcagaaatctctagctcggatgttgctgaatgacttccttaatgaccagaatagagataaaaatagtatctatagtggcctggaagcctttggggatgttaaattagaagacacctactttgatagagatgtggagaaggcatttatgaaggctagctctgaactcttcagtcagaaaacaaaggcatctttacttgtatcaaatcaaaatggaaatatgtacacatcttcagtatatggttcccttgcatctgttctagcacagtactcacctcagcaattagcagggaagagaattggagtgttttcttatggttctggtttggctgccactctgtactctcttaaagtcacacaagatgctacaccggggtctgctcttgataaaataacagcaagtttatgtgatcttaaatcaaggcttgattcaagaactggtgtggcaccagatgtcttcgctgaaaacatgaagctcagagaggacacccatcatttggtcaactatattccccagggttcaatagattcactctttgaaggaacgtggtacttagttagggtggatgaaaagcacagaagaacttacgctcggcgtcccactccaaatgatgacactttggatgaaggagtaggacttgtgcattcaaacatagcaactgagcatattccaagccctgccaagaaagtaccaagactccctgccacagtaaatattttgggacttgcgagccacatatggtctctgtcacatattcttcttacttttttaagataacttgtacaatatgtnaaaacaatttttagcttgcgagccctacaaaaacagactgcag

SEQ ID NO: 60848 - DNA, 1683 bp, Homo sapiens
accgtcccgcctcccagcgactctcggcggtgccggagtcgggtgggttggcggctataaagctggtggcgaaggggaggcgccgcggactgtcctttcgtggctcactccctttcctctgctgccgctcggtcacgcttgtgcccgaaggaggaaacagtgacagacctggagactgcagttctctatccttcacacagctctttcaccatgcctggatcacttcctttgaatgcagaagcttgctggccaaaagatgtgggaattgttgcccttgagatctattttccttctcaatatgttgatcaagcagagttggaaaaatatgatggtgtagatgctggaaagtataccattggcttgggccaggccaagatgggcttctgcacagatagagaagatattaactctctttgcatgactgtggttcagaatcttatggagagaaataacctttcctatgattgcattgggcggctggaagttggaacagagacaatcatcgacaaatcaaagtctgtgaagactaatttgatgcagctgtttgaagagtctgggaatacagatatagaaggaatcgacacaactaatgcatgctatggaggcacagctgctgtcttcaatgctgttaactggattgagtccagctcttgggatggacggtatgccctggtagttgcaggagatattgctgtatatgccacaggaaatgctagacctacaggtggagttggagcagtagctctgctaattgggccaaatgctcctttaatttttgaacgagggcttcgtgggacacatatgcaacatgcctatgatttttacaagcctgatatgctatctgaatatcctatagtagatggaaaactctccatacagtgctacctcagtgcattagaccgctgctattctgtctactgcaaaaagatccatgcccagtggcagaaagagggaaatgataaagattttaccttgaatgattttggcttcatgatctttcactcaccatattgtaaactggttcagaaatctctagctcggatgttgctgaatgacttccttaatgaccagaatagagataaaaatagtatctatagtggcctggaagcctttggggatgttaaattagaagacacctactttgatagagatgtggagaaggcatttatgaaggctagctctgaactcttcagtcagaaaacaaaggcatctttacttgtatcaaatcaaaatggaaatatgtacacatcttcagtatatggttcccttgcatctgttctagcacagtactcacctcagcaattagcagggaagagaattggagtgttttcttatggttctggtttggctgccactctgtactctcttaaagtcacacaagatgctacaccggggtctgctcttgataaaataacagcaagtttatgtgatcttaaatcaaggcttgattcaagaactggtgtggcaccagatgtcttcgctgaaaacatgaagctcagagaggacacccatcatttgggtaaaaatattaaatgttctttaagttaacccatttggagggctgatatcattaaggatgctacatatacgataaggatatcaagactttactcagtactaatctgatgtcagtgaaaattattgggatatatgaaacttatctttagctttattaccagatga

SEQ ID NO: 60849 - DNA, 2361 bp, Homo sapiens
accgtcccgcctcccagcgactctcggcggtgccggagtcgggtgggttggcggctataaagctggtggcgaaggggaggcgccgcggactgtcctttcgtggctcactccctttcctctgctgccgctcggtcacgcttgtgcccgaaggaggaaacagtgacagacctggagactgcagttctctatccttcacacagctctttcaccatgcctggatcacttcctttgaatgcagaagcttgctggccaaaagatgtgggaattgttgcccttgagatctattttccttctcaatatgttgatcaagcagagttggaaaaatatgatggtgtagatgctggaaagtataccattggcttgggccaggccaagatgggcttctgcacagatagagaagatattaactctctttgcatgactgtggttcagaatcttatggagagaaataacctttcctatgattgcattgggcggctggaagttggaacagagacaatcatcgacaaatcaaagtctgtgaagactaatttgatgcagctgtttgaagagtctgggaatacagatatagaaggaatcgacacaactaatgcatgctatggaggcacagctgctgtcttcaatgctgttaactggattgagtccagctcttgggatggacggtatgccctggtagttgcaggagatattgctgtatatgccacaggaaatgctagacctacaggtggagttggagcagtagctctgctaattgggccaaatgctcctttaatttttgaacgagggcttcgtgggacacatatgcaacatgcctatgatttttacaagcctgatatgctatctgaatatcctatagtagatggaaaactctccatacagtgctacctcagtgcattagaccgctgctattctgtctactgcaaaaagatccatgcccagtggcagaaagagggaaatgataaagattttaccttgaatgattttggcttcatgatctttcactcaccatattgtaaactggttcagaaatctctagctcggatgttgctgaatgacttccttaatgaccagaatagagataaaaatagtatctatagtggcctggaagcctttggggatgttaaattagaagacacctactttgatagagatgtggagaaggcatttatgaaggctagctctgaactcttcagtcagaaaacaaaggcatctttacttgtatcaaatcaaaatggaaatatgtacacatcttcagtatatggttcccttgcatctgttctagcacagtaagtataaatttcacctactacttaactccccttatttgggagatgttagatttctaagaccaaatctagtgtcaagcatgttggtggtagatcacagaaaattttatcttgaggctctctaatctgctattgtccattgacttgaaagatgtatgggttgaggctacagttcttccagaagtatttgttaatttcatactggctttcctggcttctgttttcatggttttttaattcttgacctacagttgaaccataaatacctggttgatgaagtaacttgttttgtggcatgactttcacaagctctgtcattccccacaagatgaaaactcacatgcctgcaatattaaaactaagttatattccctactgcaatattaacactttgagttagatcctttttatagcttcccacacgctgtagctttggatcagttaaacttctgaactattgttacaccctacataggtactcacctcagcaattagcagggaagagaattggagtgttttcttatggttctggtttggctgccactctgtactctcttaaagtcacacaagatgctacaccgggtaagtgctgaatctttcaacaagaatgtattgagaactgagtccaggcacagtggctcacacccgtaatcccagcagtttgggaggccgaggcgggcagatcacctgaggtcaggagttcgagaccagtctggctaacatggctgaaaccccatctctactaaaaatacaaaaattagccaggtgaggtggtgcatgcctgtagtcctagctacttgggaggctgaagtaggagaatcacttgaatccaggagagggaggttgtggtgagccaagatcacaccactgtgctccagcctgggtgacagagcgagactctgtcaaaaaaaaaaaaaaaaaatgtattgagaactactctggggaagttgatttagcagtcttctcaagtgagcacctgaatctgtcccacagatcattacaatattttagtcttcattacttctttcagtaggtttttactctctgccctaaaaatctatccaaaaaaaaaaaa

SEQ ID NO: 60850 - DNA, 425 bp, Homo sapiens
atagtcactggcaattttaatttgtcttcagtgtagtagagtaactgtgaactgttagagttatgaaactgacatggaaagttgtataccaaaggagtcttaggactgtccatggatactgttatgtatcatttcacttatattggcttcagcttgcgatttctctactgtaagtggtgagaattgatcagatagttaaggaaggtccttagataatgcagtatacttattaacatacagacatcaagaagcagaaatatatagacatcttcctttttggttctaatagggcttcgtgggacacatatgcaacatgcctatgatttttacaagcctgatatgctatctgaatatcctatagtagatggaaaactctccatacagtgctacctcagtgcattagaccgctgctattctgtctactg

SEQ ID NO: 60851 - DNA, 3511 bp, Homo sapiens
accgtcccgcctcccagcgactctcggcggtgccggagtcgggtgggttggcggctataaagctggtggcgaaggggaggcgccgcggactgtcctttcgtggctcactccctttcctctgctgccgctcggtcacgcttgtgcccgaaggaggaaacagtgacagacctggagactgcagttctctatccttcacacagctctttcaccatgcctggatcacttcctttgaatgcagaagcttgctggccaaaagatgtgggaattgttgcccttgagatctattttccttctcaatatgttgatcaagcagagttggaaaaatatgatggtgtagatgctggaaagtataccattggcttgggccaggccaagatgggcttctgcacagatagagaagatattaactctctttgcatgactgtggttcagaatcttatggagagaaataacctttcctatgattgcattgggcggctggaagttggaacagagacaatcatcgacaaatcaaagtctgtgaagactaatttgatgcagctgtttgaagagtctgggaatacagatatagaaggaatcgacacaactaatgcatgctatggaggcacagctgctgtcttcaatgctgttaactggattgagtccagctcttgggatggacggtatgccctggtagttgcaggagatattgctgtatatgccacaggaaatgctagacctacaggtggagttggagcagtagctctgctaattgggccaaatgctcctttaatttttgaacgagggcttcgtgggacacatatgcaacatgcctatgatttttacaagcctgatatgctatctgaatatcctatagtagatggaaaactctccatacagtgctacctcagtgcattagaccgctgctattctgtctactgcaaaaagatccatgcccagtggcagaaagagggaaatgataaagattttaccttgaatgattttggcttcatgatctttcactcaccatattgtaaactggttcagaaatctctagctcggatgttgctgaatgacttccttaatgaccagaatagagataaaaatagtatctatagtggcctggaagcctttggggatgttaaattagaagacacctactttgatagagatgtggagaaggcatttatgaaggctagctctgaactcttcagtcagaaaacaaaggcatctttacttgtatcaaatcaaaatggaaatatgtacacatcttcagtatatggttcccttgcatctgttctagcacagtactcacctcagcaattagcagggaagagaattggagtgttttcttatggttctggtttggctgccactctgtactctcttaaagtcacacaagatgctacaccggggtctgctcttgataaaataacagcaagtttatgtgatcttaaatcaaggcttgattcaagaactggtgtggcaccagatgtcttcgctgaaaacatgaagctcagagaggacacccatcatttggtcaactatattccccagggttcaatagattcactctttgaaggaacgtggtacttagttagggtggatgaaaagcacagaagaacttacgctcggcgtcccactccaaatgatgacactttggatgaaggagtaggacttgtgcattcaaacatagcaactgagcatattccaagccctgccaagaaagtaccaagactccctgccacagcagcagaacctgaagcagctgtcattagtaatggggaacattaagatactctgtgaggtgcaagacttcagggtggggtgggcatggggtgggggtatgggaacagttggaggaatgggatatctggggataattttaaaggattacatgttatgtaaatttttatgtgactgacatggagcctggatgactatcgtgtacttgggaaagtctctttgctctatttgctgacatgcttcctgttgtggtctggccaatgccaaatgtactcgaatgatgttaagggctctgtaaaacttcatacctctttggccatttgtatgcatgatgtttggtttttaaacatggtataatgaattgtgtacttctgtcagaagaaagcagaggtactaatctccaattaaaaaattttttaacatgtaagaattttgtactttgaacaacaagattacagaaagtacctgtggtttttggaaaacatttctagcttggggaatgtgacaacattccccagtgtggtaaaattggggtaaaatgtggtaaaatgtgatacgcacaaaccctttgaaaatagcataacaaacatgccctttttctaaaattgataaatcctaaagaggaagaaaagagctgggacaataaaacactggctctggaatctggaatgttaagtccaggccagcagtgacaaaagttattgtaatgacctctgaacagagaaacactgccattgaagaggcttctggtatagaaaacatggtacattcaggagctgtgaatatagctctaggtgtgctcctgaatcagttcatggtagattatgctgaacaacagtgagatgttattggaggtgtggatgagggagtttgttgttgcagtccttctttgcaccttattttaaagaataaatgaaacatttttctggttacttttttaaaaatttaaaatggaagggaagaataggggcagggcattattaggctatttctgatgcttcagtgttataaattcaacatagaggctgacaacctaaattcatggtgtaacacagctcttttccttttcctttttttttttttttgggtatctgttcaatgaaaataaggtatgacccaagtttttacctagtctgactagaagtattccacttcaaggtctgaagtaggacttttaccttaaaaaacaacaacaaacaaaactatcacacaggatagataagaagattggttaaacagttttgtgtagatctttttggtgctgaactatgacatgagccttatagattgtaaaatagggatagttggaactaatgtacagaactaaattttttaaactttatttgctgttaaattctgtgaagtttcagttatctaaaataaatatacacaaatatgaaatataatgtttcagattgcaaggtaatatgtaatagtagtgtttgtaagatactcttgtctaatattaactagtagtattttgatttgtacagtcataatttgttaaaatgacttcatttaacattcactgatgtagattaataatgtaagttctgatttaaagaatggtggcaaaatggtgcatgtaatacttttgcaagtgttggggagatcggtatgttttgaaaagagtaatttaacttttgggtgccaggaaatgggttttctcaaagtccattgccggcaatgggcaggcctgcaaatactggcacagagcattaatcatacaccttattaacggtgaggtgaataactttgaaataaagttttagagaaatgtttcaga

SEQ ID NO: 60852 - DNA, 3452 bp, Homo sapiens
accgtcccgcctcccagcgactctcggcggtgccggagtcgggtgggttggcggctataaagctggtggcgaaggggaggcgccgcggactgtcctttcgtggctcactccctttcctctgctgccgctcggtcacgcttgctctttcaccatgcctggatcacttcctttgaatgcagaagcttgctggccaaaagatgtgggaattgttgcccttgagatctattttccttctcaatatgttgatcaagcagagttggaaaaatatgatggtgtagatgctggaaagtataccattggcttgggccaggccaagatgggcttctgcacagatagagaagatattaactctctttgcatgactgtggttcagaatcttatggagagaaataacctttcctatgattgcattgggcggctggaagttggaacagagacaatcatcgacaaatcaaagtctgtgaagactaatttgatgcagctgtttgaagagtctgggaatacagatatagaaggaatcgacacaactaatgcatgctatggaggcacagctgctgtcttcaatgctgttaactggattgagtccagctcttgggatggacggtatgccctggtagttgcaggagatattgctgtatatgccacaggaaatgctagacctacaggtggagttggagcagtagctctgctaattgggccaaatgctcctttaatttttgaacgagggcttcgtgggacacatatgcaacatgcctatgatttttacaagcctgatatgctatctgaatatcctatagtagatggaaaactctccatacagtgctacctcagtgcattagaccgctgctattctgtctactgcaaaaagatccatgcccagtggcagaaagagggaaatgataaagattttaccttgaatgattttggcttcatgatctttcactcaccatattgtaaactggttcagaaatctctagctcggatgttgctgaatgacttccttaatgaccagaatagagataaaaatagtatctatagtggcctggaagcctttggggatgttaaattagaagacacctactttgatagagatgtggagaaggcatttatgaaggctagctctgaactcttcagtcagaaaacaaaggcatctttacttgtatcaaatcaaaatggaaatatgtacacatcttcagtatatggttcccttgcatctgttctagcacagtactcacctcagcaattagcagggaagagaattggagtgttttcttatggttctggtttggctgccactctgtactctcttaaagtcacacaagatgctacaccggggtctgctcttgataaaataacagcaagtttatgtgatcttaaatcaaggcttgattcaagaactggtgtggcaccagatgtcttcgctgaaaacatgaagctcagagaggacacccatcatttggtcaactatattccccagggttcaatagattcactctttgaaggaacgtggtacttagttagggtggatgaaaagcacagaagaacttacgctcggcgtcccactccaaatgatgacactttggatgaaggagtaggacttgtgcattcaaacatagcaactgagcatattccaagccctgccaagaaagtaccaagactccctgccacagcagcagaacctgaagcagctgtcattagtaatggggaacattaagatactctgtgaggtgcaagacttcagggtggggtgggcatggggtgggggtatgggaacagttggaggaatgggatatctggggataattttaaaggattacatgttatgtaaatttttatgtgactgacatggagcctggatgactatcgtgtacttgggaaagtctctttgctctatttgctgacatgcttcctgttgtggtctggccaatgccaaatgtactcgaatgatgttaagggctctgtaaaacttcatacctctttggccatttgtatgcatgatgtttggtttttaaacatggtataatgaattgtgtacttctgtcagaagaaagcagaggtactaatctccaattaaaaaattttttaacatgtaagaattttgtactttgaacaacaagattacagaaagtacctgtggtttttggaaaacatttctagcttggggaatgtgacaacattccccagtgtggtaaaattggggtaaaatgtggtaaaatgtgatacgcacaaaccctttgaaaatagcataacaaacatgccctttttctaaaattgataaatcctaaagaggaagaaaagagctgggacaataaaacactggctctggaatctggaatgttaagtccaggccagcagtgacaaaagttattgtaatgacctctgaacagagaaacactgccattgaagaggcttctggtatagaaaacatggtacattcaggagctgtgaatatagctctaggtgtgctcctgaatcagttcatggtagattatgctgaacaacagtgagatgttattggaggtgtggatgagggagtttgttgttgcagtccttctttgcaccttattttaaagaataaatgaaacatttttctggttacttttttaaaaatttaaaatggaagggaagaataggggcagggcattattaggctatttctgatgcttcagtgttataaattcaacatagaggctgacaacctaaattcatggtgtaacacagctcttttccttttcctttttttttttttttgggtatctgttcaatgaaaataaggtatgacccaagtttttacctagtctgactagaagtattccacttcaaggtctgaagtaggacttttaccttaaaaaacaacaacaaacaaaactatcacacaggatagataagaagattggttaaacagttttgtgtagatctttttggtgctgaactatgacatgagccttatagattgtaaaatagggatagttggaactaatgtacagaactaaattttttaaactttatttgctgttaaattctgtgaagtttcagttatctaaaataaatatacacaaatatgaaatataatgtttcagattgcaaggtaatatgtaatagtagtgtttgtaagatactcttgtctaatattaactagtagtattttgatttgtacagtcataatttgttaaaatgacttcatttaacattcactgatgtagattaataatgtaagttctgatttaaagaatggtggcaaaatggtgcatgtaatacttttgcaagtgttggggagatcggtatgttttgaaaagagtaatttaacttttgggtgccaggaaatgggttttctcaaagtccattgccggcaatgggcaggcctgcaaatactggcacagagcattaatcatacaccttattaacggtgaggtgaataactttgaaataaagttttagagaaatgtttcaga

SEQ ID NO: 60853 - DNA, 3367 bp, Homo sapiens
cgtgacgcgtgggtcgacccacgcgtccgtcctctgctgccgctcggtcacgcttgctctttcaccatgcctggatcacttcctttgaatgcagaagcttgctggccaaaagatgtgggaattgttgcccttgagatctattttccttctcaatatgttgatcaagcagagttggaaaaatatgatggtgtagatgctggaaagtataccattggcttgggccaggccaagatgggcttctgcacagatagagaagatattaactctctttgcatgactgtggttcagaatcttatggagagaaataacctttcctatgattgcattgggcggctggaagttggaacagagacaatcatcgacaaatcaaagtctgtgaagactaatttgatgcagctgtttgaagagtctgggaatacagatatagaaggaatcgacacaactaatgcatgctatggaggcacagctgctgtcttcaatgctgttaactggattgagtccagctcttgggatggacggtatgccctggtagttgcaggagatattgctgtatatgccacaggaaatgctagacctacaggtggagttggagcagtagctctgctaattgggccaaatgctcctttaatttttgaacgagggcttcgtgggacacatatgcaacatgcctatgatttttacaagcctgatatgctatctgaatatcctatagtagatggaaaactctccatacagtgctacctcagtgcattagaccgctgctattctgtctactgcaaaaagatccatgcccagtggcagaaagagggaaatgataaagattttaccttgaatgattttggcttcatgatctttcactcaccatattgtaaactggttcagaaatctctagctcggatgttgctgaatgacttccttaatgaccagaatagagataaaaatagtatctatagtggcctggaagcctttggggatgttaaattagaagacacctactttgatagagatgtggagaaggcatttatgaaggctagctctgaactcttcagtcagaaaacaaaggcatctttacttgtatcaaatcaaaatggaaatatgtacacatcttcagtatatggttcccttgcatctgttctagcacagtactcacctcagcaattagcagggaagagaattggagtgttttcttatggttctggtttggctgccactctgtactctcttaaagtcacacaagatgctacaccggggtctgctcttgataaaataacagcaagtttatgtgatcttaaatcaaggcttgattcaagaactggtgtggcaccagatgtcttcgctgaaaacatgaagctcagagaggacacccatcatttggtcaactatattccccagggttcaatagattcactctttgaaggaacgtggtacttagttagggtggatgaaaagcacagaagaacttacgctcggcgtcccactccaaatgatgacactttggatgaaggagtaggacttgtgcattcaaacatagcaactgagcatattccaagccctgccaagaaagtaccaagactccctgccacagcagcagaacctgaagcagctgtcattagtaatggggaacattaagatactctgtgaggtgcaagacttcagggtggggtgggcatggggtgggggtatgggaacagttggaggaatgggatatctggggataattttaaaggattacatgttatgtaaatttttatgtgactgacatggagcctggatgactatcgtgtacttgggaaagtctctttgctctatttgctgacatgcttcctgttgtggtctggccaatgccaaatgtactcgaatgatgttaagggctctgtaaaacttcatacctctttggccatttgtatgcatgatgtttggtttttaaacatggtataatgaattgtgtacttctgtcagaagaaagcagaggtactaatctccaattaaaaaattttttaacatgtaagaattttgtactttgaacaacaagattacagaaagtacctgtggtttttggaaaacatttctagcttggggaatgtgacaacattccccagtgtggtaaaattggggtaaaatgtggtaaaatgtgatacgcacaaaccctttgaaaatagcataacaaacatgccctttttctaaaattgataaatcctaaagaggaagaaaagagctgggacaataaaacactggctctggaatctggaatgttaagtccaggccagcagtgacaaaagttattgtaatgacctctgaacagagaaacactgccattgaagaggcttctggtatagaaaacatggtacattcaggagctgtgaatatagctctaggtgtgctcctgaatcagttcatggtagattatgctgaacaacagtgagatgttattggaggtgtggatgagggagtttgttgttgcagtccttctttgcaccttattttaaagaataaatgaaacatttttctggttacttttttaaaaatttaaaatggaagggaagaataggggcagggcattattaggctatttctgatgcttcagtgttataaattcaacatagaggctgacaacctaaattcatggtgtaacacagctcttttccttttcctttttttttttttttgggtatctgttcaatgaaaataaggtatgacccaagtttttacctagtctgactagaagtattccacttcaaggtctgaagtaggacttttaccttaaaaaacaacaacaaacaaaactatcacacaggatagataagaagattggttaaacagttttgtgtagatctttttggtgctgaactatgacatgagccttatagattgtaaaatagggatagttggaactaatgtacagaactaaattttttaaactttatttgctgttaaattctgtgaagtttcagttatctaaaataaatatacacaaatatgaaatataatgtttcagattgcaaggtaatatgtaatagtagtgtttgtaagatactcttgtctaatattaactagtagtattttgatttgtacagtcataatttgttaaaatgacttcatttaacattcactgatgtagattaataatgtaagttctgatttaaagaatggtggcaaaatggtgcatgtaatacttttgcaagtgttggggagatcggtatgttttgaaaagagtaatttaacttttgggtgccaggaaatgggttttctcaaagtccattgccggcaatgggcaggcctgcaaatactggcacagagcattaatcatacaccttattaacggtgaggtgaataactttgaaataaagttttagagaaatgtttcaga

SEQ ID NO: 60854 - DNA, 3400 bp, Homo sapiens
atccttaattaaattaatccccgcgccgcggactgtcctttcgtggctcactccctttcctctgctgccgctcggtcacgcttgtgcccgaaggaggaaacagtgacagacctggagactgcagttctctatccttcacacagctctttcaccatgcctggatcacttcctttgaatgcagaagcttgctggccaaaagatgtgggaattgttgcccttgagatctattttccttctcaatatgttgatcaagcagagttggaaatgggcttctgcacagatagagaagatattaactctctttgcatgactgtggttcagaatcttatggagagaaataacctttcctatgattgcattgggcggctggaagttggaacagagacaatcatcgacaaatcaaagtctgtgaagactaatttgatgcagctgtttgaagagtctgggaatacagatatagaaggaatcgacacaactaatgcatgctatggaggcacagctgctgtcttcaatgctgttaactggattgagtccagctcttgggatggacggtatgccctggtagttgcaggagatattgctgtatatgccacaggaaatgctagacctacaggtggagttggagcagtagctctgctaattgggccaaatgctcctttaatttttgaacgagggcttcgtgggacacatatgcaacatgcctatgatttttacaagcctgatatgctatctgaatatcctatagtagatggaaaactctccatacagtgctacctcagtgcattagaccgctgctattctgtctactgcaaaaagatccatgcccagtggcagaaagagggaaatgataaagattttaccttgaatgattttggcttcatgatctttcactcaccatattgtaaactggttcagaaatctctagctcggatgttgctgaatgacttccttaatgaccagaatagagataaaaatagtatctatagtggcctggaagcctttggggatgttaaattagaagacacctactttgatagagatgtggagaaggcatttatgaaggctagctctgaactcttcagtcagaaaacaaaggcatctttacttgtatcaaatcaaaatggaaatatgtacacatcttcagtatatggttcccttgcatctgttctagcacagtactcacctcagcaattagcagggaagagaattggagtgttttcttatggttctggtttggctgccactctgtactctcttaaagtcacacaagatgctacaccggggtctgctcttgataaaataacagcaagtttatgtgatcttaaatcaaggcttgattcaagaactggtgtggcaccagatgtcttcgctgaaaacatgaagctcagagaggacacccatcatttggtcaactatattccccagggttcaatagattcactctttgaaggaacgtggtacttagttagggtggatgaaaagcacagaagaacttacgctcggcgtcccactccaaatgatgacactttggatgaaggagtaggacttgtgcattcaaacatagcaactgagcatattccaagccctgccaagaaagtaccaagactccctgccacagcagcagaacctgaagcagctgtcattagtaatggggaacattaagatactctgtgaggtgcaagacttcagggtggggtgggcatggggtgggggtatgggaacagttggaggaatgggatatctggggataattttaaaggattacatgttatgtaaatttttatgtgactgacatggagcctggatgactatcgtgtacttgggaaagtctctttgctctatttgctgacatgcttcctgttgtggtctggccaatgccaaatgtactcgaatgatgttaagggctctgtaaaacttcatacctctttggccatttgtatgcatgatgtttggtttttaaacatggtataatgaattgtgtacttctgtcagaagaaagcagaggtactaatctccaattaaaaaattttttaacatgtaagaattttgtactttgaacaacaagattacagaaagtacctgtggtttttggaaaacatttctagcttggggaatgtgacaacattccccagtgtggtaaaattggggtaaaatgtggtaaaatgtgatacgcacaaaccctttgaaaatagcataacaaacatgccctttttctaaaattgataaatcctaaagaggaagaaaagagctgggacaataaaacactggctctggaatctggaatgttaagtccaggccagcagtgacaaaagttattgtaatgacctctgaacagagaaacactgccattgaagaggcttctggtatagaaaacatggtacattcaggagctgtgaatatagctctaggtgtgctcctgaatcagttcatggtagattatgctgaacaacagtgagatgttattggaggtgtggatgagggagtttgttgttgcagtccttctttgcaccttattttaaagaataaatgaaacatttttctggttacttttttaaaaatttaaaatggaagggaagaataggggcagggcattattaggctatttctgatgcttcagtgttataaattcaacatagaggctgacaacctaaattcatggtgtaacacagctcttttccttttcctttttttttttttttgggtatctgttcaatgaaaataaggtatgacccaagtttttacctagtctgactagaagtattccacttcaaggtctgaagtaggacttttaccttaaaaaacaacaacaaacaaaactatcacacaggatagataagaagattggttaaacagttttgtgtagatctttttggtgctgaactatgacatgagccttatagattgtaaaatagggatagttggaactaatgtacagaactaaattttttaaactttatttgctgttaaattctgtgaagtttcagttatctaaaataaatatacacaaatatgaaatataatgtttcagattgcaaggtaatatgtaatagtagtgtttgtaagatactcttgtctaatattaactagtagtattttgatttgtacagtcataatttgttaaaatgacttcatttaacattcactgatgtagattaataatgtaagttctgatttaaagaatggtggcaaaatggtgcatgtaatacttttgcaagtgttggggagatcggtatgttttgaaaagagtaatttaacttttgggtgccaggaaatgggttttctcaaagtccattgccggcaatgggcaggcctgcaaatactggcacagagcattaatcatacaccttattaacggtgaggtgaataactttgaaataaagttttagagaaatgtttcaga

SEQ ID NO: 60855 - DNA, 3835 bp, Homo sapiens
accgtcccgcctcccagcgactctcggcggtgccggagtcgggtgggttggcggctataaagctggtggcgaaggggaggcgccgcggactgtcctttcgtggctcactccctttcctctgctgccgctcggtcacgcttgctctttcaccatgcctggatcacttcctttgaatgcagaagcttgctggccaaaagatgtgggaattgttgcccttgagatctattttccttctcaatatgttgatcaagcagagttggaaaaatatgatggtgtagatgctggaaagtataccattggcttgggccaggccaagatgggcttctgcacagatagagaagatattaactctctttgcatgactgtggttcagaatcttatggagagaaataacctttcctatgattgcattgggcggctggaagttggaacagagacaatcatcgacaaatcaaagtctgtgaagactaatttgatgcagctgtttgaagagtctgggaatacagatatagaaggaatcgacacaactaatgcatgctatggaggcacagctgctgtcttcaatgctgttaactggattgagtccagctcttgggatggtatgttacatgcctattccccgccgtcccccaaaatttttttctaaggttcaatagacccagatgacactttaattaatgcaatacgcaaacttttgtaatttgtccttgtttggatatattaagaaagatattttacctgtctgtcattatccgaattgtgaattggttatcttatcttgtaggacaaatggtctattcaaaatttagtcagatggatgacagagccttggcagatgaattttaaaaaaaaattagagcattttctttctttatcaaagaagggaaaagcatattctggggaaaatataacagacttcagtttccatgtttggttatagtgttgaattccttcttgtgaaataacaaagaatatttttcaggacggtatgccctggtagttgcaggagatattgctgtatatgccacaggaaatgctagacctacaggtggagttggagcagtagctctgctaattgggccaaatgctcctttaatttttgaacgagggcttcgtgggacacatatgcaacatgcctatgatttttacaagcctgatatgctatctgaatatcctatagtagatggaaaactctccatacagtgctacctcagtgcattagaccgctgctattctgtctactgcaaaaagatccatgcccagtggcagaaagagggaaatgataaagattttaccttgaatgattttggcttcatgatctttcactcaccatattgtaaactggttcagaaatctctagctcggatgttgctgaatgacttccttaatgaccagaatagagataaaaatagtatctatagtggcctggaagcctttggggatgttaaattagaagacacctactttgatagagatgtggagaaggcatttatgaaggctagctctgaactcttcagtcagaaaacaaaggcatctttacttgtatcaaatcaaaatggaaatatgtacacatcttcagtatatggttcccttgcatctgttctagcacagtactcacctcagcaattagcagggaagagaattggagtgttttcttatggttctggtttggctgccactctgtactctcttaaagtcacacaagatgctacaccggggtctgctcttgataaaataacagcaagtttatgtgatcttaaatcaaggcttgattcaagaactggtgtggcaccagatgtcttcgctgaaaacatgaagctcagagaggacacccatcatttggtcaactatattccccagggttcaatagattcactctttgaaggaacgtggtacttagttagggtggatgaaaagcacagaagaacttacgctcggcgtcccactccaaatgatgacactttggatgaaggagtaggacttgtgcattcaaacatagcaactgagcatattccaagccctgccaagaaagtaccaagactccctgccacagcagcagaacctgaagcagctgtcattagtaatggggaacattaagatactctgtgaggtgcaagacttcagggtggggtgggcatggggtgggggtatgggaacagttggaggaatgggatatctggggataattttaaaggattacatgttatgtaaatttttatgtgactgacatggagcctggatgactatcgtgtacttgggaaagtctctttgctctatttgctgacatgcttcctgttgtggtctggccaatgccaaatgtactcgaatgatgttaagggctctgtaaaacttcatacctctttggccatttgtatgcatgatgtttggtttttaaacatggtataatgaattgtgtacttctgtcagaagaaagcagaggtactaatctccaattaaaaaattttttaacatgtaagaattttgtactttgaacaacaagattacagaaagtacctgtggtttttggaaaacatttctagcttggggaatgtgacaacattccccagtgtggtaaaattggggtaaaatgtggtaaaatgtgatacgcacaaaccctttgaaaatagcataacaaacatgccctttttctaaaattgataaatcctaaagaggaagaaaagagctgggacaataaaacactggctctggaatctggaatgttaagtccaggccagcagtgacaaaagttattgtaatgacctctgaacagagaaacactgccattgaagaggcttctggtatagaaaacatggtacattcaggagctgtgaatatagctctaggtgtgctcctgaatcagttcatggtagattatgctgaacaacagtgagatgttattggaggtgtggatgagggagtttgttgttgcagtccttctttgcaccttattttaaagaataaatgaaacatttttctggttacttttttaaaaatttaaaatggaagggaagaataggggcagggcattattaggctatttctgatgcttcagtgttataaattcaacatagaggctgacaacctaaattcatggtgtaacacagctcttttccttttcctttttttttttttttgggtatctgttcaatgaaaataaggtatgacccaagtttttacctagtctgactagaagtattccacttcaaggtctgaagtaggacttttaccttaaaaaacaacaacaaacaaaactatcacacaggatagataagaagattggttaaacagttttgtgtagatctttttggtgctgaactatgacatgagccttatagattgtaaaatagggatagttggaactaatgtacagaactaaattttttaaactttatttgctgttaaattctgtgaagtttcagttatctaaaataaatatacacaaatatgaaatataatgtttcagattgcaaggtaatatgtaatagtagtgtttgtaagatactcttgtctaatattaactagtagtattttgatttgtacagtcataatttgttaaaatgacttcatttaacattcactgatgtagattaataatgtaagttctgatttaaagaatggtggcaaaatggtgcatgtaatacttttgcaagtgttggggagatcggtatgttttgaaaagagtaatttaacttttgggtgccaggaaatgggttttctcaaagtccattgccggcaatgggcaggcctgcaaatactggcacagagcattaatcatacaccttattaacggtgaggtgaataactttgaaataaagttttagagaaatgtttcaga

SEQ ID NO: 60856 - DNA, 2150 bp, Homo sapiens
accgtcccgcctcccagcgactctcggcggtgccggagtcgggtgggttggcggctataaagctggtggcgaaggggaggcgccgcggactgtcctttcgtggctcactccctttcctctgctgccgctcggtcacgcttgtgcccgaaggaggaaacagtgacagacctggagactgcagttctctatccttcacacagctctttcaccatgcctggatcacttcctttgaatgcagaagcttgctggccaaaagatgtgggaattgttgcccttgagatctattttccttctcaatatgttgatcaagcagagttggaaaaatatgatggtgtagatgctggaaagtataccattggcttgggccaggccaagatgggcttctgcacagatagagaagatattaactctctttgcatgactgtggttcagaatcttatggagagaaataacctttcctatgattgcattgggcggctggaagttggaacagagacaatcatcgacaaatcaaagtctgtgaagactaatttgatgcagctgtttgaagagtctgggaatacagatatagaaggaatcgacacaactaatgcatgctatggaggcacagctgctgtcttcaatgctgttaactggattgagtccagctcttgggatggacggtatgccctggtagttgcaggagatattgctgtatatgccacaggaaatgctagacctacaggtggagttggagcagtagctctgctaattgggccaaatgctcctttaatttttgaacgagggcttcgtgggacacatatgcaacatgcctatgatttttacaagcctgatatgctatctgaatatcctatagtagatggaaaactctccatacagtgctacctcagtgcattagaccgctgctattctgtctactgcaaaaagatccatgcccagtggcagaaagagggaaatgataaagattttaccttgaatgattttggcttcatgatctttcactcaccatattgtaaactggttcagaaatctctagctcggatgttgctgaatgacttccttaatgaccagaatagagataaaaatagtatctatagtggcctggaagcctttggggatgttaaattagaagacacctactttgatagagatgtggagaaggcatttatgaaggctagctctgaactcttcagtcagaaaacaaaggcatctttacttgtatcaaatcaaaatggaaatatgtacacatcttcagtatatggttcccttgcatctgttctagcacagtactcacctcagcaattagcagggaagagaattggagtgttttcttatggttctggtttggctgccactctgtactctcttaaagtcacacaagatgctacaccggggtctgctcttgataaaataacagcaagtttatgtgatcttaaatcaaggcttgattcaagaactggtgtggcaccagatgtcttcgctgaaaacatgaagctcagagaggacacccatcatttggtcaactatattccccagggttcaatagattcactctttgaaggaacgtggtacttagttagggtggatgaaaagcacagaagaacttacgctcggcgtcccactccaaatgatgacactttggatgaaggagtaggacttgtgcattcaaacatagcaactgagcatattccaagccctgccaagaaagtaccaagactccctgccacagcagcagaacctgaagcagctgtcattagtaatggggaacattaagatactctgtgaggtgcaagacttcagggtggggtgggcatggggtgggggtatgggaacagttggaggaatgggatatctggggataattttaaaggattacatgttatgtaaatttttatgtgactgacatggagcctggatgactatcgtgtacttgggaaagtctctttgctctatttgctgacatgcttcctgttgtggtctggccaatgccaaatgtactcgaatgatgttaagggctctgtaaaacttcatacctctttggccatttgtatgcatgatgtttggtttttaaacatggtataatgaattgtgtacttctgtcagaagaaagcagaggtactaatctccaattaaaaaattttttaacatgt

SEQ ID NO: 60857 - DNA, 2153 bp, Homo sapiens
accgtcccgcctcccagcgactctcggcggtgccggagtcgggtgggttggcggctataaagctggtggcgaaggggaggcgccgcggactgtcctttcgtggctcactccctttcctctgctgccgctcggtcacgcttgtgcccgaaggaggaaacagtgacagacctggagactgcagttctctatccttcacacagctctttcaccatgcctggatcacttcctttgaatgcagaagcttgctggccaaaagatgtgggaattgttgcccttgagatctattttccttctcaatatgttgatcaagcagagttggaaaaatatgatggtgtagatgctggaaagtataccattggcttgggccaggccaagatgggcttctgcacagatagagaagatattaactctctttgcatgactgtggttcagaatcttatggagagaaataacctttcctatgattgcattgggcggctggaagttggaacagagacaatcatcgacaaatcaaagtctgtgaagactaatttgatgcagctgtttgaagagtctgggaatacagatatagaaggaatcgacacaactaatgcatgctatggaggcacagctgctgtcttcaatgctgttaactggattgagtccagctcttgggatggacggtatgccctggtagttgcaggagatattgctgtatatgccacaggaaatgctagacctacaggtggagttggagcagtagctctgctaattgggccaaatgctcctttaatttttgaacgagggcttcgtgggacacatatgcaacatgcctatgatttttacaagcctgatatgctatctgaatatcctatagtagatggaaaactctccatacagtgctacctcagtgcattagaccgctgctattctgtctactgcaaaaagatccatgcccagtggcagaaagagggaaatgataaagattttaccttgaatgattttggcttcatgatctttcactcaccatattgtaaactggttcagaaatctctagctcggatgttgctgaatgacttccttaatgaccagaatagagataaaaatagtatctatagtggcctggaagcctttggggatgttaaattagaagacacctactttgatagagatgtggagaaggcatttatgaaggctagctctgaactcttcagtcagaaaacaaaggcatctttacttgtatcaaatcaaaatggaaatatgtacacatcttcagtatatggttcccttgcatctgttctagcacagtactcacctcagcaattagcagggaagagaattggagtgttttcttatggttctggtttggctgccactctgtactctcttaaagtcacacaagatgctacaccggggtctgctcttgataaaataacagcaagtttatgtgatcttaaatcaaggcttgattcaagaactggtgtggcaccagatgtcttcgctgaaaacatgaagctcagagaggacacccatcatttggtcaactatattccccagggttcaatagattcactctttgaaggaacgtggtacttagttagggtggatgaaaagcacagaagaacttacgctcggcgtcccactccaaatgatgacactttggatgaaggagtaggacttgtgcattcaaacatagcaactgaggtaaataaaagagttcccatctccatatcttagggtttaggagacctaactgggatttagcaacataaataaatgtcagtaaagaagagtaagggctctgggagtagattctagctgtactatttccaattgtataaagtgctttgcatttgaattattaatattttaagaatatacagtaaaggccgggtgcggtggctcacgcctgtaatcccagcactttgggagactgaggcaggcagatcacgaggtcaggagatcaagaccatcctgtccaacatggtgaaaccctgtctctactaaaaatacaaaaattagttgggcttggtggcacgtgcctgtaattccagctactcaggaggctgagtcaggagaatggcttgaaccagggagtcagaggttgcagtaagctgagatcacaccactgcactccagcctggcgacagagcaagattccatctcaaaaaaaa

SEQ ID NO: 60858 - DNA, 1886 bp, Homo sapiens
accgtcccgcctcccagcgactctcggcggtgccggagtcgggtgggttggcggctataaagctggtggcgaaggggaggcgccgcggactgtcctttcgtggctcactccctttcctctgctgccgctcggtcacgcttgtgcccgaaggaggaaacagtgacagacctggagactgcagttctctatccttcacacagctctttcaccatgcctggatcacttcctttgaatgcagaagcttgctggccaaaagatgtgggaattgttgcccttgagatctattttccttctcaatatgttgatcaagcagagttggaaaaatatgatggtgtagatgctggaaagtataccattggcttgggccaggccaagatgggcttctgcacagatagagaagatattaactctctttgcatgactgtggttcagaatcttatggagagaaataacctttcctatgattgcattgggcggctggaagttggaacagagacaatcatcgacaaatcaaagtctgtgaagactaatttgatgcagctgtttgaagagtctgggaatacagatatagaaggaatcgacacaactaatgcatgctatggaggcacagctgctgtcttcaatgctgttaactggattgagtccagctcttgggatggacggtatgccctggtagttgcaggagatattgctgtatatgccacaggaaatgctagacctacaggtggagttggagcagtagctctgctaattgggccaaatgctcctttaatttttgaacgagggcttcgtgggacacatatgcaacatgcctatgatttttacaagcctgatatgctatctgaatatcctatagtagatggaaaactctccatacagtgctacctcagtgcattagaccgctgctattctgtctactgcaaaaagatccatgcccagtggcagaaagagggaaatgataaagattttaccttgaatgattttggcttcatgatctttcactcaccatattgtaaactggttcagaaatctctagctcggatgttgctgaatgacttccttaatgaccagaatagagataaaaatagtatctatagtggcctggaagcctttggggatgttaaattagaagacacctactttgatagagatgtggagaaggcatttatgaaggctagctctgaactcttcagtcagaaaacaaaggcatctttacttgtatcaaatcaaaatggaaatatgtacacatcttcagtatatggttcccttgcatctgttctagcacagtactcacctcagcaattagcagggaagagaattggagtgttttcttatggttctggtttggctgccactctgtactctcttaaagtcacacaagatgctacaccgggtaagtgctgaatctttcaacaagaatgtattgagaactgagtccaggcacagtggctcacacccgtaatcccagcagtttgggaggccgaggcgggcagatcacctgaggtcaggagttcgagaccagtctggctaacatggctgaaaccccatctctactaaaaatacaaaaattagccaggtgaggtggtgcatgcctgtagtcctagctacttgggaggctgaagtaggagaatcacttgaatccaggagagggaggttgtggtgagccaagatcacaccactgtgctccagcctgggtgacagagcgagactctgtcaaaaaaaaaaaaaaaaaatgtattgagaactactctggggaagttgatttagcagtcttctcaagtgagcacctgaatctgtcccacagatcattacaatattttagtcttcattacttctttcagtaggtttttactctctgccctaaaaatctatccaaaaaaaaaaaa

SEQ ID NO: 60859 - DNA, 1031 bp, Homo sapiens
accgtcccgcctcccagcgactctcggcggtgccggagtcgggtgggttggcggctataaagctggtggcgaaggggaggcgccgcggactgtcctttcgtggctcactccctttcctctgctgccgctcggtcacgcttgtgcccgaaggaggaaacagtgacagacctggagactgcagttctctatccttcacacagctctttcaccatgcctggatcacttcctttgaatgcagaagcttgctggccaaaagatgtgggaattgttgcccttgagatctattttccttctcaatatgttgatcaagcagagttggaaaaatatgatggtgtagatgctggaaagtataccattggcttgggccaggccaagatgggcttctgcacagatagagaagatattaactctctttgcatgactgtggttcagaatcttatggagagaaataacctttcctatgattgcattgggcggctggaagttggaacagagacaatcatcgacaaatcaaagtctgtgaagactaatttgatgcagctgtttgaagagtctgggaatacagatatagaaggaatcgacacaactaatgcatgctatggaggcacagctgctgtcttcaatgctgttaactggattgagtccagctcttgggatggacggtatgccctggtagttgcaggtcttctcaacaccataatcagaactaccctggaagctccctcaaagaatacatcctgggtttgactatcctaaactgttggaagtgccttaattgtaatgacggctgaaatgtattcttgccagttgctctgacatggattggttgatttcactcatcttgactcattacacgtgaccaggacctttcttctttccgtaaaagcggtggactttggttctcccatggtacacaatccccccaggaaccgtgcccgtgtgacaccgaggcggaggttaacaccacgtctctgacgtccaagacccaactggggcaaaacgccacggttcaaaaaagccgtagattttgg

SEQ ID NO: 60860 - DNA, 477 bp, Homo sapiens
tagcccattctggctaaatgaaacaagggggattggcagggagcttatgggaaacgttgtccttatgataaaaagagatgcataggaggaaataccccttttcttcccatgggcattgtcacgtggtacctggaactatgacaccacttagtgaccatgaagcccaagccaatacgttgaagataccatatgagccacaggagaaaagactttatgtttggtgacattactgagttgctgacttaggactacaatgccccaacttccaaaatcttgttatgtgacagtcaattccttacttacaaaatttctttaattggatctcttgttccttgcagctaaaggaattctgacaaaataaatcaaaactcaaaatgtgcatacccttggaacacaaaatgtaatttctagagctctgactcaaggaaatattcagacaagtaaacagaggtatatataacatgctatttatagtac

SEQ ID NO: 60861 - DNA, 321 bp, Homo sapiens
gtcttgtcttaactatccatatatctctatagtggtccccattttacagttggggaacagaagcttaaagagaagcaacgttgccagcccaaggtcacagtagtggcccaggatgagattgggactcaagaaatccaagagcagccaggtgcagtggctcacacctgtaatccaagccacttgagaggctgaggagggaggattgcttgagcccagaaagtcaaggctacagctagctatggttgcaccactgcacttcagcctggacaagagagagagaccctatctccaaaacaaacaggccgggtgaagtagctcacg

SEQ ID NO: 60862 - DNA, 247 bp, Homo sapiens
ggacactagtgctcagaaggtcagatttatttagagatcgcaaagataacgagttcataacaaaagacaagtgagtaattaaatatcagcaagtcacaagaataataaaccctgtattggctcctatcaaactaggcccagtgctgggcacttggactcatgatctcattcctgtgtacctttcagactctggagcgtacaaaaatgcttggaaacagcttgcaaattacaaattcattaaatgcaa

SEQ ID NO: 60863 - DNA, 537 bp, Homo sapiens
accttctttggtaacgtgaacgagtcggcggtggtgcgccatgacctgcacttccacttcactgcgcgctacatccgcatcgtgcccctggcctggaacccacgcggcaagatcggcctgaggctcggcctctatggctgcccatacaaggccgacatactctatttcgacggcgacgatgccatctcctaccgcttcccgcgaggggtcagccgaagcctgtgggacgtgttcgccttcagcttcaagaccgaggagaaggacggtcttctgctgcacgccgagggcgcccagggcgactacgtgacgctcgagctggagggggcacacctgctgctgcacatgagcctgggcagcagccctatccagccaagaccaggtcacaccaccgtgagcgcaggcggagtcctcaatgaccagcactggcactatgtgcgggtggaccgatttggccgcgatgtaaatttcaccctggacggctatgtgcagcgctttattctcaatggagacttcgagaggctgaacctggacactgag

SEQ ID NO: 60864 - DNA, 366 bp, Homo sapiens
cctcccaggctcatgtgcagcagcaggtgtgccccttccagccgaagcctgtgggacgtgttcgccttcagcttcaagaccgaggagaaggacggtcttctgctgcacgccgagggcgcccagggcgactacgtgacgctcgagctggagggggcacacctgctgctgcacatgagcctgggcagcagccctatccagccaagaccaggtcacaccaccgtgagcgcaggcggagtcctcaatgaccagcactggcactatgtgcgggtggaccgatttggccgcgatgtaaatttcaccctggacggctatgtgcagcgctttattctcaatggagacttcgagaggctgaacctggacactgag

SEQ ID NO: 60865 - DNA, 885 bp, Homo sapiens
agactggcaccagtccatggcctactcattgagtggcactcctccaaacctatctttaccagttactgcaactctagccaatctctgaccaacccctcctatctttcacagctcattctttctagaaggtactcttcagtcccactggcccacactgatcttatcaccatgtcactatcccacttccctaatatttatctttctttcttgctcagcttaaatttcatgacttatcattgtaattactcccttgcatacaccctcaacttccttgtccctctcttacttcctcgtatttgttaaatccagctctctgcctggtccatgaactgcacctgtgcaccctgaatgtggcctagagacagcacacaagcatcctcactggctttgctttaaattcatgactatgaacctcaagtggactcttaatgacatctggcagttatacttacatttcctttgtccatttagtttcccactatcctaggtcattattttgcactttgtactctcccttcaaaattctgacactattcccctcctcctcactttcagctgatgaccctgcttcttgctttactgtcaaaattgcagcaatccagccgggcacggtggctcatgcctgtaatcctagcactttgggagaccgaagcgggtggattgcttaagcctaggagctcgagactagcctgggcaacatggcgataccccctcgctgctaaaaatacaaaaaattagctgggtgtggtggcacacacctgtggtctcagccactccggaggctaaggtgggaggatcatctgagcccaggaagtcaaggctgcagtgagccatgatctagccactgcactccagcctgggtgacaaaaatgagaccctttctca

SEQ ID NO: 60866 - DNA, 493 bp, Homo sapiens
ctagtggattaccaaaatattccagctgatctcgtgctcccaacttcatctgcactagtcttccttcggctccttggacatgctaagctcatttaccttttaggttccctctgcccgcaagatgtttacatggctgttatatcatctagatcttagctaggacaggatcttctcagggagacctttatgaccacccaatagaaagcaaccagggccaggcacggtggctcacgcctgtaatcccagcactttgggaggccaaggtgggcggatcacgaggtcaggagattgagaccatcctgactaacatggtgaaaccccatctgtactaaaaatacaaaaaattacactggtgtggtggcacatgcctgtagtcccagctacttgggaggctgaggcaggagaatcgcttgaacccgggaggtggaggttgcagtagctgagatcacgccactgcactccagcctggtgacagagtgaaactccgtctcaa

SEQ ID NO: 60867 - DNA, 467 bp, Homo sapiens
ggcacaatcaagggtgaatggggcaggaaggatgggcttcttgtcttccaaactaaagcttttgtgtctgagagcaaacctagctgcaaaggggcggcaaatagagaaacctggggtggtggtaaagaaatattcccagcaggaaaaccagagagcttgtctgacaagcatttgttaactgaattgatctgattactcaggacttttcttagccaggactgggggcagagaggggctgcagttgcttttcattctatttaatttctgttttccaagaatgaatatcaagggagcagctttgattaaacaagcctttaaaaagggggagaaaatgccaggttttacagagagccttgctgagtcgctggcaaatggccacatgacacaatatttttagtctttggatattatctcctctctaagtacaaaactgctattcccattaacacagctcttaggttcagaga

SEQ ID NO: 60868 - DNA, 571 bp, Homo sapiens
aagagaaatgtaaacagacatttacacaaaggctagcatgtaaatgttcatagcagcactattcctaatagccaaaaagtggaagcaacccaaacatcaatcaacactacagtggaatactattcaataatagaaaggagggaaatactgatgcatgctacaacatgggtgactctcaaaaaaattatgctcagtgaaagaagccagacacaaaagaccacatagtctatggttctatttatatgaaatgtccagaaaaggcaaatctatatagacagaaaatagattaatgattgcctggggctgggggtgggaatggagactgattataactgggcacgggtaatctttttgaggtggtagattttattgaggtgatggaaatgttccaaaactggattgggtgatagttgcatgcgtttgtaaatttatttaaaaatcattaaattatattattaaaaagaacattgttaatgatagcatatatctaaatgtaaacaatttttgtgcatataaagcatttagcacagtgtttgaaatataacagctcaataaatgtagttaactttga

SEQ ID NO: 60869 - DNA, 344 bp, Homo sapiens
gtttcctcaagcctaacaagatggtggcttcctgcttagcaggtggtcttccaggaacccaaagccccggacccaatagtgggttcaacagaactatccagcagctgcttcaccagagtgtgtgaggtggaagagaagagagaaggacagaagcagcccatggcactgatgagaacactccattctcctcaacccccaggaaaaaaaaacacttgagagacaaggcctgatagaaaacaaatttttgagaacaatgtccccagatagcgcagaaagctgccaaaggagttcctcgtgctctcctatgaagcagtgtgtctccgctatagactgaatgtttgtgt

SEQ ID NO: 60870 - DNA, 1124 bp, Homo sapiens
agttttgctaccttgctcaggctggtctcaaattcctggcctcaaatgatcctcctgcctaggtctcccaaggtgctgggattacaggcgtgagccactacagtatgcaggaacctaaaatatctgtccagcctgggcgacggagcgagactctgtctcaaaacaaacaaacaaacaaaagacccaatctgagtcttatcgttgtactgatagaagggtcagatatccccacatggagttgagtgggagaaagagattcactagagaataactccttagagaccaatgtctgtagcaggtgtacagcatcttgtgaaagttatggagcatgaaaagactgaagggccaggacagtttgcatgggctgagttataccagctagaccaggaatagaacaaagaattctatacctcaggatttcaaaaagttagcaacttgagaggccagtgctgagcaacccagtacccaggaaatgaaaaaaagaaagaaaattccctccgagaatgaacaaatcattggcttcattgcctcatgagcttgagagaaaggagaagagagccagagtgtggcaagtgaggccaaaatcagaagcatggcagaaatgagtgtaagtgattgagccacagacagaagtgtggcgagggacaatgccatattgggagaaggtaaagttgagtaacaagaaaccaaccgtgtgtgagagggggattggaaaaaaatttgagggagaagaatgttagaatggaagggaatgatggtggaagggaggtgtgagggtgtgtgctgagtgttgaaagaacggttggtgtctgtgtgattttccttgagtctgttcttcagtgtgtcttctgcagcttgccatgactgcctgggaaagagtagggaaatacccagagccaaaacctcctttcagtcccaccccatccctcaaaaccccagctattgcttcttttcagcttcaggtcctgatctccaatcttagtatggactcccttctcaccaagaccaccaccagctacgtttgctgtgtaatctggaaagtgataatttcctttgcttgttgggtgtgagtcacaatactttggtttgtgcacaagaataaatttatgccccataccttctgt

SEQ ID NO: 60871 - DNA, 1032 bp, Homo sapiens
ggttttggagaccagagtcttcgctccgtcgcccaggctggagtgcagtggcgcgagactctgtctcaaaacaaacaaacaaacaaaagacccaatctgagtcttatcgttgtactgatagaagggtcagatatccccacatggagttgagtgggagaaagagattcactagagaataactccttagagaccaatgtctgtagcaggtgtacagcatcttgtgaaagttatggagcatgaaaagactgaagggccaggacagtttgcatgggctgagttataccagctagaccaggaatagaacaaagaattctatacctcaggatttcaaaaagttagcaacttgagaggccagtgctgagcaacccagtacccaggaaatgaaaaaaagaaagaaaattccctccgagaatgaacaaatcattggcttcattgcctcatgagcttgagagaaaggagaagagagccagagtgtggcaagtgaggccaaaatcagaagcatggcagaaatgagtgtaagtgattgagccacagacagaagtgtggcgagggacaatgccatattgggagaaggtaaagttgagtaacaagaaaccaaccgtgtgtgagagggggattggaaaaaaatttgagggagaagaatgttagaatggaagggaatgatggtggaagggaggtgtgagggtgtgtgctgagtgttgaaagaacggttggtgtctgtgtgattttccttgagtctgttcttcagtgtgtcttctgcagcttgccatgactgcctgggaaagagtagggaaatacccagagccaaaacctcctttcagtcccaccccatccctcaaaaccccagctattgcttcttttcagcttcaggtcctgatctccaatcttagtatggactcccttctcaccaagaccaccaccagctacgtttgctgtgtaatctggaaagtgataatttcctttgcttgttgggtgtgagtcacaatactttggtttgtgcacaagaataaatttatgccccataccttctgt

SEQ ID NO: 60872 - DNA, 344 bp, Homo sapiens
cgtgctttcccacagagaccgttcttgttacctccaaaatctcatgattccccctctagttatatttcttccctctcctccaccattttgattcctgatctatagaactttgtgtctctcagtttggagtggaggctaaggacatgagagttgagagtctgacatccctgagtgtccaatatcccaggaattccagatgcgtgcctaggatcctatgctttcctcaattctccacttatctccccctcccttcccataatgctggatgagactgtagctactggctcagagatatttttagtcaagtcagaccacattgtctactggggtggggttgggggcag

SEQ ID NO: 60873 - DNA, 402 bp, Homo sapiens
tttagtcaagtcagaccacattgtctactggggtggggttgggggcagggaaggcaggtgcccacatccatcacaccggcacttgtggggcagcccagagaagggagagggccaggctccaaaaatagcacagtgagctcattcagctgccagctctggggacaagacaaaggggctttaaaaggcgtggggggtggctcaagctggtcctgctccagccaacaccgcctttctcagcatggagacctttgagcccatcagccaagagcccctcagccaagccagctatgacaaagccccagacccagttcctgagctccaagactcgttctatgcaggtactaccctcccatatctatgagagtctggggtctagaatggaggggaagatgtcaatagttt

SEQ ID NO: 60874 - DNA, 4126 bp, Homo sapiens
agccaacaccgcctttctcagcatggagacctttgagcccatcagccaagagcccctcagccaagccagctatgacaaagccccagacccagttcctgagctccaagactcgttctatgcagaactgcaacgtgcagagagcctccaagagaagagcataaaagaggccaagaccaaatgcaggacaattgcatccctgctcactgcagcccccaacccccactccaaaggggtacttatgtttaagaaacggcggcagagagccaagaagtacaccctggtgagcttcggggctgctgctgggacaggcgctgaggaggaggacggcgttccccccacgagtgagtccgagctggacgaagaagccttctctgacgcccgcagcctcaccaatcaatctgactgggacagtccctatctggacatggagcttgccagggcgggctcaagagcatcagagggccagggctctgggctgggagggcagctgagtgaggtctctgggcgaggggtgcagctctttgaacagcagcgccagcgcgcagactccagcacccaggaactggcacgggtcgaaccagcagccatgctcaacggggaaggcctgcagtcaccacctcgggcccagagtgctcccccagaggcagctgtgctcccacccagccccttgccggcgcctgtagccagccccagacccttccaaccaggtggtggagccccgaccccagctccaagcatctttaaccggtcagccaggccctttaccccgggcctacaagggcagcggccaactaccacctcggttattttccggcctttagcccccaaaagggcgaacgacagcctggggggcctcagccccgccccaccccccttcttgtcttcgcaggggcccacccctctgcccagcttcacttcaggggttcccagccacgcgccagtctctggttcccccagcaccccacgctcctcgggccctgtgacagccaccagctccctgtacatcccagcccctagtcggcctgtcaccccaggtggagctccagagccccccgctcctcctagcgcagctgccatgacctccaccgcttctatcttcctatctgcgcctttgcgaccctctgcgcgcccagaggcgcctgccccaggcccaggggctcctgagccccccagcgctcgcgagcagcgcatctctgtgccagctgcccgcacgggtatcctgcaggaggcccggcgccgggggacccggaagcagatgttccggccgggaaaggaggagacgaagaactcgcccaaccccgagctgctatcgctggtacagaacctggatgaaaagcctcgggccgggggtgcagaatctggtcctgaagaagatgctctgagcctcggggctgaagcctgcaacttcatgcagccagtaggggccaggagttacaagaccctgcctcacgtgacacctaagaccccccctccaatggctcccaagaccccgccccctatgactcctaagactccacccccagtggctcctaagcccccatctcgagggctccttgatgggctcgtgaatggggcagcctcttcggctggaacccctgagccaccaaggctgcagggcaggggtggggagctgtttgctaagcggcagagccgtgcggacaggtatgtggtggaaggtacacctggtcctggtcttggccctcggcctagaagtccttctcctaccccgtctctgcccccttcctggaaatattcacccaacatccgtgccccgcctcctattgcttacaacccactgctctctccctttttcccccaggcggcccgaactctccctaaggcccaatcccaggggcctcgggcaacacccaagcagggcatcaaggctctagattttatgcggcatcagccctatcaacttaaaactgccatgttctgttttgatgaggttcccccgactcctggccctatcgcctcagggtcccccaaaactgcccgagtccaggagattcgccggttttccactccggcaccccagcccactgcagaacccctggctcccactgtgcttgccccccgagcagccactacactggatgagcccatctggagaacagaactggcctcagcccctgttcctagcccagcccctcctccagaggctcccaggggccttggggcttctcccagctcctgcggtttccaggtagccaggccccgattttcagccaccagaacaggattgcaagctcatgtgtggaggcctggggcagggcaccagtgaacaggcacaggtcccaggaccaaggagaggtggaacatccagttcctaaagttgcttctcctaccctatcccatcccctgtcacgcatctggaagctaaattgcctcctgccagagatggtttccaagttgatgtccccttcccccaccttcctcctcactctctacctccctgccgctttccaaccaagtatgtctgctttggtatctttgcctctctttgtctctgcatttcctttcctggatctctgtctttatttccaggcttctccacccatattcctccacagatctctcttccttgacatttgtgcttttctccctgggcctcattttaatgttcagtgagaagtaaacagagcagaagtgaccactgggacttcaggcaagaagctcaccaccaggcacacagcaaagggactgaactgacccctgtttgcactaagccacccccaccccccactctgctttcccaagcttgactggcatatacctaggcctgtgtgtgtgtgtgtgtgtgtgtgtgtgtgtgtgtgtgtgtgctcttccgtctaaggcatgaataagaggggaggtcaaaataaagacccaatctgaggccgggcacggtggctcacgccggtaatcccagcactttgggaggccgaggcgggcggatcacgaggtcaggagatcgagaccatcctggctaacacggtgaaaccccatttccactaaaaatacaaaaaattagctgggcgtggtggcgagcgcctgtagtcccagctactcgggaggctgaggcaggagaatggcatgaacctggaaggcggagcttgcagtgagctgagattgcgccactgcactccagcctgggcgacggagcgagactctgtctcaaaacaaacaaacaaacaaaagacccaatctgagtcttatcgttgtactgatagaagggtcagatatccccacatggagttgagtgggagaaagagattcactagagaataactccttagagaccaatgtctgtagcaggtgtacagcatcttgtgaaagttatggagcatgaaaagactgaagggccaggacagtttgcatgggctgagttataccagctagaccaggaatagaacaaagaattctatacctcaggatttcaaaaagttagcaacttgagaggccagtgctgagcaacccagtacccaggaaatgaaaaaaagaaagaaaattccctccgagaatgaacaaatcattggcttcattgcctcatgagcttgagagaaaggagaagagagccagagtgtggcaagtgaggccaaaatcagaagcatggcagaaatgagtgtaagtgattgagccacagacagaagtgtggcgagggacaatgccatattgggagaaggtaaagttgagtaacaagaaaccaaccgtgtgtgagagggggattggaaaaaaatttgagggagaagaatgttagaatggaagggaatgatggtggaagggaggtgtgagggtgtgtgctgagtgttgaaagaacggttggtgtctgtgtgattttccttgagtctgttcttcagtgtgtcttctgcagcttgccatgactgcctgggaaagagtagggaaatacccagagccaaaacctcctttcagtcccaccccatccctcaaaaccccagctattgcttcttttcagcttcaggtcctgatctccaatcttagtatggactcccttctcaccaagaccaccaccagctacgtttgctgtgtaatctggaaagtgataatttcctttgcttgttgggtgtgagtcacaatactttggtttgtgcacaagaataaatttatgccccataccttctgt

SEQ ID NO: 60875 - DNA, 267 bp, Homo sapiens
gccatttgggttcccaaggtacttgctttagttggcatttcatcatcaccaaccacaggtgatagcctgattaactgtgatgcccctgcatatgtgggattattaccaaactagttcctgcttgagccctatactcaagcctaaggacacaacgaaaagcaattctgaatcccatttttgtgtgcctgtctcctatgaccactgccactaccagtcctgtatcagaggacagaaaccacacagtaatttgaatatggaaagtttaac

SEQ ID NO: 60876 - DNA, 383 bp, Homo sapiens
gtgcactgtgcagctcatggtgttatgggaacttagtgatcttggccagataccgagttaggggtaatcagaaattagaaatgactggactgttaatatttacattgtgctcagctggtttataaaagtacactaacttcctcctatgtccaccccaatctcttacatcaaaatttccagggtcagggcttgggaacttgtattttaaaaaatgatccccaggactttctgggtgttgggaatgttctcatattttaatctatggttgttacatagtgtgtatgtgttaaaatccctcaggatgtacatttaagttctatacacatcattctaatattgcattctctcaaatgttacaccctaattttaaaagttcctccaaa

SEQ ID NO: 60877 - DNA, 2848 bp, Homo sapiens
aatcatccagttttctaaattatggaaattttgtggaagacgttgacctggattttgagcctcatcatggcttcatcggaatttcatagtgaccacaggctttcatacagttctcaagaggaattcctgacttatcttgaacactaccagctaactattccaataagggttgatcaaaatggagcatttctcagctttactgtgaaaaatgataaacactcaaggagaagacggagtatggaccctattgatccacagcaggcagtatctaagttattttttaaactttcagcctatggcaagcactttcatctaaacttgactctcaacacagattttgtgtccaaacattttacagtagaatattgggggaaagatggaccccagtggaaacatgattttttagacaactgtcattacacaggatatttgcaagatcaacgtagtacaactaaagtggctttaagcaactgtgttgggttgcatggtgttattgctacagaagatgaagagtattttatcgaacctttaaagaataccacagaggattccaagcattttagttatgaaaatggccaccctcatgttatttacaaaaagtctgcccttcaacaacgacatctgtatgatcactctcattgtggggtttcggatttcacaagaagtggcaaaccttggtggctgaatgacacatccactgtttcttattcactaccaattaacaacacacatatccaccacagacagaagagatcagtgagcattgaacggtttgtggagacattggtagtggcagacaaaatgatggtgggctaccatggccgcaaagacattgaacattacattttgagtgtgatgaatattgttgccaaactttaccgtgattccagcctaggaaacgttgtgaatattatagtggcccgcttaattgttctcacagaagatcagccaaacttggagataaaccaccatgcagacaagtccctcgatagcttctgtaaatggcagaaatccattctctcccaccaaagtgatggaaacaccattccagaaaatgggattgcccaccacgataatgcagttcttattactagatatgatatctgcacttataaaaataagccctgtggaacactgggcttggcctctgtggctggaatgtgtgagcctgaaaggagctgcagcattaatgaagacattggcctgggttcagcttttaccattgcacatgagattgttcacaattttggtatgaaccatgatggaattggaaattcttgtggacgaaaggtcatgaagcagcaaaattatggcagctcacattactgcgaataccaatcctttttcctggtctgcttgcagtcgagactacatcaccagctttttagagaagtgtgtagagagctctggtgtctcagcaaaagcaaccgctgtgtcaccaacagtattccagcagctgaggggacactgtgtcaaactgggaatattgaaaaagggtggtgttatcagggagattgtgttccttttggcacttggccccagagcatagatgggggctggggtccctggtcactatggggagagtgcagcaggacctgcgggggaggcgtctcctcatccctaagacactgtgacagtccagcaccttcaggaggtggaaaatattgccttggggaaaggaaacggtatcgctcctgtaacacagatccatgccctttgggttcccgagattttcgagagaaacagtgtgcagactttgacaatatgcctttccgaggaaagtattataactggaaaccctatactggaggtggggtaaaaccttgtgcattaaactgcttggctgaaggttataatttctacactgaacgtgctcctgcggtgatcgatgggacccagtgcaatgcggattcactggatatctgcatcaatggagaatgcaagcacgtaggctgtgataatattttgggatctgatgctagggaagatagatgtcgagtctgtggagggggcggaagcacatgtgatgccattgaagggttcttcaatgattcactgcccaggggaggctacatggaagtggtgcagataccaagaggctctgttcacattgaagttagagaagttgccatgtcaaagaactatattgctttaaaatctgaaggagatgattactatattaatggtgcctggactattgactggcctaggaaatttgatgttgctgggacagcttttcattacaagagaccaactgatgaaccagaatccttggaagctctaggtcctacctcagaaaatctcatcgtcatggttctgcttcaagaacagaatttgggaattaggtataagttcaatgttcccatcactcgaactggcagtggagataatgaagttggctttacatggaatcatcagccttggtcagaatgctcagctacttgtgctggaggtaagatgcccactaggcagcccacccagagggcaagatggagaacaaaacacattctgagctatgctttgtgtttgttaaaaaagctaattggaaacatttcttgcaggtttgcttcaagctgtaatttagcaaaagaaactttgctttaattatattatattccatttgttttcaacctcatgtaatttgtgcagatttgttggtaaaatacatcttggcacaatgagtgtctctgctggtgcttctcccaagactatcttgaaggtgggctgtttgcctttcgtgaacacattcttggtaaagaacatcaaaagttttaaaaaagaaaatgagcaagaatcagacatcacagatgcaacttcttgtaatgggagatgagaatgtacggctgtg

SEQ ID NO: 60878 - DNA, 1859 bp, Homo sapiens
ctagaggatccccccaccggcaggttgtactcctggattttgagcctcatcatggcttcatcggaatttcatagtgaccacaggctttcatacagttctcaagaggaattcctgacttatcttgaacactaccagctaactattccaataagggttgatcaaaatggagcatttctcagctttactgtgaaaaatgataaacactcaaggagaagacggagtatggaccctattgatccacagcaggcagtatctaagttattttttaaactttcagcctatggcaagcactttcatctaaacttgactctcaacacagattttgtgtccaaacattttacagtagaatattgggggaaagatggaccccagtggaaacatgattttttagacaactgtcattacacaggatatttgcaagatcaacgtagtacaactaaagtggctttaagcaactgtgttgggttgcatggtgttattgctacagaagatgaagagtattttatcgaacctttaaagaataccacagaggattccaagcattttagttatgaaaatggccaccctcatgttatttacaaaaagtctgcccttcaacaacgacatctgtatgatcactctcattgtggggtttcggatttcacaagaagtggcaaaccttggtggctgaatgacacatccactgtttcttattcactaccaattaacaacacacatatccaccacagacagaagagatcagtgagcattgaacggtttgtggagacattggtagtggcagacaaaatgatggtgggctaccatggccgcaaagacattgaacattacattttgagtgtgatgaatattgttgccaaactttaccgtgattccagcctaggaaacgttgtgaatattatagtggcccgcttaattgttctcacagaagatcagccaaacttggagataaaccaccatgcagacaagtccctcgatagcttctgtaaatggcagaaatccattctctcccaccaaagtgatggaaacaccattccagaaaatgggattgcccaccacgataatgcagttcttattactagatatgatatctgcacttataaaaataagccctgtggaacactgggcttggcctctgtggctggaatgtgtgagcctgaaaggagctgcagcattaatgaagacattggcctgggttcagcttttaccattgcacatgagattgttcacaattttggtatgaaccatgatggaattggaaattcttgtggacgaaaggtcatgaagcagcaaaattatggcagctcacattactgcgaataccaatcctttttcctggtctgcttgcagtcgagactacatcaccagctttttagagaagtgtgtagagagctctggtgtctcagcaaaagcaaccgctgtgtcaccaacagtattccagcagctgaggggacactgtgtcaaactgggaatattgaaaaagggtggtgttatcagggagattgtgttccttttggcacttggccccagagcatagatgggggctggggtccctggtcactatggggagagtgcagcaggacctgcgggggaggcgtctcctcatccctaagacactgtgacagtccagcaccttcaggaggtggaaaatattgccttggggaaaggaaacggtatcgctcctgtaacacagatcagattataaggagatacagttaacataactatattatggatacatatatatttatgttttcttcattaatattgactctactagctcagaacttgaggcaattctgctgtcatactaaaatgtattttcatgctatccaagttaataaagttgtctgaatgtaatt

SEQ ID NO: 60879 - DNA, 456 bp, Homo sapiens
gccatttttattcttttcggcactatttactttaagaaaatgtagtatttttaacactactattccttggggatgaagaaaaacaaaatgtttaaagctagttcaagggtctttttaatgtattttaaatttttgaatagattatacattacatagttaaaatattcaaagaatataaaggatgtgtatgaaaagttaacctttctccatcctctgcccctcattttcccgtttctagttgccctttacagagataaccatgattactcatttcttatgtatcctttccgagacaaacatatgctcgtatacatatagtatttacgttcatctctccccctttacacaaatagtattatggcatattacacactgtctgtatgttcttttcctcacatagctatgtatcttggaaaatgttccaaatgagtatgtatagaaatagctgcattttat

SEQ ID NO: 60880 - DNA, 421 bp, Homo sapiens
gatttccaatcagagacggtcaagttggcaagtgtccccctcttgctcattttttccctgttagctccattgacaacataggccgtatccaaaccacctttgttcagtgctttggctgtaatcacctctccggtttccaggcctcttctctttaggcttttcaggctgctcactagccaaaccaacagaatgtgctgaagagaaggagaaagaggaagaagagaaagcaagccaaggacctcttttgcaaattgatgatggcttgaaatcaatttatttggaaaaatagtcagactacagaaaaaaacatccttgcaacattttcaatccaaaaaagatggcagtatcattccttcaaagttcagcaaatatttgataagtacaacaataattataataaatttcatgaccctacttggta

SEQ ID NO: 60881 - DNA, 382 bp, Homo sapiens
agaaacacatccgacttccagagcacccagacaatgacccactcaagcctttagaagacacgaaggtatgacgtatttatttttaaatgttggctataaatgatcagactgcctacttgactagggtggtcttcccagctcaatttccacagagaatgctgaagtgtgagttaggtataacaaggggacattttctgaagcgtggatcaagaagaatttaagtggtgtaaagttgttttccttcaggggctatgtcacactggacagtactgttagactatacacctggatggaatccatgagagaaggaaacttgccttaggtgaccataggattcagccagttattaaccaaactttttcagttagtgtattcagactcc

SEQ ID NO: 60882 - DNA, 476 bp, Homo sapiens
gtttctttttgcctttttaatgtagccactagaaaatttaaaatttcacacatgactcatactatatttctgttgtacagcactatgctaaagaatgaacagcagttttctagacttgcttactactggtagatacataggtcacaataggctcatcacttccctttggagggagctatggattggtgtgattaagagaacaggctgtttaggttcaaatcctgaagccaccatgcctgtcattaggtaagtttcctttctaaacctcagcttcctcacccacaaaataagaatattggtatcagggccgggaaaggtggctcacgcctgtaatcccagaactttgagaggtgggagtgggcggatcacctgaggtctggagttcgagtccagcctgaccaacatggagaaatcccgtctctactaaaaatacaaaattagccggatatggtggcacatgcctgtaatcccagcta

SEQ ID NO: 60883 - DNA, 103 bp, Homo sapiens
agatcttatttctataggcaagatcagacttactaagtatgccacaactaacagctgattcattcattctatgtgtgccactaaataaagagattgagcaagt

SEQ ID NO: 60884 - DNA, 495 bp, Homo sapiens
ggaagcatgagcaggagggttccgaggaggatatcttgcagctcttactatcgagatgcaggtggtaactcctttttatcccaagccccagagccacccacatgtttcacttcctttaaaagagatcctaaaattgtttgcttctccactctggtctcttaccactgcttttttctgttgtagggagaagagagtgaagggagaatgttccttttatgcctcgcccctttaaactgcataattgtgtcagtaactgggtttcctgtacaactgtgccccatgttccaaggccagaaagtagaatagcacagatgttacccaaaagctgagttgggtaacagtcagaaaccaatagctaaccaggaataaagccatacaagagagcaggactgtgctgttactcagcccactttttctagataagatctcacacatgcaaagtagggcacttgcctacatttaataattcttccattaataaatgggaaggttcta

SEQ ID NO: 60885 - DNA, 534 bp, Homo sapiens
aagtatcaaaacacatggaccctttatagagattaaagggctttggattaaaaggtttgaagtagttgaaacctttacagaaacaaaagcaacatgtcattactttcccattaaaaatttcaaatgaacaccctcagttaatgctttgctgccatatctttttttccctttggaaatccaaaagcctgtgaatctggtccatgtcaattattttgtttacaggatattgcattactaaacccaaggtgatctccaagttggagaaaggagaagagccatggtctttagaagatgaattcctgaaccagaggtacccaggtgagtgggcattaacagaaggagccccctgggggtacttagtctttagagggagagcacctttgaaagtttttttggaacagctttattgagatataattcacatgcctacaattcactcctttaaagtgtacaggtcagtgacttcaagcaaccacagatcaaaactattcagggaagaaatattgcactttcattcaacatgtatagacattt

SEQ ID NO: 60886 - DNA, 655 bp, Homo sapiens
ctcgaccaggaagtccagctggcttcacctctcaggcacatgaataggattacatgctccttgattacagtggggttatgtcgcagtaaaaccattatcaagtcgaaccatctcatgtcagggaccatctctgtaagaactgagaggcagaccaggtctctcatgaccccactgctctttcctcctccccagctgaacctccacagtcctctacactcttccaggagcagcagaaaatgaacatgtctcaggcatcagtgtcattccaggacgtgactgtggaattcacccgggaggagtggcagcacctgggccctgtcgagaggacgctgtacagagatgtgatgctggagaactacagccacctcatctcagtgggatattgcattactaaacccaaggtgatctccaagttggagaaaggagaagagccatggtctttagaagatgaattcctgaaccagaggtacccagggtattttaaagttgatcacatcaaagggatccgggaaaaacaagaaaaacttctgtggcaagaaatattcatcagtgatgctgacaaaacattgagtaaagaaggacagaaagttttagaaaaaccatttaatctggaaatagctccagagctttcagaaaaaatatcctgtaaatgtga

SEQ ID NO: 60887 - DNA, 2782 bp, Homo sapiens
ggcccggctgtggtcgctgcgtgtgaggcccctggagccaggcagccctttacagaccctatccaacttccagacctgccgagccagctcccagctccttccctcatgcgtgtgcgcttactgggtgctaggcactgtgtttagcaccatgctcagacggggagcgtcgcaggccttccttgcctagtggtggaaggaaatgttaaccatagggttgcagggaaacgtagcgttgctgcggacacgggctcagcaaggcctctgcaagtgtgcggtgagagcccctctggggttcagggaagtcttcccagggaaatgatgctggcctgggtaactatggaaccccagtagtgagaaagggtcgctgttcctgcatcagcaccaaccaagggactatccacctacaatccttgaaagaccttaaacaatttgccccaagcccttcctgcgagaaaattgaaatcattgctacactgaagaatggagttcaaacatgtctaaacccagattcagcagatgtgaaggaactgattaaaaagtgggagaaacaggtcagccaaaagaaaaagcaaaagaatgggaaaaaacatcaaaaaaagaaagttctgaaagttcgaaaatctcaacgttctcgtcaaaagaagactacataagagaccacttcaccaataagtattctgtgttaaaaatgttctattttaattataccgctatcattccaaaggaggatggcatataatacaaaggcttattaatttgactagaaaatttaaaacattactctgaaattgtaactaaagttagaaagttgattttaagaatccaaacgttaagaattgttaaaggctatgattgtctttgttcttctaccacccaccagttgaatttcatcatgcttaaggccatgattttagcaatacccatgtctacacagatgttcacccaaccacatcccactcacaacagctgcctggaagagcagccctaggcttccacgtactgcagcctccagagagtatctgaggcacatgtcagcaagtcctaagcctgttagcatgctggtgagccaagcagtttgaaattgagctggacctcaccaagctgctgtggccatcaacctctgtatttgaatcagcctacaggcctcacacacaatgtgtctgagagattcatgctgattgttattgggtatcaccactggagatcaccagtgtgtggctttcagagcctcctttctggctttggaagccatgtgattccatcttgcccgctcaggctgaccactttatttctttttgttcccctttgcttcattcaagtcagctcttctccatcctaccacaatgcagtgcctttcttctctccagtgcacctgtcatatgctctgatttatctgagtcaactcctttctcatcttgtccccaacaccccacagaagtgctttcttctcccaattcatcctcactcagtccagcttagttcaagtcctgcctcttaaataaacctttttggacacacaaattatcttaaaactcctgtttcacttggttcagtaccacatgggtgaacactcaatggttaactaattcttgggtgtttatcctatctctccaaccagattgtcagctccttgagggcaagagccacagtatatttccctgtttcttccacagtgcctaataatactgtggaactaggttttaataattttttaattgatgttgttatgggcaggatggcaaccagaccattgtctcagagcaggtgctggctctttcctggctactccatgttggctagcctctggtaacctcttacttattatcttcaggacactcactacagggaccagggatgatgcaacatccttgtctttttatgacaggatgtttgctcagcttctccaacaataagaagcacgtggtaaaacacttgcggatattctggactgtttttaaaaaatatacagtttaccgaaaatcatataatcttacaatgaaaaggactttatagatcagccagtgaccaaccttttcccaaccatacaaaaattccttttcccgaaggaaaagggctttctcaataagcctcagctttctaagatctaacaagatagccaccgagatccttatcgaaactcattttaggcaaatatgagttttattgtccgtttacttgtttcagagtttgtattgtgattatcaattaccacaccatctcccatgaagaaagggaacggtgaagtactaagcgctagaggaagcagccaagtcggttagtggaagcatgattggtgcccagttagcctctgcaggatgtggaaacctccttccaggggaggttcagtgaattgtgtaggagaggttgtctgtggccagaatttaaacctatactcactttcccaaattgaatcactgctcacactgctgatgatttagagtgctgtccggtggagatcccacccgaacgtcttatctaatcatgaaactccctagttccttcatgtaacttccctgaaaaatctaagtgtttcataaatttgagagtctgtgacccacttaccttgcatctcacaggtagacagtatataactaacaaccaaagactacatattgtcactgacacacacgttataatcatttatcatatatatacatacatgcatacactctcaaagcaaataatttttcacttcaaaacagtattgacttgtataccttgtaatttgaaatattttctttgttaaaatagaatggtatcaataaatagaccattaatcaga

SEQ ID NO: 60888 - DNA, 2693 bp, Homo sapiens
aaagaatttctcaggctcaaaatccaatacaggagtgacttggaactccattctatcactatgaagaaaagtggtgttcttttcctcttgggcatcatcttgctggttctgattggagtgcaaggaaccccagtagtgagaaagggtcgctgttcctgcatcagcaccaaccaagggactatccacctacaatccttgaaagaccttaaacaatttgccccaagcccttcctgcgagaaaattgaaatcattgctacactgaagaatggagttcaaacatgtctaaacccagattcagcagatgtgaaggaactgattaaaaagtgggagaaacaggtcagccaaaagaaaaagcaaaagaatgggaaaaaacatcaaaaaaagaaagttctgaaagttcgaaaatctcaacgttctcgtcaaaagaagactacataagagaccacttcaccaataagtattctgtgttaaaaatgttctattttaattataccgctatcattccaaaggaggatggcatataatacaaaggcttattaatttgactagaaaatttaaaacattactctgaaattgtaactaaagttagaaagttgattttaagaatccaaacgttaagaattgttaaaggctatgattgtctttgttcttctaccacccaccagttgaatttcatcatgcttaaggccatgattttagcaatacccatgtctacacagatgttcacccaaccacatcccactcacaacagctgcctggaagagcagccctaggcttccacgtactgcagcctccagagagtatctgaggcacatgtcagcaagtcctaagcctgttagcatgctggtgagccaagcagtttgaaattgagctggacctcaccaagctgctgtggccatcaacctctgtatttgaatcagcctacaggcctcacacacaatgtgtctgagagattcatgctgattgttattgggtatcaccactggagatcaccagtgtgtggctttcagagcctcctttctggctttggaagccatgtgattccatcttgcccgctcaggctgaccactttatttctttttgttcccctttgcttcattcaagtcagctcttctccatcctaccacaatgcagtgcctttcttctctccagtgcacctgtcatatgctctgatttatctgagtcaactcctttctcatcttgtccccaacaccccacagaagtgctttcttctcccaattcatcctcactcagtccagcttagttcaagtcctgcctcttaaataaacctttttggacacacaaattatcttaaaactcctgtttcacttggttcagtaccacatgggtgaacactcaatggttaactaattcttgggtgtttatcctatctctccaaccagattgtcagctccttgagggcaagagccacagtatatttccctgtttcttccacagtgcctaataatactgtggaactaggttttaataattttttaattgatgttgttatgggcaggatggcaaccagaccattgtctcagagcaggtgctggctctttcctggctactccatgttggctagcctctggtaacctcttacttattatcttcaggacactcactacagggaccagggatgatgcaacatccttgtctttttatgacaggatgtttgctcagcttctccaacaataagaagcacgtggtaaaacacttgcggatattctggactgtttttaaaaaatatacagtttaccgaaaatcatataatcttacaatgaaaaggactttatagatcagccagtgaccaaccttttcccaaccatacaaaaattccttttcccgaaggaaaagggctttctcaataagcctcagctttctaagatctaacaagatagccaccgagatccttatcgaaactcattttaggcaaatatgagttttattgtccgtttacttgtttcagagtttgtattgtgattatcaattaccacaccatctcccatgaagaaagggaacggtgaagtactaagcgctagaggaagcagccaagtcggttagtggaagcatgattggtgcccagttagcctctgcaggatgtggaaacctccttccaggggaggttcagtgaattgtgtaggagaggttgtctgtggccagaatttaaacctatactcactttcccaaattgaatcactgctcacactgctgatgatttagagtgctgtccggtggagatcccacccgaacgtcttatctaatcatgaaactccctagttccttcatgtaacttccctgaaaaatctaagtgtttcataaatttgagagtctgtgacccacttaccttgcatctcacaggtagacagtatataactaacaaccaaagactacatattgtcactgacacacacgttataatcatttatcatatatatacatacatgcatacactctcaaagcaaataatttttcacttcaaaacagtattgacttgtataccttgtaatttgaaatattttctttgttaaaatagaatggtatcaataaatagaccattaatcagaaaacagatcttgattttttttctcttgaatgtacccttcaactgttgaatgtttaatagtaaatcttatatgtccttatttactttttagctttctctcaaataaagtgtaacactagttgagata

SEQ ID NO: 60889 - DNA, 2404 bp, Homo sapiens
aaagaatttctcaggctcaaaatccaatacaggagtgacttggaactccattctatcactatgaagaaaagtggtgttcttttcctcttgggcatcatcttgctggttctgattggagtgcaaggaaccccagtagtgagaaagggtcgctgttcctgcatcagcaccaaccaagggactatccacctacaatccttgaaagaccttaaacaatttgccccaagcccttcctgcgagaaaattgaaatcattgctacactgaagaatggagttcaaacatgtctaaacccagattcagcagatgtgaaggaactgattaaaaagtgggagaaacaggtcagccaaaagaaaaagcaaaagaatgggaaaaaacatcaaaaaaagaaagttctgaaagttcgaaaatctcaacgttctcgtcaaaagaagactacataagagaccacttcaccaataagtattctgtgttaaaaatgttctattttaattataccgctatcattccaaaggaggatggcatataatacaaaggcttattaatttgactagaaaatttaaaacattactctgaaattgtaactaaagttagaaagttgattttaagaatccaaacgttaagaattgttaaaggctatgattgtctttgttcttctaccacccaccagttgaatttcatcatgcttaaggccatgattttagcaatacccatgtctacacagatgttcacccaaccacatcccactcacaacagctgcctggaagagcagccctaggcttccacgtactgcagcctccagagagtatctgaggcacatgtcagcaagtcctaagcctgttagcatgctggtgagccaagcagtttgaaattgagctggacctcaccaagctgctgtggccatcaacctctgtatttgaatcagcctacaggcctcacacacaatgtgtctgagagattcatgctgattgttattgggtatcaccactggagatcaccagtgtgtggctttcagagcctcctttctggctttggaagccatgtgattccatcttgcccgctcaggctgaccactttatttctttttgttcccctttgcttcattcaagtcagctcttctccatcctaccacaatgcagtgcctttcttctctccagtgcacctgtcatatgctctgatttatctgagtcaactcctttctcatcttgtccccaacaccccacagaagtgctttcttctcccaattcatcctcactcagtccagcttagttcaagtcctgcctcttaaataaacctttttggacacacaaattatcttaaaactcctgtttcacttggttcagtaccacatgggtgaacactcaatggttaactaattcttgggtgtttatcctatctctccaaccagattgtcagctccttgagggcaagagccacagtatatttccctgtttcttccacagtgcctaataatactgtggaactaggttttaataattttttaattgatgttgttatgggcaggatggcaaccagaccattgtctcagagcaggtgctggctctttcctggctactccatgttggctagcctctggtaacctcttacttattatcttcaggacactcactacagggaccagggatgatgcaacatccttgtctttttatgacaggatgtttgctcagcttctccaacaataagaagcacgtggtaaaacacttgcggatattctggactgtttttaaaaaatatacagtttaccgaaaatcatataatcttacaatgaaaaggactttatagatcagccagtgaccaaccttttcccaaccatacaaaaattccttttcccgaaggaaaagggctttctcaataagcctcagctttctaagatctaacaagatagccaccgagatccttatcgaaactcattttaggcaaatatgagttttattgtccgtttacttgtttcagagtttgtattgtgattatcaattaccacaccatctcccatgaagaaagggaacggtgaagtactaagcgctagaggaagcagccaagtcggttagtggaagcatgattggtgcccagttagcctctgcaggatgtggaaacctccttccaggggaggttcagtgaattgtgtaggagaggttgtctgtggccagaatttaaacctatactcactttcccaaattgaatcactgctcacactgctgatgatttagagtgctgtccggtggagatcccacccgaacgtcttatctaatcatgaaactccctagttccttcatgtaacttccctgaaaaatctaagtgtttcataaatttgagagtctgtgacccacttaccttgcatctcacaggtagacagtatataactaaccttacacgggagcccgagctcga

SEQ ID NO: 60890 - DNA, 1494 bp, Homo sapiens
cgacaatcgaggggttactagaagattcaagtcagctcttctccatcctaccacaatgcagtgcctttcttctctccagtgcacctgtcatatgctctgatttatctgagtcaactcctttctcatcttgtccccaacaccccacagaagtgctttcttctcccaattcatcctcactcagtccagcttagttcaagtcctgcctcttaaataaacctttttggacacacaaattatcttaaaactcctgtttcacttggttcagtaccacatgggtgaacactcaatggttaactaattcttgggtgtttatcctatctctccaaccagattgtcagctccttgagggcaagagccacagtatatttccctgtttcttccacagtgcctaataatactgtggaactaggttttaataattttttaattgatgttgttatgggcaggatggcaaccagaccattgtctcagagcaggtgctggctctttcctggctactccatgttggctagcctctggtaacctcttacttattatcttcaggacactcactacagggaccagggatgatgcaacatccttgtctttttatgacaggatgtttgctcagcttctccaacaataagaagcacgtggtaaaacacttgcggatattctggactgtttttaaaaaatatacagtttaccgaaaatcatataatcttacaatgaaaaggactttatagatcagccagtgaccaaccttttcccaaccatacaaaaattccttttcccgaaggaaaagggctttctcaataagcctcagctttctaagatctaacaagatagccaccgagatccttatcgaaactcattttaggcaaatatgagttttattgtccgtttacttgtttcagagtttgtattgtgattatcaattaccacaccatctcccatgaagaaagggaacggtgaagtactaagcgctagaggaagcagccaagtcggttagtggaagcatgattggtgcccagttagcctctgcaggatgtggaaacctccttccaggggaggttcagtgaattgtgtaggagaggttgtctgtggccagaatttaaacctatactcactttcccaaattgaatcactgctcacactgctgatgatttagagtgctgtccggtggagatcccacccgaacgtcttatctaatcatgaaactccctagttccttcatgtaacttccctgaaaaatctaagtgtttcataaatttgagagtctgtgacccacttaccttgcatctcacaggtagacagtatataactaacaaccaaagactacatattgtcactgacacacacgttataatcatttatcatatatatacatacatgcatacactctcaaagcaaataatttttcacttcaaaacagtattgacttgtataccttgtaatttgaaatattttctttgttaaaatagaatggtatcaataaatagaccattaatcaga

SEQ ID NO: 60891 - DNA, 1238 bp, Homo sapiens
aaagaatttctcaggctcaaaatccaatacaggagtgacttggaactccattctatcactatgaagaaaagtggtgttcttttcctcttgggcatcatcttgctggttctgattggagtgcaaggaaccccagtagtgagaaagggtcgctgttcctgcatcagcaccaaccaagggactatccacctacaatccttgaaagaccttaaacaatttgccccaagcccttcctgcgagaaaattgaaatcattgctacactgaagaatggagttcaaacatgtctaaacccagattcagcagatgtgaaggaactgattaaaaagtgggagaaacaggtcagccaaaagaaaaagcaaaagaatgggaaaaaacatcaaaaaaagaaagttctgaaagttcgaaaatctcaacgttctcgtcaaaagaagactacataagagaccacttcaccaataagtattctgtgttaaaaatgttctattttaattataccgctatcattccaaaggaggatggcatataatacaaaggcttattaatttgactagaaaatttaaaacattactctgaaattgtaactaaagttagaaagttgattttaagaatccaaacgttaagaattgttaaaggctatgattgtctttgttcttctaccacccaccagttgaatttcatcatgcttaaggccatgattttagcaatacccatgtctacacagatgttcacccaaccacatcccactcacaacagctgcctggaagagcagccctaggcttccacgtactgcagcctccagagagtatctgaggcacatgtcagcaagtcctaagcctgttagcatgctggtgagccaagcagtttgaaattgagctggacctcaccaagctgctgtggccatcaacctctgtatttgaatcagcctacaggcctcacacacaatgtgtctgagagattcatgctgattgttattgggtatcaccactggagatcaccagtgtgtggctttcagagcctcctttctggctttggaagccatgtgattccatcttgcccgctcaggctgaccactttatttctttttgttcccctttgcttcattcaagtcagctcttctccatcctaccacaatgcagtgcctttcttctctccagcgtttcctgtctttgtactttcttcatttccaccttgcccagtcatactgctttttcatggaccaccagtgttgcggaatcctcgg

SEQ ID NO: 60892 - DNA, 2567 bp, Homo sapiens
aaagaatttctcaggctcaaaatccaatacaggagtgacttggaactccattctatcactatgaagaaaagtggtgttcttttcctcttgggcatcatcttgctggttctgattggagtgcaaggaaccccagtagtgagaaagggtcgctgttcctgcatcagcaccaaccaagggactatccacctacaatccttgaaagaccttaaacaatttgccccaagcccttcctgcgagaaaattgaaatcattgctacactgaagaatggagttcaaacatgtctaaacccagattcagcagatgtgaaggaactgattaaaaagtgggagaaacaggtcagccaaaagaaaaagcaaaagaatgggaaaaaacatcaaaaaaagaaagttctgaaagttcgaaaatctcaacgttctcgtcaaaagaagactacataagagaccacttcaccaataagtattctgtgttaaaaatgttctattttaattataccgctatcattccaaaggaggatggcatataatacaaaggcttattaatttgactagaaaatttaaaacattactctgaaattgtaactaaagttagaaagttgattttaagaatccaaacgttaagaattgttaaaggctatgattgtctttgttcttctaccacccaccagttgaatttcatcatgcttaaggccatgattttagcaatacccatgtctacacagatgttcacccaaccacatcccactcacaacagctgcctggaagagcagccctaggcttccacgtactgcagcctccagagagtatctgaggcacatgtcagcaagtcctaagcctgttagcatgctggtgagccaagcagtttgaaattgagctggacctcaccaagctgctgtggccatcaacctctgtatttgaatcagcctacaggcctcacacacaatgtgtctgagagattcatgctgattgttattgggtatcaccactggagatcaccagtgtgtggctttcagagcctcctttctggctttggaagccatgtgattccatcttgcccgctcaggctgaccactttatttctttttgttcccctttgcttcattcaagtcagctcttctccatcctaccacaatgcagtgcctttcttctctccagtgcacctgtcatatgctctgatttatctgagtcaactcctttctcatcttgtccccaacaccccacagaagtgctttcttctcccaattcatcctcactcagtccagcttagttcaagtcctgcctcttaaataaacctttttggacacacaaattatcttaaaactcctgtttcacttggttcagtaccacatgggtgaacactcaatggttaactaattcttgggtgtttatcctatctctccaaccagattgtcagctccttgagggcaagagccacagtatatttccctgtttcttccacagtgcctaataatactgtggaactaggttttaataattttttaattgatgttgttatgggcaggatggcaaccagaccattgtctcagagcaggtgctggctctttcctggctactccatgttggctagcctctggtaacctcttacttattatcttcaggacactcactacagggaccagggatgatgcaacatccttgtctttttatgacaggatgtttgctcagcttctccaacaataagaagcacgtggtaaaacacttgcggatattctggactgtttttaaaaaatatacagtttaccgaaaatcatataatcttacaatgaaaaggactttatagatcagccagtgaccaaccttttcccaaccatacaaaaattccttttcccgaaggaaaagggctttctcaataagcctcagctttctaagatctaacaagatagccaccgagatccttatcgaaactcattttaggcaaatatgagttttattgtccgtttacttgtttcagagtttgtattgtgattatcaattaccacaccatctcccatgaagaaagggaacggtgaagtactaagcgctagaggaagcagccaagtcggttagtggaagcatgattggtgcccagttagcctctgcaggatgtggaaacctccttccaggggaggttcagtgaattgtgtaggagaggttgtctgtggccagaatttaaacctatactcactttcccaaattgaatcactgctcacactgctgatgatttagagtgctgtccggtggagatcccacccgaacgtcttatctaatcatgaaactccctagttccttcatgtaacttccctgaaaaatctaagtgtttcataaatttgagagtctgtgacccacttaccttgcatctcacaggtagacagtatataactaacaaccaaagactacatattgtcactgacacacacgttataatcatttatcatatatatacatacatgcatacactctcaaagcaaataatttttcacttcaaaacagtattgacttgtataccttgtaatttgaaatattttctttgttaaaatagaatggtatcaataaatagaccattaatcaga

SEQ ID NO: 60893 - DNA, 2039 bp, Homo sapiens
aaagaatttctcaggctcaaaatccaatacaggagtgacttggaactccattctatcactatgaagaaaagtggtgttcttttcctcttgggcatcatcttgctggttctgattggagtgcaaggaaccccagtagtgagaaagggtcgctgttcctgcatcagcaccaaccaagggactatccacctacaatccttgaaagaccttaaacaatttgccccaagcccttcctgcgagaaaattgaaatcattgctacactgaagaatggagttcaaacatgtctaaacccagattcagcagatgtgaaggaactgattaaaaagtgggagaaacaggtcagccaaaagaaaaagcaaaagaatgggaaaaaacatcaaaaaaagaaagttctgaaagttcgaaaatctcaacgttctcgtcaaaagaagactacataagagaccacttcaccaataagtattctgtgttaaaaatgttctattttaattataccgctatcattccaaaggaggatggcatataatacaaaggcttattaatttgactagaaaatttaaaacattactctgaaattgtaactaaagttagaaagttgattttaagaatccaaacgttaagaattgttaaaggctatgattgtctttgttcttctaccacccaccagttgaatttcatcatgcttaaggccatgattttagcaatacccatgtctacacagatgttcacccaaccacatcccactcacaacagctgcctggaagagcagccctaggcttccacgtactgcagcctccagagagtatctgaggcacatgtcagcaagtcctaagcctgttagcatgctggtgagccaagcagtttgaaattgagctggacctcaccaagctgctgtggccatcaacctctgtatttgaatcagcctacaggcctcacacacaatgtgtctgagagattcatgctgattgttattgggtatcaccactggagatcaccagtgtgtggctttcagagcctcctttctggctttggaagccatgtgattccatcttgcccgctcaggctgaccactttatttctttttgttcccctttgcttcattcaagtcagctcttctccatcctaccacaatgcagtgcctttcttctctccagtgcacctgtcatatgctctgatttatctgagtcaactcctttctcatcttgtccccaacaccccacagaagtgctttcttctcccaattcatcctcactcagtccagcttagttcaagtcctgcctcttaaataaacctttttggacacacaaattatcttaaaactcctgtttcacttggttcagtaccacatgggtgaacactcaatggttaactaattcttgggtgtttatcctatctctccaaccagattgtcagctccttgagggcaagagccacagtatatttccctgtttcttccacagtgcctaataatactgtggaactaggttttaataattttttaattgatgttgttatgggcaggatggcaaccagaccattgtctcagagcaggtgctggctctttcctggctactccatgttggctagcctctggtaacctcttacttattatcttcaggacactcactacagggaccagggatgatgcaacatccttgtctttttatgacaggatgtttgctcagcttctccaacaataagaagcacgtggtaaaacacttgcggatattctggactgtttttaaaaaatatacagtttaccgaaaatcatataatcttacaatgaaaaggactttatagatcagccagtgaccaaccttttcccaaccatacaaaaattcctttagagtgtcgcgcgacactcttggttgcaattttgttgtctgcatcccaatgggaggaaaaagtagtaagccatcatcttattttgtctagaggtaactttccaactttgctcttggtttcatgcctaaccttctgtgtgcagaataataaagaaaaaagctaagattcttaaatatcctgataaaggcatcaaatt

SEQ ID NO: 60894 - DNA, 695 bp, Homo sapiens
cgggctggctctcggtgtgtgcccttcggatggtcggctgaagagggccgccagctggacttctgtagacaagacagatactgtaaagacagcaaagaacaaacagaatggcagattgctaatgtttgatccaaacgaaaaagtgatgattgaatcaaacgaagcaatgtcagagtaagaagatgtctttgattgtgcagctgatctctcccatgccttttaagcaattagaactagataatgcagccatttgtcacccaattaaatttgaaaggccagaaatgcatggattagcacttcagcttttgctgcagtcaaagcaattgttacttagatagaaggacagttaaaatgaaaaatgaattttgataaaaatgcagaagtatagataatattcacttctactttttaatgcttaaacaccctgtattctgtattttacttgtatcataattttcattgctcattcctatttccctttgatacttatttctttcacaatatttcttcaagtgaatatgtactttaaaattaacaaattatttactataacatgaattgttactactcaataaagaaagtaatcacctcaactagttgaagaaactggtgttaaaaaaattgtattctttccagccttttggctaagatcaagtgtaaaaaaatcacagtacaatatcaatttagtagctaaa

SEQ ID NO: 60895 - DNA, 678 bp, Homo sapiens
  misc_feature (29)..(29): n is a, c, g, or t
  misc_feature (57)..(57): n is a, c, g, or t
cctcgctccccgctctcaaaaaacaacanaacgctccaggcactcctgtgagacagnatgatactgtaaacacagcaaagaacaaacagaatggcagattgctaatgtttgatccaaacgaaaaagtgatgattgaatcaaacgaagcaatgtcagagtaagaagatgtctttgattgtgcagctgatctctcccatgccttttaagcaattagaactagataatgcagccatttgtcacccaattaaatttgaaaggccagaaatgcatggattagcacttcagcttttgctgcagtcaaagcaattgttacttagatagaaggacagttaaaatgaaaaatgaattttgataaaaatgcagaagtatagataatattcacttctactttttaatgcttaaacaccctgtattctgtattttacttgtatcataattttcattgctcattcctatttccctttgatacttatttctttcacaatatttcttcaagtgaatatgtactttaaaattaacaaattatttactataacatgaattgttactactcaataaagaaagtaatcacctcaactagttgaagaaactggtgttaaaaaaattgtattctttccagccttttggctaagatcaagtgtaaaaaaatcacagtacaatatcaatttagtagctaaa

SEQ ID NO: 60896 - DNA, 735 bp, Homo sapiens
gcagtctccacggcgacgctgcgttcccgactcggagcccccagctccgcgcgagcagctagccgggctggctctcggtgtgtgcccttcggatggtcggctgaagagggccgccagctggtaagacactccgaggcaacgaccggtctccctctccctagcccggtgtgcagtctgacccagcccccacagcagaccacccccagaccgggcgcccgagtctgcggaccgctctaccgcacctggttctggctctgggccccgggccccgtggctgccaggggccgccgggaagggaggatgcgcgccactggggtgcgcctggcttgcggcaccctcctcccgcagtggtcggaagaggtgaggaagcgccgttcgtgtctacacgggtgtggagataactgggcgattctgacaggcttgtctacactaccattctttgaccggccggtgcacacgcaccaactccttccccgcaaataacgaagatggcccagcccatcccagggcttcccgacccccttccctcagtccttgcccttgcccggaattcttttacttatttttggaaaattagttaagacatcactactagctagatataacttgctagccatacaaatttcgatggaatttggacaaatcatttatattcccgggccttattctcatcttatgagatgatgaaattgacttgaaacttccaaaatgttgatattgttcttttgactactc

SEQ ID NO: 60897 - DNA, 1044 bp, Homo sapiens
tgtgattggtggtagtgacacaaatctgcacctgtgataaagcgatacatagctatacacacacactgtactaatgtcagtttcctagttttgattttatattatagtaagatgtaaccatgggagaaactgggtgcagggtacaggggacctcttttgctatctttggaacttcctttgaatctaaaattatttcaaaattaaaaaaaaatttttttaaattatcctagctaaagcatcaagtgaaagttcttaagagaaaaaaagaaaacaagggaagggaaggtacaggatgtctgggaaattgtctgtgacatttaaactggtttttgcccagggggcatttgccaaatctggtttcctttcctcagcatcagagagcattgaggaacctgaggaaataataaggtctttctttctgggatgatgaatctgatacgttcttcctcttcaccttaaagctgagactcagctaaactggaaaccaccaccaatcccaccatccttcaagattgcagggaaagttgattttctgcatgcttcttagtttttaatgtgcatcagaatcacatggaggtcttgttaaaacaaagattgctgggcaacatccccagagtgtaagattcagtaggtctggggtgagacttttaaaatttgtacctctaataagtttccagatgatagtgattttgctggtcgggaaccacactgcaaaaattatttgtatagctaaaaccttgtcggagtgaatatgggggcaagatcactgctgagaattttaagcaaccagctgacccttgtataatttgcagtgcgaatttaacgctgtgtaggtgatctaaaaaaaaaaaagaaaaagaattccctaagataatttatccccataatggcagtatacatagactggcagtgagtatccccagactcttgtagaagctaacagaaattctctttggagaaactcatctccatcccagagttgaaagttttcctagaaataaaattctaagtaagtagaacaactgtgatagtcaaaaagaaaaa

SEQ ID NO: 60898 - DNA, 228 bp, Homo sapiens
ttgtactcatgggacatgctgatgtatacacaggtacatgtttgggctgaagataaaggtttgggaacacatggcccactggaagtacgtaaagccagagtggggccggaggctgattagatggtctgggtcagaagagaagaaggcatgggaaaaccacatctatagggcaagcaggggaaagcccacagcagaaaagaggaaaaaagaatgctcagagcaggggga

SEQ ID NO: 60899 - DNA, 403 bp, Homo sapiens
cttgagcacttacattaatgggagaagagataaagagggaaacacggggagtgtgggatgtgtgagactgcatgttcacagggaaaagtaatgttgtgcagaaagcctgccactgctaatgaacctggtaagaggacaggaaggaaagggattatttctgttatcccttttgggaaacaattttccatgtgtcttacatttttacatctggcaggtgctgacagtccttgtgctgggctctctttttaaggatgtttccatagtggaaacatatatggaaaaacggagctgggctggagcatagggcaggtgcacttagggtccattatgcaaaatttgggttttctatactcagggcttctctctcataagccaccccacagtgtgtgcaggtattgcctgg

SEQ ID NO: 60900 - DNA, 468 bp, Homo sapiens
gtgattagttggtgtacttcagcaggagcaaccagatgaattggcttctctatatccccgtattagccacaagctaggcagcagcctgcaggtgggagcaatgcctatgcatgtatggatcagtgtgctacatacagtcacgttgacagcatgaaccttcgatgtgatgtgaggaaaatggcattctacctctgtgttcttcctccccaaaatttgtaaccaccatctaatcatgaggaaaacatcatacaagtccaaattgaggaagattctacaaaatgcctgattaatattcatcgaaactgtcaaggtcatcaaaagcaaggaaagtctgagaaactgccacagcctaaagacaatccagggaaacgtgatgactcagtggtattcggggtgggtttctggaacagcaaaaggacaacaggtaaaatctaagaacatacgaataaagtgtgaactttaattaat

SEQ ID NO: 60901 - DNA, 1108 bp, Homo sapiens
gtgattagttggtgtacttcagcaggagcaaccagatgaattggcttctctatatccccgtattagccacaagctaggcagcagcctgcaggtgggagcaatgcctatgcatgtatggatcagtgtgctacatacagtcacgttgacagcatgaaccttcgatgtgatgtgaggaaaatggcattctacctctgtgttcttcctccccaaaatttgtaaccaccatctaatcatgaggaaaacatcatacaagtccaaattgaggaagattctacaaaatgcctgattaatattcatcgaaactgtcaaggtcatcaaaagcaaggaaagtctgagaaactgccacagcctaaagacaatccagggaaacgtgatgactcagtggtattcggggtgggtttctggaacagcaaaaggacaacagtgttaacatctgggccaaacatctgggcagcaacatcagaaagcccctctgctgtgcttcaggatcactcttatcactgcataaaggtaccctgagccactatctaaattgtctgcttaccttatgaagacaccataaggaggtataacgtgtggtgagcacaggtgaagagctagaggcctgaaactagatggggagggagaagccagccatgcctgcatccagggctgcactcagcctcccagcatctgtgcagaggcatcagtcaagccacagctaactgcagtcccagctaacattatgtggaacatcccagtcatcccagatcatcccagtcaaccaagatcataaaattgttttcagctattaagtttaaatacgtgaaataaggagataaaaatactgacttggactctgtctgaatgaaaggattagtagattagattagtgattcttaaaagactttcttggatgcatataagtgtccacaaaataagagtatgatggtttccaggtacaaataagatggaaaactattttgtgaatcagaattaaattggtttatttactgtagaacttctaagaggctttaacatgtacatttaattatcataagccttatgaaaactccaggaggacagaagagttgcctgtgactttttttaaagtgtttattcacatccc

SEQ ID NO: 60902 - DNA, 1103 bp, Homo sapiens
ttccttgcccggactacgctgactcatgagccctctgctccgccgcctgctgctcgccgcactcctgcagctggcccccgcccaggcccctgtctcccagcctgatgcccctggccaccagaggaaagtggtgtcatggatagatgtgtatactcgcgctacctgccagccccgggaggtggtggtgcccttgactgtggagctcatgggcaccgtggccaaacagctggtgcccagctgcgtgactgtgcagcgctgtggtggctgctgccctgacgatggcctggagtgtgtgcccactgggcagcaccaagtccggatgcagatcctcatgatccggtacccgagcagtcagctgggggagatgtccctggaagaacacagccagtgtgaatgcagacctaaaaaaaaggacagtgctgtgaagccagacagggctgccactccccaccaccgtccccagccccgttctgttccgggctgggactctgcccccggagcaccctccccagctgacatcacccatcccactccagccccaggcccctctgcccacgctgcacccagcaccaccagcgccctgacccccggacctgccgctgccgctgccgacgccgcagcttcctccgttgccaagggcggggcttagagctcaacccagacacctgcaggtgccggaagctgcgaaggtgacacatggcttttcagactcagcagggtgacttgcctcagaggctatatcccagtgggggaacaaagaggagcctggtaaaaaacagccaagcccccaagacctcagcccaggcagaagctgctctaggacctgggcctctcagagggctcttctgccatcccttgtctccctgaggccatcatcaaacaggacagagttggaagaggagactgggaggcagcaagaggggtcacataccagctcaggggagaatggagtactgtctcagtttctaaccactctgtgcaagtaagcatcttacaactggctcttcctcccctcactaagaagacccaaacctctgcataatgggatttgggctttggtacaagaactgtgacccccaaccctgataaaagagatggaagga

SEQ ID NO: 60903 - DNA, 1255 bp, Homo sapiens
gagattacgggtgcgagccactgcgcccggccacattttatagccaaccggcttcttgtgtaacaagagatgctactattctgcccactatacaccagcactcagttgagacatatgaccgactgggaccgacatcaacagtccatgggacgatattctgagcggacatatggggagggctagtggagggtggctgtgacttggggactggggaggacagatgctgggagcagctgcaggaaaaccagtgaggacttaacccctaccggtctgctcccagtggtgtcatggatagatgtgtatactcgcgctacctgccagccccgggaggtggtggtgcccttgactgtggagctcatgggcaccgtggccaaacagctggtgcccagctgcgtgactgtgcagcgctgtggtggctgctgccctgacgatggcctggagtgtgtgcccactgggcagcaccaagtccggatgcagatcctcatgatccggtacccgagcagtcagctgggggagatgtccctggaagaacacagccagtgtgaatgcagacctaaaaaaaaggacagtgctgtgaagccagacagggctgccactccccaccaccgtccccagccccgttctgttccgggctgggactctgcccccggagcaccctccccagctgacatcacccatcccactccagccccaggcccctctgcccacgctgcacccagcaccaccagcgccctgacccccggacctgccgctgccgctgccgacgccgcagcttcctccgttgccaagggcggggcttagagctcaacccagacacctgcaggtgccggaagctgcgaaggtgacacatggcttttcagactcagcagggtgacttgcctcagaggctatatcccagtgggggaacaaagaggagcctggtaaaaaacagccaagcccccaagacctcagcccaggcagaagctgctctaggacctgggcctctcagagggctcttctgccatcccttgtctccctgaggccatcatcaaacaggacagagttggaagaggagactgggaggcagcaagaggggtcacataccagctcaggggagaatggagtactgtctcagtttctaaccactctgtgcaagtaagcatcttacaactggctcttcctcccctcactaagaagacccaaacctctgcataatgggatttgggctttggtacaagaactgtgacccccaaccctgataaaagagatggaagga

SEQ ID NO: 60904 - DNA, 915 bp, Homo sapiens
gccacccatggatgtcacttggcagcaagcaccgaaatcttctttagtggagtgctttgtatgcctctgtcctagctgccagccccgggaggtggtggtgcccttgactgtggagctcatgggcaccgtggccaaacagctggtgcccagctgcgtgactgtgcagcgctgtggtggctgctgccctgacgatggcctggagtgtgtgcccactgggcagcaccaagtccggatgcagatcctcatgatccggtacccgagcagtcagctgggggagatgtccctggaagaacacagccagtgtgaatgcagacctaaaaaaaaggacagtgctgtgaagccagacagccccaggcccctctgcccacgctgcacccagcaccaccagcgccctgacccccggacctgccgctgccgctgccgacgccgcagcttcctccgttgccaagggcggggcttagagctcaacccagacacctgcaggtgccggaagctgcgaaggtgacacatggcttttcagactcagcagggtgacttgcctcagaggctatatcccagtgggggaacaaagaggagcctggtaaaaaacagccaagcccccaagacctcagcccaggcagaagctgctctaggacctgggcctctcagagggctcttctgccatcccttgtctccctgaggccatcatcaaacaggacagagttggaagaggagactgggaggcagcaagaggggtcacataccagctcaggggagaatggagtactgtctcagtttctaaccactctgtgcaagtaagcatcttacaactggctcttcctcccctcactaagaagacccaaacctctgcataatgggatttgggctttggtacaagaactgtgacccccaaccctgataaaagagatggaagga

SEQ ID NO: 60905 - DNA, 1206 bp, Homo sapiens
  misc_feature (58)..(58): n is a, c, g, or t
  misc_feature (61)..(64): n is a, c, g, or t
  misc_feature (66)..(66): n is a, c, g, or t
  misc_feature (70)..(70): n is a, c, g, or t
  misc_feature (78)..(78): n is a, c, g, or t
  misc_feature (81)..(81): n is a, c, g, or t
  misc_feature (83)..(84): n is a, c, g, or t
agcggaaccaggaggtatcgctgcccgccgccaccggccgcccgcccgcccggctccnccnnnngnctcngctgcgcngcncnncgcgccggcacgagggcgatgcgggcgcccccggcgggcggccccggcgggcaccatgagccctctgctccgccgcctgctgctcgccgcactcctgcagctggcccccgcccaggcccctgtctcccagcctgatgcccctggccaccagaggaaagtggtgtcatggatagatgtgtatactcgcgctacctgccagccccgggaggtggtggtgcccttgactgtggagctcatgggcaccgtggccaaacagctggtgcccagctgcgtgactgtgcagcgctgtggtggctgctgccctgacgatggcctggagtgtgtgcccactgggcagcaccaagtccggatgcagatcctcatgatccggtacccgagcagtcagctgggggagatgtccctggaagaacacagccagtgtgaatgcagacctaaaaaaaaggacagtgctgtgaagccagacagggctgccactccccaccaccgtccccagccccgttctgttccgggctgggactctgcccccggagcaccctccccagctgacatcacccatcccactccagccccaggcccctctgcccacgctgcacccagcaccaccagcgccctgacccccggacctgccgctgccgctgccgacgccgcagcttcctccgttgccaagggcggggcttagagctcaacccagacacctgcaggtgccggaagctgcgaaggtgacacatggcttttcagactcagcagggtgacttgcctcagaggctatatcccagtgggggaacaaagaggagcctggtaaaaaacagccaagcccccaagacctcagcccaggcagaagctgctctaggacctgggcctctcagagggctcttctgccatcccttgtctccctgaggccatcatcaaacaggacagagttggaagaggagactgggaggcagcaagaggggtcacataccagctcaggggagaatggagtactgtctcagtttctaaccactctgtgcaagtaagcatcttacaactggctcttccttccatctcttttatcagggttgggggtcacagttcttgtaccaaagcccaaatcccatatgcagacgtttggtcttataagga

SEQ ID NO: 60906 - DNA, 887 bp, Homo sapiens
caacataggctagtacaggccgggtgtgaattggtgtcatggatagatgtgtatactcgcgctacctgccagccccgggaggtggtggtgcccttgactgtggagctcatgggcaccgtggccaaacagctggtgcccagctgcgtgactgtgcagcgctgtggtggctgctgccctgacgatggcctggagtgtgtgcccactgggcagcaccaagtccggatgcagacctaaaaaaaaggacagtgctgtgaagccagacagggctgccactccccaccaccgtccccagccccgttctgttccgggctgggactctgcccccggagcaccctccccagctgacatcacccatcccactccagccccaggcccctctgcccacgctgcacccagcaccaccagcgccctgacccccggacctgccgctgccgctgccgacgccgcagcttcctccgttgccaagggcggggcttagagctcaacccagacacctgcaggtgccggaagctgcgaaggtgacacatggcttttcagactcagcagggtgacttgcctcagaggctatatcccaagacctcagcccaggcagaagctgctctaggacctgggcctctcagagggctcttctgccatcccttgtctccctgaggccatcatcaaacaggacagagttggaagaggagactgggaggcagcaagaggggtcacataccagctcaggggagaatggagtactgtctcagtttctaaccactctgtgcaagtaagcatcttacaactggctcttcctcccctcactaagaagacccaaacctctgcataatgggatttgggctttggtacaagaactgtgacccccaaccctgataaaagagatggaagga

SEQ ID NO: 60907 - DNA, 332 bp, Homo sapiens
ttggggggagggctggtggccagcctcccggctgttgggtgagcttttctcccttcagtcttagagcatcccctttctctctctccctcactgtcccccctgttcttctcctgagcacagatcctcatgatccggtacccgagcagtcagctgggggagatgtccctggaagaacacagccagtgtgaatgcaggtgccagccaggcccaacttctgagctcgcagaggccaggcttggggggtgctgggtatggtggtccacagaactggggaccaggttcctaagagtagaaccaaggggccgggcgtggtagctcacgcctgtaatccc

SEQ ID NO: 60908 - DNA, 1217 bp, Homo sapiens
  misc_feature (58)..(58): n is a, c, g, or t
  misc_feature (61)..(64): n is a, c, g, or t
  misc_feature (66)..(66): n is a, c, g, or t
  misc_feature (70)..(70): n is a, c, g, or t
  misc_feature (78)..(78): n is a, c, g, or t
  misc_feature (81)..(81): n is a, c, g, or t
  misc_feature (83)..(84): n is a, c, g, or t
agcggaaccaggaggtatcgctgcccgccgccaccggccgcccgcccgcccggctccnccnnnngnctcngctgcgcngcncnncgcgccggcacgagggcgatgcgggcgcccccggcgggcggccccggcgggcaccatgagccctctgctccgccgcctgctgctcgccgcactcctgcagctggcccccgcccaggcccctgtctcccagcctgatgcccctggccaccagaggaaagtggtgtcatggatagatgtgtatactcgcgctacctgccagccccgggaggtggtggtgcccttgactgtggagctcatgggcaccgtggccaaacagctggtgcccagctgcgtgactgtgcagcgctgtggtggctgctgccctgacgatggcctggagtgtgtgcccactgggcagcaccaagtccggatgcagatcctcatgatccggtacccgagcagtcagctgggggagatgtccctggaagaacacagccagtgtgaatgcagacctaaaaaaaaggacagtgctgtgaagccagacagggctgccactccccaccaccgtccccagccccgttctgttccgggctgggactctgcccccggagcaccctccccagctgacatcacccatcccactccagccccaggcccctctgcccacgctgcacccagcaccaccagcgccctgacccccggacctgccgctgccgctgccgacgccgcagcttcctccgttgccaagggcggggcttagagctcaacccagacacctgcaggtgccggaagctgcgaaggtgacacatggcttttcagactcagcagggtgacttgcctcagaggctatatcccagtgggggaacaaagaggagcctggtaaaaaacagccaagcccccaagacctcagcccaggcagaagctgctctaggacctgggcctctcagagggctcttctgccatcccttgtctccctgaggccatcatcaaacaggacagagttggaagaggagactgggaggcagcaagaggggtcacataccagctcaggggagaatggagtactgtctcagtttctaaccactctgtgcaagtaagcatcttacaactggctcttcctcccctcactaagaagacccaaacctctgcataatgggatttgggctttggtacaagaactgtgacccccaaccctgataaaagagatggaagga

SEQ ID NO: 60909 - DNA, 1116 bp, Homo sapiens
  misc_feature (58)..(58): n is a, c, g, or t
  misc_feature (61)..(64): n is a, c, g, or t
  misc_feature (66)..(66): n is a, c, g, or t
  misc_feature (70)..(70): n is a, c, g, or t
  misc_feature (78)..(78): n is a, c, g, or t
  misc_feature (81)..(81): n is a, c, g, or t
  misc_feature (83)..(84): n is a, c, g, or t
agcggaaccaggaggtatcgctgcccgccgccaccggccgcccgcccgcccggctccnccnnnngnctcngctgcgcngcncnncgcgccggcacgagggcgatgcgggcgcccccggcgggcggccccggcgggcaccatgagccctctgctccgccgcctgctgctcgccgcactcctgcagctggcccccgcccaggcccctgtctcccagcctgatgcccctggccaccagaggaaagtggtgtcatggatagatgtgtatactcgcgctacctgccagccccgggaggtggtggtgcccttgactgtggagctcatgggcaccgtggccaaacagctggtgcccagctgcgtgactgtgcagcgctgtggtggctgctgccctgacgatggcctggagtgtgtgcccactgggcagcaccaagtccggatgcagatcctcatgatccggtacccgagcagtcagctgggggagatgtccctggaagaacacagccagtgtgaatgcagacctaaaaaaaaggacagtgctgtgaagccagacagccccaggcccctctgcccacgctgcacccagcaccaccagcgccctgacccccggacctgccgctgccgctgccgacgccgcagcttcctccgttgccaagggcggggcttagagctcaacccagacacctgcaggtgccggaagctgcgaaggtgacacatggcttttcagactcagcagggtgacttgcctcagaggctatatcccagtgggggaacaaagaggagcctggtaaaaaacagccaagcccccaagacctcagcccaggcagaagctgctctaggacctgggcctctcagagggctcttctgccatcccttgtctccctgaggccatcatcaaacaggacagagttggaagaggagactgggaggcagcaagaggggtcacataccagctcaggggagaatggagtactgtctcagtttctaaccactctgtgcaagtaagcatcttacaactggctcttcctcccctcactaagaagacccaaacctctgcataatgggatttgggctttggtacaagaactgtgacccccaaccctgataaaagagatggaagga

SEQ ID NO: 60910 - DNA, 1706 bp, Homo sapiens
  misc_feature (58)..(58): n is a, c, g, or t
  misc_feature (61)..(64): n is a, c, g, or t
  misc_feature (66)..(66): n is a, c, g, or t
  misc_feature (70)..(70): n is a, c, g, or t
  misc_feature (78)..(78): n is a, c, g, or t
  misc_feature (81)..(81): n is a, c, g, or t
  misc_feature (83)..(84): n is a, c, g, or t
agcggaaccaggaggtatcgctgcccgccgccaccggccgcccgcccgcccggctccnccnnnngnctcngctgcgcngcncnncgcgccggcacgagggcgatgcgggcgcccccggcgggcggccccggcgggcaccatgagccctctgctccgccgcctgctgctcgccgcactcctgcagctggcccccgcccaggcccctgtctcccagcctgatgcccctggccaccagaggaaagtggtgtcatggatagatgtgtatactcgcgctacctgccagccccgggaggtggtggtgcccttgactgtggagctcatgggcaccgtggccaaacagctggtgcccagctgcgtgactgtgcagcgctgtggtggctgctgccctgacgatggcctggagtgtgtgcccactgggcagcaccaagtccggatgcagatcctcatgatccggtacccgagcagtcagctgggggagatgtccctggaagaacacagccagtgtgaatgcagacctaaaaaaaaggacagtgctgtgaagccagacagggctgccactccccaccaccgtccccagccccgttctgttccgggctgggactctgcccccggagcaccctccccagctgacatcacccatcccactccagccccaggcccctctgcccacgctgcacccagcaccaccagcgccctgacccccggacctgccgctgccgctgccgacgccgcagcttcctccgttgccaagggcggggcttagagctcaacccagacacctgcaggtgccggaagctgcgaaggtgacacatggcttttcagactcagcagggtgacttgcctcagaggctatatcccagtgggggaacaaagaggagcctggtaaaaaacagccaagcccccaagacctcagcccaggcagaagctgctctaggacctgggcctctcagagggctcttctgccatcccttgtctccctgaggccatcatcaaacaggacagagttggaagaggagactgggaggcagcaagaggggtcacataccagctcaggggagaatggagtactgtctcagtttctaaccactctgtgcaagtaagcatcttacaactggctcttcctcccctcactaagaagacccaaacctctgcataatgggatttgggctttggtacaagaactgtgacccccaaccctgataaaagagatggaaggagctgtccctgcctgtgtcactgtttgtcactgcccaggctggctggtttgggcatgaatgtctgcatcactaaatccagagcttgtcttgctccctcattgtgcagatggaggaaatgaggactaaggccccacagcagatcccaggcagggccagaattatgtattcatcactttcaagttattgccacgcatgggagtcagggagagcccagtcaatacagactgcctgccctcctgctcttcaccagggttcttttctagaaggagacagccttctgtggccagagagcttggggtaggacccagatctactgagtgaccttgcttgtcactacccctgcctctctgagcagcagtttccacatgtgcacatagagggaacagaagattgctgtggttggcgtcctcgggccccagagaagtttgagactatctttacgtaatagaaaagaacacttgttcttcctgccaggcagcgctttcagca

SEQ ID NO: 60911 - DNA, 1162 bp, Homo sapiens
  misc_feature (58)..(58): n is a, c, g, or t
  misc_feature (61)..(64): n is a, c, g, or t
  misc_feature (66)..(66): n is a, c, g, or t
  misc_feature (70)..(70): n is a, c, g, or t
  misc_feature (78)..(78): n is a, c, g, or t
  misc_feature (81)..(81): n is a, c, g, or t
  misc_feature (83)..(84): n is a, c, g, or t
agcggaaccaggaggtatcgctgcccgccgccaccggccgcccgcccgcccggctccnccnnnngnctcngctgcgcngcncnncgcgccggcacgagggcgatgcgggcgcccccggcgggcggccccggcgggcaccatgagccctctgctccgccgcctgctgctcgccgcactcctgcagctggcccccgcccaggcccctgtctcccagcctgatgcccctggccaccagaggaaagtggtgtcatggatagatgtgtatactcgcgctacctgccagccccgggaggtggtggtgcccttgactgtggagctcatgggcaccgtggccaaacagctggtgcccagctgcgtgactgtgcagcgctgtggtggctgctgccctgacgatggcctggagtgtgtgcccactgggcagcaccaagtccggatgcagatcctcatgatccggtacccgagcagtcagctgggggagatgtccctggaagaacacagccagtgtgaatgcagacctaaaaaaaaggacagtgctgtgaagccagacagggctgccactccccaccaccgtccccagccccgttctgttccgggctgggactctgcccccggagcaccctccccagctgacatcacccatcccactccagccccaggcccctctgcccacgctgcacccagcaccaccagcgccctgacccccggacctgccgctgccgctgccgacgccgcagcttcctccgttgccaagggcggggcttagagctcaacccagacacctgcaggtgccggaagctgcgaaggtgacacatggcttttcagactcagcagggtgacttgcctcagaggctatatcccagtgggggaacaaagaggagcctgctgggcctctcagagggctcttctgccatcccttgtctccctgaggccatcatcaaacaggacagagttggaagaggagactgggaggcagcaagaggggtcacataccagctcaggggagaatggagtactgtctcagtttctaaccactctgtgcaagtaagcatcttacaactggctcttcctcccctcactaagaagacccaaacctctgcataatgggatttgggctttggtacaagaactgtgacccccaaccctgataaaagagatggaagga

SEQ ID NO: 60912 - DNA, 890 bp, Homo sapiens
  misc_feature (58)..(58): n is a, c, g, or t
  misc_feature (61)..(64): n is a, c, g, or t
  misc_feature (66)..(66): n is a, c, g, or t
  misc_feature (70)..(70): n is a, c, g, or t
  misc_feature (78)..(78): n is a, c, g, or t
  misc_feature (81)..(81): n is a, c, g, or t
  misc_feature (83)..(84): n is a, c, g, or t
agcggaaccaggaggtatcgctgcccgccgccaccggccgcccgcccgcccggctccnccnnnngnctcngctgcgcngcncnncgcgccggcacgagggcgatgcgggcgcccccggcgggcggccccggcgggcaccatgagccctctgctccgccgcctgctgctcgccgcactcctgcagctggcccccgcccaggcccctgtctcccagcctgatgcccctggccaccagaggaaagtggtgtcatggatagatgtgtatactcgcgctacctgccagccccgggaggtggtggtgcccttgactgtggagctcatgggcaccgtggccaaacagctggtgcccagctgcgtgactgtgcagcgctgtggtggctgctgccctgacgatggcctggagtgtgtgcccactgggcagcaccaagtccggatgcagatcctcatgatccggtacccgagcagtcagctgggggagatgtccctggaagaacacagccagtgtgaatgcagacctaaaaaaaaggacagtgctgtgaagccagacagggctgccactccccaccaccgtccccagccccgttctgttccgggctgggactctgcccccggagcaccctccccagctgacatcacccatcccactccagccccaggcccctctgcccacgctgcacccagcaccaccagcgccctgacccccggacctgccgctgccgctgccgacgccgcagcttcctccgttgccaagggcggggcttagagctcaacccagacacctgcagctgctggcacctggagctgtataagcaagtccaacattctaactcaggagtcagatacaggagggacaatgccagcagaggatgtcaagggctgtggtgaggggt

SEQ ID NO: 60913 - DNA, 3560 bp, Homo sapiens
tattgaggcactggcccagggaactgagccttgggcctgtcctaaagctccataggtgactgcactgcagcccacatggagagctgcagctctaacacagggattttgagaggcctcagtgccatttaagtggcacttccaggacacccatcctgagctcccacaaagggcgccaccttcccaagaacgtctaattgtcattggaacagccagtgtcaggcagcttctgctcaggctgatgtggcgtctgacccttggtgggttgccagacattccttcctgtttctgccatgggaagttggcactgggaatggtatggagcccccacttctaccctgagccttgggtgtctgctgcttccaggtgaaaaatggacatttctgatactgcccagccactacggcaccacaacccatgctcatagtctccagggatgtgtagaacggcaatggcaggacagcaaacaactggcgatttccccaggtcccacgctcttgcggagtgagtatgttgggtccctgtccccagtgtgttccagccttacccaggtgcacagagtaccctggggccagcacagggcttgtccagtgatgctcctggtgttcacaaaatggctccagagatacctgcattttgaaaagcctgccgagccagcaagtgtagggcaggacccggatttctttggcaaatctgaaggtgagagggccacttgcctgctgagtagaagctgcctttacctggccagtgtatgcaacttgagagaaaatgacagctgcatggggcgctctggtgggactgggaagtctgatcttccggggagctgtagatagtgaatttcaagttgacagctaccttctcagggatttatatataaatatagttagaggaaaagctaaaatctattttactagtttttagtgtttgtgtaaagtaagcttaaactggacagaataaacatttctcagacaatgttgatgctactgattacaagttagatggctggagcttgccccttggtggagaatttctcggtgattggagactggggactctggcagcagaagtggctttatggtgggtgtgaagttgcttctgcccctctgagtggcctctcatggatgtgaatgcgtgtattgacaccagtgaaatccacctccgtgtgcgtggaggtggctgatgagaacacaagtgagccagtcctggttcttccctccagaaccggtcactcccagtctgacgttggagcatgtgaactaagagtgacatttttttctacttgcttctgtgaataaagtgttctacagtcagccagcactaaacaccagaaaggaggagggaacagcgtggagcaattcatctggaattacctcggtgtgcagaggctgtcccttggctccacttgggataaacattgtgaaacatcgtgggcctctttcttctcaagctcctcctgacagcctcctggcaacactagaggcctcaagactatggagatcagaattgcaatggctttgtcatctcagcattgaccactcctgagacccaaggttcctcctgggagcaggagacaaggagtttgtgatgttggatggaaaataggatatatgaatgcagaagggctgtgctggacccctcttttcgcttctctccctgctgtcagcagtgtctctggcatggaggcgaatctgttgtgggtgaaacagaagcccctggggtaggaccagaccccaggcctgaaaaggatgcaaagcctgctgtttcaggctgtcaggaagaatcgtgggtaccgagtgattatgatgaaatgcaacccagagaggaaatgaatgggccctcactaagaagtgggtctgacatgtctctggcagcccaccggcaagagcacgacatgccctgcagccccaccatccacactacatgatgtgggagggctgtctgttcattcttacactggggacccaagcctgctctgaggagtgagtcacagccctgacgtgcgccttgcattactgtttcctgagatgtgcccggagactcaagcttgctcatttctgtcctgacacagctcactgttccttaggtggtcatagtcctcccgtgctgtgtcagctcctacatagcattagtctttcacgtgataaagtgcaagcacttttccattttacagtatttggggaaattctaacacactccccagggatttgtgcatgtccttctgcctccccggtgggtcattctgtggattccgcacctggcagtcggtcttcccccttggaagcccctaggatccctgtttctacgggcctggtccttggtttctaccccagtcccttttggccggcacctgcctggaactgcctggagcgccatggtatggggaaggacaggtggaaccctgaccacaacagatccttctaaaacaacagtcacattgatgatgatgagtgcagtggggtgaatgtcgtcacagcatgcatgctgggagctgccaagggcttacaacaaaagcagttcttcctaaggcaccctttgcatcttcccatccacgcctctcagtgcatttggaacttgcttatgcattggaataacttgagtcagctgctcgtttctgtgcctctgcactcacaggttccttcattaacattttaaataagtggttaaaaactcctctggaggttgtttttgaaagaaacagggaaaagaaaaacacacactacctgaattgatttgagtaattttccagtgactcagttgaaactcagtgttgcatacataatttcctcatgctgagccagcctgaaataagacttgataagaggcacagccctaagtagcaggcagtgccactgtggacagtgtacactatggtgtgagtgtgtgcacaggcgagcctaagtgtgtgtactcatacacacagataaaccgaaaggacactgggctttgtgctggcaaaggctgtgatgctgctgtggctttctatgggccctggggagtgtcagatgggaagtgctttgatggcatgttgttcagtgtatttaatggggtctcccatggcccgaggacccactgtgagcactccacccactgtggcgcagaacacggctggagtcatcatagcccaggtctttattgaaagggagtgttgacccagaagcctcatatagaaaccatttggcaaggtctggaccatctctctgcaactgacctgccttggccgcacagagggacccaaacccaaaaggcccagacccaagggagactgaatcacatttaccattacaccagctttcatttatttgtttccatatgatcatagggactgtattactaagtatgcttataaatgctatttacagactgttcccttttataaggtgaaagattaataaagaacaaaaaattgcctgtagaaaaccatgcctgaggccaggagcagtggctcatgcccgtaatcccagcactttgggagaccaagacaagcagatcacccaaggtcaggagttcaagaccagcctggccaacttggagaaaccccagctctacaaaaatacaaaaaaaaa

SEQ ID NO: 60914 - DNA, 447 bp, Homo sapiens
gaagcaacagaaggtaaacatttgcctacatctcagaatgagttcattgtggatttgacccaggaactcaaggtcctgattcccagcatggagatctgtccctgagccagaaagctctgttcttcctaggcttgcatacagtgatggtgagagatctcacgggcaaacggggcacaccttttgcacccctcctccctaggccgctccttatcagacaggtttgaggggaagttcccaaactgccagagagaatcagcacttcccagtcaggctttgttccctcctggctgtggtcatccgtttggggtaaccccaaagaataaatgctggagaggtttatttcccccaacaatccaaagagcaggggccccaccctagagctctctattgtcaggtgggtgtggcagggcactcaggtagtagagatgatggtggcctcctccttgg

SEQ ID NO: 60915 - DNA, 1346 bp, Homo sapiens
taaaacaagcaaattttattaaaggaaaattttgcaggtttaaggtttgcaggtgaaattttgtaggtgaaaaggtttacttttcaccagtctgttctggcatgcttctaatgatgtcagagtcacctggatcaatgatagccagtgtgcacactctgtagtattttccgcatgctgtgcccagttcaatattattgccactcaaagctgggcagttgttagcgagaatgaccaatttcgctttgccttgtctgatcatcttcagagtctgcttgtaccccaggacgtacttcccacttttcataacgagttggagcctagagttgatcgactccagcgactttttcgtcttctttgcggcagccctttcatcagtcttcccgcgtccgccgattcctcctccttggtcgccgcgtccttggctggcgtcagaaaaatggctacaaacttcctagcacatgagaagatctggttcgacaagttcaaatatgacgacgcagaaaggagattctacgagcagatgaacgggcctgtggcaggtgcctcccgccaggagaacggcgccagcgtgatcctccgtgacattgcgagagccagagagaacatccagaaatccctggctggaagctcaggccccggggcctccagcggcaccagcggagaccacggtgagctcgtcgtccggattgccagtctggaagtggagaaccagagtctgcgtggcgtggtacaggagctgcagcaggccatctccaagctggaggcccggctgaacgtgctggagaagagctcgcctggccaccgggccacggccccacagacccagcacgtatctcccatgcgccaagtggagcccccagccaagaagccagccacaccagcagaggatgacgaggatgatgacattgacctgtttggcagtgacaatgaggaggaggacaaggaggcggcacagctgcgggaggagcggctacggcagtacgcggagaagaaggccaagaagcctgcactggtggccaagtcctccatcctgctggatgtcaagccttgggatgatgagacggacatggctcagctggaggcctgtgtgcgctctatccagctggacgggctggtctggggggcttccaagctggtgcccgtgggctacggtatccggaagctacagattcagtgtgtggtggaggacgacaaggtggggacagacttgctggaggaggagatcaccaagtttgaggagcacgtgcagagtgtcgatatcgcagctttcaacaagatctgaagcctgagtgtgtgtacgtgcgcgcgtgcgtgaggccctgccacgattaaagactgagaccggc

SEQ ID NO: 60916 - DNA, 1436 bp, Homo sapiens
cccgcgcctgcgcgctggccgcctcgtgcgtcactcggctcttgccggctgccggacccttccccaccggcgacaccactggccgcgaagcgcagggggggcgcgcgcgctgccgcccgttcccagcacttgtgcagactcctccggggaagagcggcctccgcggtcatctccaacggaattctgcctttgaagtgtcggggcacggcgcgtcgagggtcctggcggccaggcggggcgtgtgcaagggtcgcgtcccccccccgggcccccggcccgtggctcttggtagagcccagtgcttcatttcccgtgcgcggcccgggcggccctccctttcatcaccctttcatcagtcttcccgcgtccgccgattcctcctccttggtcgccgcgtccttggctggcgtcagaaaaatggctacaaacttcctagcacatgagaagatctggttcgacaagttcaaatatgacgacgcagaaaggagattctacgagcagatgaacgggcctgtggcaggtgcctcccgccaggagaacggcgccagcgtgatcctccgtgacattgcgagagccagagagaacatccagaaatccctggctggaagctcaggccccggggcctccagcggcaccagcggacacgtatctcccatgcgccaagtggagcccccagccaagaagccagccacaccagcagaggatgacgaggatgatgacattgacctgtttggcagtgacaatgaggaggaggacaaggaggcggcacagctgcgggaggagcggctacggcagtacgcggagaagaaggccaagaagcctgcactggtggccaagtcctccatcctgctggatgtcaagccttgggatgatgagacggacatggctcagctggaggcctgtgtgcgctctatccagctggacgggctggtctggggggcttccaagctggtgcccgtgggctacggtatccggaagctacagattcagtgtgtggtggaggacgacaaggtggggacagacttgctggaggaggagatcaccaagtttgaggagcacgtgcagagtgtcgatatcgcagctttcaacaagatctgaagcctgagtgtgtgtacgtgcgcgcgtgcgtgaggccctgccacgattaaagactgagaccggcaaaaaaaacagaaacacaacacaaaaacagcaaaactacacaaaacacaaaaagcaaaacacacaaaacaagggcagcaaaacaccgagcccagaaaagaacccacatataaagacgcaccagccgacgaaaaagacgacacaaaaacaagaaaagaagcagaagacgccgcgcgcagccacaacacgagcaacaacaaaacccggaccacacagcgacacacgcaaataaaagacgagacaaaaaacaccccaccccaccacccagcagcccc

SEQ ID NO: 60917 - DNA, 350 bp, Homo sapiens
  misc_feature (35)..(35): n is a, c, g, or t
agcggcccctactactactaaattcgcggccgctncgtgggatgatgagacggacatggctcagctggaggcctgtgtgcgctctatccagctggacgggctggtctggggggcttccaagctggtgcccgtgggctacggtatccggaagctacagattcagtgtgtggtggaggacgacaaggtggggacagacttgctggaggaggagatcaccaagtttgaggagcacagtttgaggagccacgtgcagagtgtcgatatcgcagctttcaacaagatctgaagcctgagtgtgtgtacgtgcgcgcgtgcgtgaggccctgccacgattaaagactgagaccggc

SEQ ID NO: 60918 - DNA, 586 bp, Homo sapiens
caggccgcgttcgcccgccaggccccggcgtttttcggtgatcagttcgaccggcgacgcgcctgctccagcaattggatatctggatagggtggtcgggcagtctctgaagggggcggggatgctgttgctaagaagtagtactttcagaggctttaagtggaaggaagaaggcaaagggggcggagtgggttggggacctgatgagacgtcaggattggtttccagaatgaaggaccgcctggcagcagaagaactgtgtagctaaacttggggttgtccctgcccgacagggcggggtgcttcttaagttgacactgcctgcggctcacctcccagggaggcaggccaggccatctcacctgagcagcctccttctacagctccgcccaccccgtcatctggaccccatgagccttaagcagctggctcgcaggcagttggttacttccggagcccgtgtgtgcccagccccgttctgggggtgggggatgcagctgaggggctgggcaggtgtggaaggagcccccgagcgaccgtaacggcacgtggatactcaagagtctacctacagatgcagactact

SEQ ID NO: 60919 - DNA, 953 bp, Homo sapiens
  misc_feature (909)..(909): n is a, c, g, or t
  misc_feature (911)..(911): n is a, c, g, or t
  misc_feature (923)..(923): n is a, c, g, or t
taggctagtagaggcgggtggtgtgtcctggtcgcgcgtcttggctggcgtcagaaaaatggctacaaacttcctagcacatgagaagatctggttcgacaagttcaaatatgacgacgcagaaaggagattctacgagcagatgaacgggcctgtggcaggtgcctcccgccaggagaacggcgccagcgtgatcctccgtgacattgcgagagccagagagaacatccagaaatccctggctggaagctcaggccccggggcctccagcggcaccagcggagaccacggtgagctcgtcgtccggattgccagtctggaagtggagaaccagagtctgcgtggcgtggtacaggagctgcagcaggccatctccaagctggaggcccggctgaacgtgctggagaagagctcgcctggccaccgggccacggccccacagacccagcacgtatctcccatgcgccaagtggagcccccagccaagaagccagccacaccagcagaggatgacgaggatgatgacattgacctgtttggcagtgacaatgaggaggaggacaaggaggcggcacagctgcgggaggagcggctacggcagtacgcggagaagaaggccaagaagcctgcactggtggccaagtcctccatcctgctggatgtcaagccttgggatgatgagacggacatggctcagctggaggcctgtgtgcgctctatccagctggacgggctggtctggggggcttccaagctggtgcccgtgggctacggtatccggaagctacagattcagtgtgtggtggaggacgacaaggtggggacagacttgctggaggaggagatcaccaagtttgaggagcacagtttgaggagccactcattcgcgtttacagattgagcggtgtntntttgccgtgggnccgcccaaaagatggcgcgaaaaaacataa

SEQ ID NO: 60920 - DNA, 154 bp, Homo sapiens
ctatacgggggcggagtttacgggagaagggggcgcagtttgaggagccacgtgcagagtgtcgatatcgcagctttcaacaagatctgaagcctgagtgtgtgtacgtgcgcgcgtgcgtgaggccctgccacgattaaagactgagaccggc

SEQ ID NO: 60921 - DNA, 469 bp, Homo sapiens
cggacgcgtgggtcgacccacgcgtccgcttacaatgaggaggaggacaaggaggcggcacagctgcgggaggagcggctacggcagtacgcggagaagaaggccaagaagcctgcactggtggccaagtcctccatcctgctggatgtcaagccttgggatgatgagacggacatggctcagctggaggcctgtgtgcgctctatccagctggacgggctggtctggggggcttccaagctggtgcccgtgggctacggtatccggaagctacagattcagtgtgtggtggaggacgacaaggtggggacagacttgctggaggaggagatcaccaagtttgaggagcacagtttgaggagccacgtgcagagtgtcgatatcgcagctttcaacaagatctgaagcctgagtgtgtgtacgtgcgcgcgtgcgtgaggccctgccacgattaaagactgagaccggc

SEQ ID NO: 60922 - DNA, 415 bp, Homo sapiens
actctagagggatgccccgttgggccaacgcaccgtacaatgaggaggaggacaaggaggcggcacagctgcgggaggagcggctacggcagtacgcggagaagaaggccaagaagcctgcactggtggccaagtcctccatcctgctggatgtcaagccttgggatgatgagacggacatggctcagctggaggcctgtgtgcgctctatccagctggacgggctggtctggggggcttccaagctggtgcccgtgggctacggtatccggaagctacagattcagtgtgtggtggaggacgacaaggtggggacagacttgctggaggaggagatcaccaagtttgaggagcacagtttgaggagccacgtgcgttggcccaacacgtgcgttgctcaacgggccgagctcga

SEQ ID NO: 60923 - DNA, 476 bp, Homo sapiens
tagctagtgaggctggttgaatcggccgaggcccgcgtcgcgttattctcctccttggtcgcgcgtcttggctggcgtcagaaaaatggctacaaacttcctagcacatgagaagatctggttcgacaagttcaaatatgacgacgcagaaaggagattctactgggatgatgagacggacatggctcagctggaggcctgtgtgcgctctatccagctggacgggctggtctggggggcttccaagctggtgcccgtgggctacggtatccggaagctacagattcagtgtgtggtggaggacgacaaggtggggacagacttgctggaggaggagatcaccaagtttgaggagcacagtttgaggagccacgtgcagagtgtcgatatcgcagctttcaacaagatctgaagcctgagtgtgtgtacgtgcgcgcgtgcgtgaggccctgccacgattaaagactgagaccggc

SEQ ID NO: 60924 - DNA, 1026 bp, Homo sapiens
  misc_feature (8)..(8): n is a, c, g, or t
  misc_feature (19)..(19): n is a, c, g, or t
  misc_feature (896)..(896): n is a, c, g, or t
  misc_feature (905)..(905): n is a, c, g, or t
  misc_feature (911)..(911): n is a, c, g, or t
  misc_feature (932)..(933): n is a, c, g, or t
cccgcaanaaagtacttanggctaggtagcgaggctgggtggcgggtcgccgcgtccttggctggcgtcagaaaaatggctacaaacttcctagcacatgagaagatctggttcgacaagttcaaatatgacgacgcagaaaggagattctacgagcagatgaacgggcctgtggcaggtgcctcccgccaggagaacggcgccagcgtgatcctccgtgacattgcgagagccagagagaacatccagaaatccctggctggaagctcaggccccggggcctccagcggcaccagcggagaccacggtgagctcgtcgtccggattgccagtctggaagtggagaaccagagtctgcgtggcgtggtacaggagctgcagcaggccatctccaagctggaggcccggctgaacgtgctggagaagagctcgcctggccaccgggccacggccccacagacccagcacgtatctcccatgcgccaagtggagcccccagccaagaagccagccacaccagcagaggatgacgaggatgatgacattgacctgtttggcagtgacaatgaggaggaggacaaggaggcggcacagctgcgggaggagcggctacggcagtacgcggagaagaaggccaagaagcctgcactggtggccaagtcctccatcctgctggatgtcaagccttgggatgatgagacggacatggctcagctggaggcctgtgtgcgctctatccagctggacgggctggtctggggggcttccaagctggtgcccgtgggctacggtatccggaagctacagattcagtgtgtggtggaggacgacaaggtggggacagacttgctggaggaggagatcaccaagtttgaggagcaccgtgggccgactgntgggggggntcccanttggggcctgcgtgtgtttcnntttcaagttgaagcgatttgtgttccctgtggcgcctagaggcggaaaaaaaaaactcccttggggcggcgggggttttgcctgggaggcgtt

SEQ ID NO: 60925 - DNA, 976 bp, Homo sapiens
  misc_feature (820)..(820): n is a, c, g, or t
  misc_feature (826)..(827): n is a, c, g, or t
  misc_feature (837)..(837): n is a, c, g, or t
  misc_feature (847)..(848): n is a, c, g, or t
  misc_feature (852)..(852): n is a, c, g, or t
  misc_feature (858)..(858): n is a, c, g, or t
  misc_feature (861)..(861): n is a, c, g, or t
tggctaggtcgaggctggggtgttgattcctcctcctggtcgccgcgtccttggctggcgtcagaaaaatggctacaaacttcctagcacatgagaagatctggttcgacaagttcaaatatgacgacgcagaaaggagattctacgagcagatgaacgggcctgtggcaggtgcctcccgccagagctcaggccccggggcctccagcggcaccagcggagaccacggtgagctcgtcgtccggattgccagtctggaagtggagaaccagagtctgcgtggcgtggtacaggagctgcagcaggccatctccaagctggaggcccggctgaacgtgctggagaagagctcgcctggccaccgggccacggccccacagacccagcacgtatctcccatgcgccaagtggagcccccagccaagaagccagccacaccagcagaggatgacgaggatgatgacattgacctgtttggcagtgacaatgaggaggaggacaaggaggcggcacagctgcgggaggagcggctacggcagtacgcggagaagaaggccaagaagcctgcactggtggccaagtcctccatcctgctggatgtcaagccttgggatgatgagacggacatggctcagctggaggcctgtgtgcgctctatccagctggacgggctggtctggggggcttccaagctggtgcccgtgggctacggtatccggaagctacagattcagtgtgtggtggaggacgacaaggtggggacagacttgctggaggaggagatcaccaagtttgaggagcacagtttgaggagccaccnagtgtnnatatcgcagnttaaagattnnagcngaggtntgncggccggtgtaggccgccgattagatggaccggcaaaaaaagacaaaaaaaccggtctttgggggaaggaaaacgacgtagccagttgaaggaggggccaggaatatggcacagc

SEQ ID NO: 60926 - DNA, 998 bp, Homo sapiens
  misc_feature (829)..(829): n is a, c, g, or t
  misc_feature (831)..(831): n is a, c, g, or t
  misc_feature (835)..(835): n is a, c, g, or t
ccccacttaggctaggtaggaggcgggggtgaatcggccgagggcgatcctcctccttggtcgccgcgtccttggctggcgtcagaaaaatggctacaaacttcctagcacatgagaagatctggttcgacaagttcaaatatgacgacgcagaaaggagattctacgagcagatgaacgggcctgtggcaggtgcctcccgccagagctcaggccccggggcctccagcggcaccagcggagaccacggtgagctcgtcgtccggattgccagtctggaagtggagaaccagagtctgcgtggcgtggtacaggagctgcagcaggccatctccaagctggaggcccggctgaacgtgctggagaagagctcgcctggccaccgggccacggccccacagacccagcacgtatctcccatgcgccaagtggagcccccagccaagaagccagccacaccagcagaggatgacgaggatgatgacattgacctgtttggcagtgacaatgaggaggaggacaaggaggcggcacagctgcgggaggagcggctacggcagtacgcggagaagaaggccaagaagcctgcactggtggccaagtcctccatcctgctggatgtcaagccttgggatgatgagacggacatggctcagctggaggcctgtgtgcgctctatccagctggacgggctggtctggggggcttccaagctggtgcccgtgggctacggtatccggaagctacagattcagtgtgtggtggaggacgacaaggtggggacagacttgctggaggaggagatcaccaagtttgaggagcactcccngntggngcctgcgtggcattcgcagttcacagatctgaacgtgttttagttgccttgtagccgccgataaaagggaggaaaaaaaaaaacggtttggggcagaaagcgagcgtccccctcgaagaacgccatgtttaccgtctgatagggttcccagaaaacaacaccc

SEQ ID NO: 60927 - DNA, 590 bp, Homo sapiens
gtatgacatgattaccaattttactcggtaccttgcctctggcggtaccccccagcacgtatctcccatgcgccaagtggagcccccagccaagaagccagccacaccagcagaggatgacgaggatgatgacattgacctgtttggcagtgacaatgaggaggaggacaaggaggcggcacagctgcgggaggagcggctacggcagtacgcggagaagaaggccaagaagcctgcactggtggccaagtcctccatcctgctggatgtcaagccttgggatgatgagacggacatggctcagctggaggcctgtgtgcgctctatccagctggacgggctggtctggggggcttccaagctggtgcccgtgggctacggtatccggaagctacagattcagtgtgtggtggaggacgacaaggtggggacagacttgctggaggaggagatcaccaagtttgaggagcacagtttgaggagccacgtgcagagtgtcgatatcgcagctttcaacaagatctgaagcctgagtgtgtgtacgtgcgcgcgtgcgtgaggccctgccacgattaaagactgagaccggc

SEQ ID NO: 60928 - DNA, 937 bp, Homo sapiens
  misc_feature (262)..(263): n is a, c, g, or t
  misc_feature (266)..(266): n is a, c, g, or t
tcctgtaaggctgaatctcatcattctttaagaagagtgcgtgagaaagaaaaaatctgcttgtatgggacagaggcccactgcaagatactcctcttctcttacagatacgtcgagttcttcttttccatttttctttcaccctcatctctactggtcagttccatatcagcatcctccactgtctttttctcaccattctggaagtactgctgaagggcagtgtacagtttaaacacttggctgaaagaaagcttactgnnggncaagatcatgtgacgcagaacgcgcctaattaggcgcgttctgcgtggcgtggtacaggagctgcagcaggccatctccaagctggaggcccggctgaacgtgctggagaagagctcgcctggccaccgggccacggccccacagacccagcacgtatctcccatgcgccaagtggagcccccagccaagaagccagccacaccagcagaggatgacgaggatgatgacattgacctgtttggcagtgacaatgaggaggaggacaaggaggcggcacagctgcgggaggagcggctacggcagtacgcggagaagaaggccaagaagcctgcactggtggccaagtcctccatcctgctggatgtcaagccttgggatgatgagacggacatggctcagctggaggcctgtgtgcgctctatccagctggacgggctggtctggggggcttccaagctggtgcccgtgggctacggtatccggaagctacagattcagtgtgtggtggaggacgacaaggtggggacagacttgctggaggaggagatcaccaagtttgaggagcacgtgcagagtgtcgatatcgcagctttcaacaagatctgaagcctgagtgtgtgtacgtgcgcgcgtgcgtgaggccctgccacgattaaagactgagaccggc

SEQ ID NO: 60929 - DNA, 465 bp, Homo sapiens
ggtgttccagcagctgtttttggagaagacaaagaaaattaaagttttccctgaataaatgcattattatgaggttgtggcaggtgcctcccgccaggagaacggcgccagcgtgatcctccgtgacattgcgagagccagagagaacatccagaaatccctggctggaagctcaggccccggggcctccagcggcaccagcggagaccacggtgagctcgtcgtccggattgccagtctggaagtggagaaccagagtctgcgtggcgtggtacaggagctgcagcaggccatctccaagctggaggcccggctgaacgtgctggagaagagctcgcctggccaccgggccacggccccacagacccagcacgtatctcccatgcgccaagtggagcccccagccaagaagccagccacacctctagaagcctgccacaaccgggatcctctagacagccagcc

SEQ ID NO: 60930 - DNA, 2771 bp, Homo sapiens
ggctccactggttgccatcttccagagccctttcatcagtcttcccgcgtccgccgattcctcctccttggtcgccgcgtccttggctggcgtgtgagtaccgcggcccccgccggaaggagtcgggcgcgacagagacgcccgaggggccgggagggcgggcggcccgggctgcgccagaagctcgcgccgttagggactgaggcacaagtgcgccagcgcgggcttaggggccgtgggccaagtgcggcacttggggcgagcgcagagaggcggggcgacggaggccacgtggccggcttggagggcgtccgcgggacgggggcgccgggagcactgtctcacggcgcatcccggtcgtggaagcccctcggccaggctgctggggcctaaggcctgtgtttgctgccgtctccgtgggagaccagacatctgccccagctgtttctctggcctgcagaccttcgtacaccacgtctttgtcaagcaccagttactgcacgcatcagctgagcacggaggggataggcacggacgcaacacttttggaacttagacgctagtgagcacggaaaggaataagcctgaggccaaagcaaaatgaggagcgggaaggcctcctgcaccctggagaccgtgtgggaagacaagcacaagtatgaggaggccgagcggcgcttctacgaacacgaggccacacaggcggccgcctccgcccagcagctgccagccgaggggccagccatgaatgggcccggccaggacgaccctgaggacgctgatgaggcggaagcccctgacggcggcagcaggcgtgatcccaggaagagccaggacagcaggaagcccctgcagaaaaagaggaagcgctcccccaagagcgggctcggccccgcggacctggccctcctgggcctctcggccgaacgtgtgtggctggacaagtcacttttcgaccaggcagagagctcctaccgccagaagctggcagatgtggctgcccaggcagcctggcctcctgccttggccccttggggtctctgcacccatggaaaccaggtggcctgccaccacgtgacctgggggatctgggtcaacaagtcctccttcgaccaggctgagcgggccttcgtggagtggtctcaggccctgttgctggcccccgagggcagccgcaggcaggggactcccaacacaggccagcaggtggccgtccccgacctggcccaccagcccagcccaccggtcaatggccagcccccgctgggcagcctgcaggcactggttcgggaggtgtggctggagaagccccggtatgatgcagccgagaggggcttctacgaggccctgtttgacggccatcccccagggaaggtgcgcctgcaagagcgagccggcctggccgagggtgcccggcggggccgcagagaccggcggggccgcaacatcttagggaacaagcgggccgggctgcgacgggccgatggggaggccccctctgccttgccctactgttacttcctgcagaaggatgcagaggccccctggctcagcaagcctgcctacgacagcgccgagtgccgccaccacgctgccgaggccctgcgtgtggcctggtgcctcgaagctgcctccctgtctcaccgacccggtcctcggtctggcctgtccgtgtccagcctgagacccaagtaggagaaacgtgctgggtgggcacccagcctgggctgtgggcacagggacagccatcccaggctggggctcctccagcttcctcccctgcccacctggggtgggggctccccgagacccgtgggcccagcagagttgaatgcaggagcaggctgagtaaagcagaaaaatggctacaaacttcctagcacatgagaagatctggttcgacaagttcaaatatgacgacgcagaaaggagattctacgagcagatgaacgggcctgtggcaggtgcctcccgccaggagaacggcgccagcgtgatcctccgtgacattgcgagagccagagagaacatccagaaatccctggctggaagctcaggccccggggcctccagcggcaccagcggagaccacggtgagctcgtcgtccggattgccagtctggaagtggagaaccagagtctgcgtggcgtggtacaggagctgcagcaggccatctccaagctggaggcccggctgaacgtgctggagaagagctcgcctggccaccgggccacggccccacagacccagcacgtatctcccatgcgccaagtggagcccccagccaagaagccagccacaccagcagaggatgacgaggatgatgacattgacctgtttggcagtgacaatgaggaggaggacaaggaggcggcacagctgcgggaggagcggctacggcagtacgcggagaagaaggccaagaagcctgcactggtggccaagtcctccatcctgctggatgtcaagccttgggatgatgagacggacatggctcagctggaggcctgtgtgcgctctatccagctggacgggctggtctggggggcttccaagctggtgcccgtgggctacggtatccggaagctacagattcagtgtgtggtggaggacgacaaggtggggacagacttgctggaggaggagatcaccaagtttgaggagcacgtgcagagtgtcgatatcgcagctttcaacaagatctgaagcctgagtgtgtgtacgtgcgcgcgtgcgtgaggccctgccacgattaaagactgagaccggc

SEQ ID NO: 60931 - DNA, 1503 bp, Homo sapiens
ggctccactggttgccatcttccagagccctttcatcagtcttcccgcgtccgccgattcctcctccttggtcgccgcgtccttggctggcgtgtgagtaccgcggcccccgccggaaggagtcgggcgcgacagagacgcccgaggggccgggagggcgggcggcccgggctgcgccagaagctcgcgccgttagggactgaggcacaagtgcgccagcgcgggcttaggggccgtgggccaagtgcggcacttggggcgagcgcagagaggcggggcgacggaggccacgtggccggcttggagggcgtccgcgggacgggggcgccgggagcactgtctcacggcgcatcccggtcgtggaagcccctcggccaggctgctggggcctaaggcctgtgtttgctgccgtctccgtgggagaccagacatctgccccagctgtttctctggcctgcagaccttcgtacaccacgtctttgtcaagcaccagttactgcacgcatcagctgagcacggaggggataggcacggacgcaacacttttggaacttagacgctagtgagcacggaaaggaataagcctcagaaaaatggctacaaacttcctagcacatgagaagatctggttcgacaagttcaaatatgacgacgcagaaaggagattctacgagcagatgaacgggcctgtggcaggtgcctcccgccaggagaacggcgccagcgtgatcctccgtgacattgcgagagccagagagaacatccagaaatccctggctggaagctcaggccccggggcctccagcggcaccagcggagaccacggtgagctcgtcgtccggattgccagtctggaagtggagaaccagagtctgcgtggcgtggtacaggagctgcagcaggccatctccaagctggaggcccggctgaacgtgctggagaagagctcgcctggccaccgggccacggccccacagacccagcacgtatctcccatgcgccaagtggagcccccagccaagaagccagccacaccagcagaggatgacgaggatgatgacattgacctgtttggcagtgacaatgaggaggaggacaaggaggcggcacagctgcgggaggagcggctacggcagtacgcggagaagaaggccaagaagcctgcactggtggccaagtcctccatcctgctggatgtcaagccttgggatgatgagacggacatggctcagctggaggcctgtgtgcgctctatccagctggacgggctggtctggggggcttccaagctggtgcccgtgggctacggtatccggaagctacagattcagtgtgtggtggaggacgacaaggtggggacagacttgctggaggaggagatcaccaagtttgaggagcacgtgcagagtgtcgatatcgcagctttcaacaagatctgaagcctgagtgtgtgtacgtgcgcgcgtgcgtgaggccctgccacgattaaagactgagaccggc

SEQ ID NO: 60932 - DNA, 3179 bp, Homo sapiens
  misc_feature (3067)..(3067): n is a, c, g, or t
ggctccactggttgccatcttccagagccctttcatcagtcttcccgcgtccgccgattcctcctccttggtcgccgcgtccttggctggcgtgtgagtaccgcggcccccgccggaaggagtcgggcgcgacagagacgcccgaggggccgggagggcgggcggcccgggctgcgccagaagctcgcgccgttagggactgaggcacaagtgcgccagcgcgggcttaggggccgtgggccaagtgcggcacttggggcgagcgcagagaggcggggcgacggaggccacgtggccggcttggagggcgtccgcgggacgggggcgccgggagcactgtctcacggcgcatcccggtcgtggaagcccctcggccaggctgctggggcctaaggcctgtgtttgctgccgtctccgtgggagaccagacatctgccccagctgtttctctggcctgcagaccttcgtacaccacgtctttgtcaagcaccagttactgcacgcatcagctgagcacggaggggataggcacggacgcaacacttttggaacttagacgctagtgagcacggaaaggaataagcctgaggccaaagcaaaatgaggagcgggaaggcctcctgcaccctggagaccgtgtgggaagacaagcacaagtatgaggaggccgagcggcgcttctacgaacacgaggccacacaggcggccgcctccgcccagcagctgccagccgaggggccagccatgaatgggcccggccaggacgaccctgaggacgctgatgaggcggaagcccctgacggcggcagcaggcgtgatcccaggaagagccaggacagcaggaagcccctgcagaaaaagaggaagcgctcccccaagagcgggctcggccccgcggacctggccctcctgggcctctcggccgaacgtgtgtggctggacaagtcacttttcgaccaggcagagagctcctaccgccagaagctggcagatgtggctgcccaggcagcctggcctcctgccttggccccttggggtctctgcacccatggaaaccaggtggcctgccaccacgtgacctgggggatctgggtcaacaagtcctccttcgaccaggctgagcgggccttcgtggagtggtctcaggccctgttgctggcccccgagggcagccgcaggcaggggactcccaacacaggccagcaggtggccgtccccgacctggcccaccagcccagcccaccggtcaatggccagcccccgctgggcagcctgcaggcactggttcgggaggtgtggctggagaagccccggtatgatgcagccgagaggggcttctacgaggccctgtttgacggccatcccccagggaaggtgcgcctgcaagagcgagccggcctggccgagggtgcccggcggggccgcagagaccggcggggccgcaacatcttagggaacaagcgggccgggctgcgacgggccgatggggaggccccctctgccttgccctactgttacttcctgcagaaggatgcagaggccccctggctcagcaagcctgcctacgacagcgccgagtgccgccaccacgctgccgaggccctgcgtgtggcctggtgcctcgaagctgcctccctgtctcaccgacccggtcctcggtctggcctgtccgtgtccagcctgagacccaagtaggagaaacgtgctgggtgggcacccagcctgggctgtgggcacagggacagccatcccaggctggggctcctccagcttcctcccctgcccacctggggtgggggctccccgagacccgtgggcccagcagagttgaatgcaggagcaggctgagtaaagcagaaaaatggctacaaacttcctagcacatgagaagatctggttcgacaagttcaaatatgacgacgcagaaaggagattctacgagcagatgaacgggcctgtggcaggtgcctcccgccaggagaacggcgccagcgtgatcctccgtgacattgcgagagccagagagaacatccagaaatccctggctggaagctcaggccccggggcctccagcggcaccagcggagaccacggtgagctcgtcgtccggattgccagtctggaagtggagaaccagagtctgcgtggcgtggtacaggagctgcagcaggccatctccaagctggaggcccggctgaacgtgctggagaagagctcgcctggccaccgggccacggccccacagacccagcacgtatctcccatgcgccaagtggagcccccagccaagaagccagccacaccagcagaggatgacgaggatgatgacattgacctgtttggcagtgacaatgaggaggaggacaaggaggcggcacagctgcgggaggagcggctacggcagtacgcggagaagaaggccaagaagcctgcactggtggccaagtcctccatcctgctggatgtcaagccttgggatgatgagacggacatggctcagctggaggcctgtgtgcgctctatccagctggacgggctggtctggggggcttccaagctggtgcccgtgggctacggtatccggaagctacagattcagtgtgtggtggaggacgacaaggtggggacagacttgctggaggaggagatcaccaagtttgaggagcacgtgcagagtgtcgatatcgcagctttcaacaagatctgaagcctgagtgtgtgtacgtgcgcgcgtgcgtgaggccctgccacgattaaagactgagaccggcaaaaaaaaaaaaaaaaaaaaaaggggggggggggtaaaaaatatacccccgggggggccccaattacgggaaacccccccgttttcggggcaccagaggggcggccctacatggggggaggggcgaatttaataaagcaaggggacagcggggcggggcgttattaaacaacggttttgtggtagcggggggaacaacccggtctagctgggggatcttgggggaggagggaaaccccttattctgggggggggcgacatattggggagaacactacctctacggagagatattanaaggaccgagggggaactattaacactttcaggcgtgtatagtgtgtgttaccacgacgtcatatgctggcgggagaaaattggccacgggagattattgtgaaacttatca

SEQ ID NO: 60933 - DNA, 3191 bp, Homo sapiens
  misc_feature (3191)..(3191): n is a, c, g, or t
ggctccactggttgccatcttccagagccctttcatcagtcttcccgcgtccgccgattcctcctccttggtcgccgcgtccttggctggcgtgtgagtaccgcggcccccgccggaaggagtcgggcgcgacagagacgcccgaggggccgggagggcgggcggcccgggctgcgccagaagctcgcgccgttagggactgaggcacaagtgcgccagcgcgggcttaggggccgtgggccaagtgcggcacttggggcgagcgcagagaggcggggcgacggaggccacgtggccggcttggagggcgtccgcgggacgggggcgccgggagcactgtctcacggcgcatcccggtcgtggaagcccctcggccaggctgctggggcctaaggcctgtgtttgctgccgtctccgtgggagaccagacatctgccccagctgtttctctggcctgcagaccttcgtacaccacgtctttgtcaagcaccagttactgcacgcatcagctgagcacggaggggataggcacggacgcaacacttttggaacttagacgctagtgagcacggaaaggaataagcctgaggccaaagcaaaatgaggagcgggaaggcctcctgcaccctggagaccgtgtgggaagacaagcacaagtatgaggaggccgagcggcgcttctacgaacacgaggccacacaggcggccgcctccgcccagcagctgccagccgaggggccagccatgaatgggcccggccaggacgaccctgaggacgctgatgaggcggaagcccctgacggcggcagcaggcgtgatcccaggaagagccaggacagcaggaagcccctgcagaaaaagaggaagcgctcccccaagagcgggctcggccccgcggacctggccctcctgggcctctcggccgaacgtgtgtggctggacaagtcacttttcgaccaggcagagagctcctaccgccagaagctggcagatgtggctgcccaggcagcctggcctcctgccttggccccttggggtctctgcacccatggaaaccaggtggcctgccaccacgtgacctgggggatctgggtcaacaagtcctccttcgaccaggctgagcgggccttcgtggagtggtctcaggccctgttgctggcccccgagggcagccgcaggcaggggactcccaacacaggccagcaggtggccgtccccgacctggcccaccagcccagcccaccggtcaatggccagcccccgctgggcagcctgcaggcactggttcgggaggtgtggctggagaagccccggtatgatgcagccgagaggggcttctacgaggccctgtttgacggccatcccccagggaaggtgcgcctgcaagagcgagccggcctggccgagggtgcccggcggggccgcagagaccggcggggccgcaacatcttagggaacaagcgggccgggctgcgacgggccgatggggaggccccctctgccttgccctactgttacttcctgcagaaggatgcagaggccccctggctcagcaagcctgcctacgacagcgccgagtgccgccaccacgctgccgaggccctgcgtgtggcctggtgcctcgaagctgcctccctgtctcaccgacccggtcctcggtctggcctgtccgtgtccagcctgagacccaagtaggagaaacgtgctgggtgggcacccagcctgggctgtgggcacagggacagccatcccaggctggggctcctccagcttcctcccctgcccacctggggtgggggctccccgagacccgtgggcccagcagagttgaatgcaggagcaggctgagtaaagcagaaaaatggctacaaacttcctagcacatgagaagatctggttcgacaagttcaaatatgacgacgcagaaaggagattctacgagcagatgaacgggcctgtggcaggtgcctcccgccaggagaacggcgccagcgtgatcctccgtgacattgcgagagccagagagaacatccagaaatccctggctggaagctcaggccccggggcctccagcggcaccagcggagaccacggtgagctcgtcgtccggattgccagtctggaagtggagaaccagagtctgcgtggcgtggtacaggagctgcagcaggccatctccaagctggaggcccggctgaacgtgctggagaagagctcgcctggccaccgggccacggccccacagacccagcacgtatctcccatgcgccaagtggagcccccagccaagaagccagccacaccagcagaggatgacgaggatgatgacattgacctgtttggcagtgacaatgaggaggaggacaaggaggcggcacagctgcgggaggagcggctacggcagtacgcggagaagaaggccaagaagcctgcactggtggccaagtcctccatcctgctggatgtcaagccttgggatgatgagacggacatggctcagctggaggcctgtgtgcgctctatccagctggacgggctggtctggggggcttccaagctggtgcccgtgggctacggtatccggaagctacagattcagtgtgtggtggaggacgacaaggtggggacagacttgctggaggaggagatcaccaagtttgaggagcacgtgcagagtgtcgatatcgcagctttcaacaagatctgaagcctgagtgtgtgtacgtgcgcgcgtgcgtgaggccctgccacgattaaagactgagaccggcaaaaaacagagacaacgaaacagagaccaaaaagcaaacaggagggagacaaaaaggacgggaggagaaacacagaacgatacaaaggcgcgcaagtgacaaacagtgcggcagcaagcgcgagacaaagagggaaacagcgggaccaacaagcggcaccaaaccgcaacggcgagagcaggataagcaagaacgcagaagcgaacgaggagcgggagaagaagccgacgcagacgagaaaccgagcagcacaacgggggaagaacaaccgagaggacgagcacgagcgcagaaagcagaacaaagacctcacaaagccgaaccagacgaagagaggaagaaagaagcgaggacaggagagccacgcagaggccagggagacagggagcaagagacggaggcacccgcgcagacgacacn

SEQ ID NO: 60934 - DNA, 1431 bp, Homo sapiens
ggctccactggttgccatcttccagagccctttcatcagtcttcccgcgtccgccgattcctcctccttggtcgccgcgtccttggctggcgtgtgagtaccgcggcccccgccggaaggagtcgggcgcgacagagacgcccgaggggccgggagggcgggcggcccgggctgcgccagaagctcgcgccgttagggactgaggcacaagtgcgccagcgcgggcttaggggccgtgggccaagtgcggcacttggggcgagcgcagagaggcggggcgacggaggccacgtggccggcttggagggcgtccgcgggacgggggcgccgggagcactgtctcacggcgcatcccggtcgtggaagcccctcggccaggctgctggggcctaaggcctgtgtttgctgccgtctccgtgggagaccagacatctgccccagctgtttctctggcctgcagaccttcgtacaccacgtctttgtcaagcaccagttactgcacgcatcagctgagcacggaggggataggcacggacgcaacacttttggaacttagacgctagtgagcacggaaaggaataagcctcagaaaaatggctacaaacttcctagcacatgagaagatctggttcgacaagttcaaatatgacgacgcagaaaggagattctacgagcagatgaacgggcctgtggcaggtgcctcccgccagagctcaggccccggggcctccagcggcaccagcggagaccacggtgagctcgtcgtccggattgccagtctggaagtggagaaccagagtctgcgtggcgtggtacaggagctgcagcaggccatctccaagctggaggcccggctgaacgtgctggagaagagctcgcctggccaccgggccacggccccacagacccagcacgtatctcccatgcgccaagtggagcccccagccaagaagccagccacaccagcagaggatgacgaggatgatgacattgacctgtttggcagtgacaatgaggaggaggacaaggaggcggcacagctgcgggaggagcggctacggcagtacgcggagaagaaggccaagaagcctgcactggtggccaagtcctccatcctgctggatgtcaagccttgggatgatgagacggacatggctcagctggaggcctgtgtgcgctctatccagctggacgggctggtctggggggcttccaagctggtgcccgtgggctacggtatccggaagctacagattcagtgtgtggtggaggacgacaaggtggggacagacttgctggaggaggagatcaccaagtttgaggagcacgtgcagagtgtcgatatcgcagctttcaacaagatctgaagcctgagtgtgtgtacgtgcgcgcgtgcgtgaggccctgccacgattaaagactgagaccggc

SEQ ID NO: 60935 - DNA, 3105 bp, Homo sapiens
ggctccactggttgccatcttccagagccctttcatcagtcttcccgcgtccgccgattcctcctccttggtcgccgcgtccttggctggcgtgtgagtaccgcggcccccgccggaaggagtcgggcgcgacagagacgcccgaggggccgggagggcgggcggcccgggctgcgccagaagctcgcgccgttagggactgaggcacaagtgcgccagcgcgggcttaggggccgtgggccaagtgcggcacttggggcgagcgcagagaggcggggcgacggaggccacgtggccggcttggagggcgtccgcgggacgggggcgccgggagcactgtctcacggcgcatcccggtcgtggaagcccctcggccaggctgctggggcctaaggcctgtgtttgctgccgtctccgtgggagaccagacatctgccccagctgtttctctggcctgcagaccttcgtacaccacgtctttgtcaagcaccagttactgcacgcatcagctgagcacggaggggataggcacggacgcaacacttttggaacttagacgctagtgagcacggaaaggaataagcctgaggccaaagcaaaatgaggagcgggaaggcctcctgcaccctggagaccgtgtgggaagacaagcacaagtatgaggaggccgagcggcgcttctacgaacacgaggccacacaggcggccgcctccgcccagcagctgccagccgaggggccagccatgaatgggcccggccaggacgaccctgaggacgctgatgaggcggaagcccctgacggcggcagcaggcgtgatcccaggaagagccaggacagcaggaagcccctgcagaaaaagaggaagcgctcccccaagagcgggctcggccccgcggacctggccctcctgggcctctcggccgaacgtgtgtggctggacaagtcacttttcgaccaggcagagagctcctaccgccagaagctggcagatgtggctgcccaggcagcctggcctcctgccttggccccttggggtctctgcacccatggaaaccaggtggcctgccaccacgtgacctgggggatctgggtcaacaagtcctccttcgaccaggctgagcgggccttcgtggagtggtctcaggccctgttgctggcccccgagggcagccgcaggcaggggactcccaacacaggccagcaggtggccgtccccgacctggcccaccagcccagcccaccggtcaatggccagcccccgctgggcagcctgcaggcactggttcgggaggtgtggctggagaagccccggtatgatgcagccgagaggggcttctacgaggccctgtttgacggccatcccccagggaaggtgcgcctgcaagagcgagccggcctggccgagggtgcccggcggggccgcagagaccggcggggccgcaacatcttagggaacaagcgggccgggctgcgacgggccgatggggaggccccctctgccttgccctactgttacttcctgcagaaggatgcagaggccccctggctcagcaagcctgcctacgacagcgccgagtgccgccaccacgctgccgaggccctgcgtgtggcctggtgcctcgaagctgcctccctgtctcaccgacccggtcctcggtctggcctgtccgtgtccagcctgagacccaagtaggagaaacgtgctgggtgggcacccagcctgggctgtgggcacagggacagccatcccaggctggggctcctccagcttcctcccctgcccacctggggtgggggctccccgagacccgtgggcccagcagagttgaatgcaggagcaggctgagtaaagcagaaaaatggctacaaacttcctagcacatgagaagatctggttcgacaagttcaaatatgacgacgcagaaaggagattctacgagcagatgaacgggcctgtggcaggtgcctcccgccaggagaacggcgccagcgtgatcctccgtgacattgcgagagccagagagaacatccagaaatccctggctggaagctcaggccccggggcctccagcggcaccagcggagaccacggtgagctcgtcgtccggattgccagtctggaagtggagaaccagagtctgcgtggcgtggtacaggagctgcagcaggccatctccaagctggaggcccggctgaacgtgctggagaagagctcgcctggccaccgggccacggccccacagacccagcacgtatctcccatgcgccaagtggagcccccagccaagaagccagccacaccagcagaggatgacgaggatgatgacattgacctgtttggcagtgacaatgaggaggaggacaaggaggcggcacagctgcgggaggagcggctacggcagtacgcggagaagaaggccaagaagcctgcactggtggccaagtcctccatcctgctggatgtcaagccttgggatgatgagacggacatggctcagctggaggcctgtgtgcgctctatccagctggacgggctggtctggggggcttccaagctggtgcccgtgggctacggtatccggaagctacagattcagtgtgtggtggaggacgacaaggtggggacagacttgctggaggaggagatcaccaagtttgaggagcacgtgcagagtgtcgatatcgcagctttcaacaagatctgaagcctgagtgtgtgtacgtgcgcgcgtgcgtgaggccctgccacgattaaagactgagaccggcaaaaaaacacaccacacacaccaaaaaacgttgtggcggccctaggcgccccgaaaaacgttctatagaacactacctcgtgagcccagaggcccaatgtggtcacgcacacctggcgcaaaagccgtgtcaccgagaaaaaaccgcggcgccgaccaccaccacgcggcggagggactccgccaaacagcagaacaagcaaccggcggggaacacaccagagggggcaccagaaacactccacgagtgcggaccccgcgagggccacacagagggacacccaaacaccgggggccacacgcagcaccagcatacaagagtcgcccgccacgga

SEQ ID NO: 60936 - DNA, 2804 bp, Homo sapiens
ggctccactggttgccatcttccagagccctttcatcagtcttcccgcgtccgccgattcctcctccttggtcgccgcgtccttggctggcgtgtgagtaccgcggcccccgccggaaggagtcgggcgcgacagagacgcccgaggggccgggagggcgggcggcccgggctgcgccagaagctcgcgccgttagggactgaggcacaagtgcgccagcgcgggcttaggggccgtgggccaagtgcggcacttggggcgagcgcagagaggcggggcgacggaggccacgtggccggcttggagggcgtccgcgggacgggggcgccgggagcactgtctcacggcgcatcccggtcgtggaagcccctcggccaggctgctggggcctaaggcctgtgtttgctgccgtctccgtgggagaccagacatctgccccagctgtttctctggcctgcagaccttcgtacaccacgtctttgtcaagcaccagttactgcacgcatcagctgagcacggaggggataggcacggacgcaacacttttggaacttagacgctagtgagcacggaaaggaataagcctgaggccaaagcaaaatgaggagcgggaaggcctcctgcaccctggagaccgtgtgggaagacaagcacaagtatgaggaggccgagcggcgcttctacgaacacgaggccacacaggcggccgcctccgcccagcagctgccagccgaggggccagccatgaatgggcccggccaggacgaccctgaggacgctgatgaggcggaagcccctgacggcggcagcaggcgtgatcccaggaagagccaggacagcaggaagcccctgcagaaaaagaggaagcgctcccccaagagcgggctcggccccgcggacctggccctcctgggcctctcggccgaacgtgtgtggctggacaagtcacttttcgaccaggcagagagctcctaccgccagaagctggcagatgtggctgcccaggcagcctggcctcctgccttggccccttggggtctctgcacccatggaaaccaggtggcctgccaccacgtgacctgggggatctgggtcaacaagtcctccttcgaccaggctgagcgggccttcgtggagtggtctcaggccctgttgctggcccccgagggcagccgcaggcaggggactcccaacacaggccagcaggtggccgtccccgacctggcccaccagcccagcccaccggtcaatggccagcccccgctgggcagcctgcaggcactggttcgggaggtgtggctggagaagccccggtatgatgcagccgagaggggcttctacgaggccctgtttgacggccatcccccagggaaggtgcgcctgcaagagcgagccggcctggccgagggtgcccggcggggccgcagagaccggcggggccgcaacatcttagggaacaagcgggccgggctgcgacgggccgatggggaggccccctctgccttgccctactgttacttcctgcagaaggatgcagaggccccctggctcagcaagcctgcctacgacagcgccgagtgccgccaccacgctgccgaggccctgcgtgtggcctggtgcctcgaagctgcctccctgtctcaccgacccggtcctcggtctggcctgtccgtgtccagcctgagacccaagtaggagaaacgtgctgggtgggcacccagcctgggctgtgggcacagggacagccatcccaggctggggctcctccagcttcctcccctgcccacctggggtgggggctccccgagacccgtgggcccagcagagttgaatgcaggagcaggctgagtaaagcagaaaaatggctacaaacttcctagcacatgagaagatctggttcgacaagttcaaatatgacgacgcagaaaggagattctacgagcagatgaacgggcctgtggcaggtgcctcccgccaggagaacggcgccagcgtgatcctccgtgacattgcgagagccagagagaacatccagaaatccctggctggaagctcaggccccggggcctccagcggcaccagcggagaccacggtgagctcgtcgtccggattgccagtctggaagtggagaaccagagtctgcgtggcgtggtacaggagctgcagcaggccatctccaagctggaggcccggctgaacgtgctggagaagagctcgcctggccaccgggccacggccccacagacccagcacgtatctcccatgcgccaagtggagcccccagccaagaagccagccacaccagcagaggatgacgaggatgatgacattgacctgtttggcagtgacaatgaggaggaggacaaggaggcggcacagctgcgggaggagcggctacggcagtacgcggagaagaaggccaagaagcctgcactggtggccaagtcctccatcctgctggatgtcaagccttgggatgatgagacggacatggctcagctggaggcctgtgtgcgctctatccagctggacgggctggtctggggggcttccaagctggtgcccgtgggctacggtatccggaagctacagattcagtgtgtggtggaggacgacaaggtggggacagacttgctggaggaggagatcaccaagtttgaggagcacgtgcagagtgtcgatatcgcagctttcaacaagatctgaagcctgagtgtgtgtacgtgcgcgcgtgcgtgaggccctgccacgattaaagactgagaccggcaaaaaaaacaaaaaaaaataaaaaacaaaaaca

SEQ ID NO: 60937 - DNA, 2795 bp, Homo sapiens
ggctccactggttgccatcttccagagccctttcatcagtcttcccgcgtccgccgattcctcctccttggtcgccgcgtccttggctggcgtgtgagtaccgcggcccccgccggaaggagtcgggcgcgacagagacgcccgaggggccgggagggcgggcggcccgggctgcgccagaagctcgcgccgttagggactgaggcacaagtgcgccagcgcgggcttaggggccgtgggccaagtgcggcacttggggcgagcgcagagaggcggggcgacggaggccacgtggccggcttggagggcgtccgcgggacgggggcgccgggagcactgtctcacggcgcatcccggtcgtggaagcccctcggccaggctgctggggcctaaggcctgtgtttgctgccgtctccgtgggagaccagacatctgccccagctgtttctctggcctgcagaccttcgtacaccacgtctttgtcaagcaccagttactgcacgcatcagctgagcacggaggggataggcacggacgcaacacttttggaacttagacgctagtgagcacggaaaggaataagcctgaggccaaagcaaaatgaggagcgggaaggcctcctgcaccctggagaccgtgtgggaagacaagcacaagtatgaggaggccgagcggcgcttctacgaacacgaggccacacaggcggccgcctccgcccagcagctgccagccgaggggccagccatgaatgggcccggccaggacgaccctgaggacgctgatgaggcggaagcccctgacggcggcagcaggcgtgatcccaggaagagccaggacagcaggaagcccctgcagaaaaagaggaagcgctcccccaagagcgggctcggccccgcggacctggccctcctgggcctctcggccgaacgtgtgtggctggacaagtcacttttcgaccaggcagagagctcctaccgccagaagctggcagatgtggctgcccaggcagcctggcctcctgccttggccccttggggtctctgcacccatggaaaccaggtggcctgccaccacgtgacctgggggatctgggtcaacaagtcctccttcgaccaggctgagcgggccttcgtggagtggtctcaggccctgttgctggcccccgagggcagccgcaggcaggggactcccaacacaggccagcaggtggccgtccccgacctggcccaccagcccagcccaccggtcaatggccagcccccgctgggcagcctgcaggcactggttcgggaggtgtggctggagaagccccggtatgatgcagccgagaggggcttctacgaggccctgtttgacggccatcccccagggaaggtgcgcctgcaagagcgagccggcctggccgagggtgcccggcggggccgcagagaccggcggggccgcaacatcttagggaacaagcgggccgggctgcgacgggccgatggggaggccccctctgccttgccctactgttacttcctgcagaaggatgcagaggccccctggctcagcaagcctgcctacgacagcgccgagtgccgccaccacgctgccgaggccctgcgtgtggcctggtgcctcgaagctgcctccctgtctcaccgacccggtcctcggtctggcctgtccgtgtccagcctgagacccaagtaggagaaacgtgctgggtgggcacccagcctgggctgtgggcacagggacagccatcccaggctggggctcctccagcttcctcccctgcccacctggggtgggggctccccgagacccgtgggcccagcagagttgaatgcaggagcaggctgagtaaagcagaaaaatggctacaaacttcctagcacatgagaagatctggttcgacaagttcaaatatgacgacgcagaaaggagattctacgagcagatgaacgggcctgtggcaggtgcctcccgccaggagaacggcgccagcgtgatcctccgtgacattgcgagagccagagagaacatccagaaatccctggctggaagctcaggccccggggcctccagcggcaccagcggagaccacggtgagctcgtcgtccggattgccagtctggaagtggagaaccagagtctgcgtggcgtggtacaggagctgcagcaggccatctccaagctggaggcccggctgaacgtgctggagaagagctcgcctggccaccgggccacggccccacagacccagcacgtatctcccatgcgccaagtggagcccccagccaagaagccagccacaccagcagaggatgacgaggatgatgacattgacctgtttggcagtgacaatgaggaggaggacaaggaggcggcacagctgcgggaggagcggctacggcagtacgcggagaagaaggccaagaagcctgcactggtggccaagtcctccatcctgctggatgtcaagccttgggatgatgagacggacatggctcagctggaggcctgtgtgcgctctatccagctggacgggctggtctggggggcttccaagctggtgcccgtgggctacggtatccggaagctacagattcagtgtgtggtggaggacgacaaggtggggacagacttgctggaggaggagatcaccaagtttgaggagcacgtgcagagtgtcgatatcgcagctttcaacaagatctgaagcctgagtgtgtgtacgtgcgcgcgtgcgtgaggccctgccacgattaaagactgagaccggcaaaaaaaaaaagtcgtatcgatgt

SEQ ID NO: 60938 - DNA, 2819 bp, Homo sapiens
ggctccactggttgccatcttccagagccctttcatcagtcttcccgcgtccgccgattcctcctccttggtcgccgcgtccttggctggcgtgtgagtaccgcggcccccgccggaaggagtcgggcgcgacagagacgcccgaggggccgggagggcgggcggcccgggctgcgccagaagctcgcgccgttagggactgaggcacaagtgcgccagcgcgggcttaggggccgtgggccaagtgcggcacttggggcgagcgcagagaggcggggcgacggaggccacgtggccggcttggagggcgtccgcgggacgggggcgccgggagcactgtctcacggcgcatcccggtcgtggaagcccctcggccaggctgctggggcctaaggcctgtgtttgctgccgtctccgtgggagaccagacatctgccccagctgtttctctggcctgcagaccttcgtacaccacgtctttgtcaagcaccagttactgcacgcatcagctgagcacggaggggataggcacggacgcaacacttttggaacttagacgctagtgagcacggaaaggaataagcctgaggccaaagcaaaatgaggagcgggaaggcctcctgcaccctggagaccgtgtgggaagacaagcacaagtatgaggaggccgagcggcgcttctacgaacacgaggccacacaggcggccgcctccgcccagcagctgccagccgaggggccagccatgaatgggcccggccaggacgaccctgaggacgctgatgaggcggaagcccctgacggcggcagcaggcgtgatcccaggaagagccaggacagcaggaagcccctgcagaaaaagaggaagcgctcccccaagagcgggctcggccccgcggacctggccctcctgggcctctcggccgaacgtgtgtggctggacaagtcacttttcgaccaggcagagagctcctaccgccagaagctggcagatgtggctgcccaggcagcctggcctcctgccttggccccttggggtctctgcacccatggaaaccaggtggcctgccaccacgtgacctgggggatctgggtcaacaagtcctccttcgaccaggctgagcgggccttcgtggagtggtctcaggccctgttgctggcccccgagggcagccgcaggcaggggactcccaacacaggccagcaggtggccgtccccgacctggcccaccagcccagcccaccggtcaatggccagcccccgctgggcagcctgcaggcactggttcgggaggtgtggctggagaagccccggtatgatgcagccgagaggggcttctacgaggccctgtttgacggccatcccccagggaaggtgcgcctgcaagagcgagccggcctggccgagggtgcccggcggggccgcagagaccggcggggccgcaacatcttagggaacaagcgggccgggctgcgacgggccgatggggaggccccctctgccttgccctactgttacttcctgcagaaggatgcagaggccccctggctcagcaagcctgcctacgacagcgccgagtgccgccaccacgctgccgaggccctgcgtgtggcctggtgcctcgaagctgcctccctgtctcaccgacccggtcctcggtctggcctgtccgtgtccagcctgagacccaagtaggagaaacgtgctgggtgggcacccagcctgggctgtgggcacagggacagccatcccaggctggggctcctccagcttcctcccctgcccacctggggtgggggctccccgagacccgtgggcccagcagagttgaatgcaggagcaggctgagtaaagcagaaaaatggctacaaacttcctagcacatgagaagatctggttcgacaagttcaaatatgacgacgcagaaaggagattctacgagcagatgaacgggcctgtggcaggtgcctcccgccaggagaacggcgccagcgtgatcctccgtgacattgcgagagccagagagaacatccagaaatccctggctggaagctcaggccccggggcctccagcggcaccagcggagaccacggtgagctcgtcgtccggattgccagtctggaagtggagaaccagagtctgcgtggcgtggtacaggagctgcagcaggccatctccaagctggaggcccggctgaacgtgctggagaagagctcgcctggccaccgggccacggccccacagacccagcacgtatctcccatgcgccaagtggagcccccagccaagaagccagccacaccagcagaggatgacgaggatgatgacattgacctgtttggcagtgacaatgaggaggaggacaaggaggcggcacagctgcgggaggagcggctacggcagtacgcggagaagaaggccaagaagcctgcactggtggccaagtcctccatcctgctggatgtcaagccttgggatgatgagacggacatggctcagctggaggcctgtgtgcgctctatccagctggacgggctggtctggggggcttccaagctggtgcccgtgggctacggtatccggaagctacagattcagtgtgtggtggaggacgacaaggtggggacagacttgctggaggaggagatcaccaagtttgaggagcacgtgcagagtgtcgatatcgcagctttcaacaagatctgaagcctgagtgtgtgtacgtgcgcgcgtgcgtgaggccctgccacgattaaagactgagaccggcagcaaagaaccacacgccagcacaaggaaccacacgaagaaccacacg

SEQ ID NO: 60939 - DNA, 3066 bp, Homo sapiens
ggctccactggttgccatcttccagagccctttcatcagtcttcccgcgtccgccgattcctcctccttggtcgccgcgtccttggctggcgtgtgagtaccgcggcccccgccggaaggagtcgggcgcgacagagacgcccgaggggccgggagggcgggcggcccgggctgcgccagaagctcgcgccgttagggactgaggcacaagtgcgccagcgcgggcttaggggccgtgggccaagtgcggcacttggggcgagcgcagagaggcggggcgacggaggccacgtggccggcttggagggcgtccgcgggacgggggcgccgggagcactgtctcacggcgcatcccggtcgtggaagcccctcggccaggctgctggggcctaaggcctgtgtttgctgccgtctccgtgggagaccagacatctgccccagctgtttctctggcctgcagaccttcgtacaccacgtctttgtcaagcaccagttactgcacgcatcagctgagcacggaggggataggcacggacgcaacacttttggaacttagacgctagtgagcacggaaaggaataagcctgaggccaaagcaaaatgaggagcgggaaggcctcctgcaccctggagaccgtgtgggaagacaagcacaagtatgaggaggccgagcggcgcttctacgaacacgaggccacacaggcggccgcctccgcccagcagctgccagccgaggggccagccatgaatgggcccggccaggacgaccctgaggacgctgatgaggcggaagcccctgacggcggcagcaggcgtgatcccaggaagagccaggacagcaggaagcccctgcagaaaaagaggaagcgctcccccaagagcgggctcggccccgcggacctggccctcctgggcctctcggccgaacgtgtgtggctggacaagtcacttttcgaccaggcagagagctcctaccgccagaagctggcagatgtggctgcccaggcagcctggcctcctgccttggccccttggggtctctgcacccatggaaaccaggtggcctgccaccacgtgacctgggggatctgggtcaacaagtcctccttcgaccaggctgagcgggccttcgtggagtggtctcaggccctgttgctggcccccgagggcagccgcaggcaggggactcccaacacaggccagcaggtggccgtccccgacctggcccaccagcccagcccaccggtcaatggccagcccccgctgggcagcctgcaggcactggttcgggaggtgtggctggagaagccccggtatgatgcagccgagaggggcttctacgaggccctgtttgacggccatcccccagggaaggtgcgcctgcaagagcgagccggcctggccgagggtgcccggcggggccgcagagaccggcggggccgcaacatcttagggaacaagcgggccgggctgcgacgggccgatggggaggccccctctgccttgccctactgttacttcctgcagaaggatgcagaggccccctggctcagcaagcctgcctacgacagcgccgagtgccgccaccacgctgccgaggccctgcgtgtggcctggtgcctcgaagctgcctccctgtctcaccgacccggtcctcggtctggcctgtccgtgtccagcctgagacccaagtaggagaaacgtgctgggtgggcacccagcctgggctgtgggcacagggacagccatcccaggctggggctcctccagcttcctcccctgcccacctggggtgggggctccccgagacccgtgggcccagcagagttgaatgcaggagcaggctgagtaaagcagaaaaatggctacaaacttcctagcacatgagaagatctggttcgacaagttcaaatatgacgacgcagaaaggagattctacgagcagatgaacgggcctgtggcaggtgcctcccgccaggagaacggcgccagcgtgatcctccgtgacattgcgagagccagagagaacatccagaaatccctggctggaagctcaggccccggggcctccagcggcaccagcggagaccacggtgagctcgtcgtccggattgccagtctggaagtggagaaccagagtctgcgtggcgtggtacaggagctgcagcaggccatctccaagctggaggcccggctgaacgtgctggagaagagctcgcctggccaccgggccacggccccacagacccagcacgtatctcccatgcgccaagtggagcccccagccaagaagccagccacaccagcagaggatgacgaggatgatgacattgacctgtttggcagtgacaatgaggaggaggacaaggaggcggcacagctgcgggaggagcggctacggcagtacgcggagaagaaggccaagaagcctgcactggtggccaagtcctccatcctgctggatgtcaagccttgggatgatgagacggacatggctcagctggaggcctgtgtgcgctctatccagctggacgggctggtctggggggcttccaagctggtgcccgtgggctacggtatccggaagctacagattcagtgtgtggtggaggacgacaaggtggggacagacttgctggaggaggagatcaccaagtttgaggagcacgtgcagagtgtcgatatcgcagctttcaacaagatctgaagcctgagtgtgtgtacgtgcgcgcgtgcgtgaggccctgccacgattaaagactgagaccggctgaaaagaaaaaataaaatattagattaacatagatatataatatatctaagatataacgtataataatacaaaagaggagcggcgcgcaacaacgaaatgtacaccaagagtgggcggcccaaaagttagcaagcacaccgcagaacggtgtgcagaagggggggcccacatagagggaggagagagaaacagacggagaacagggggaccggagacaaaacgaccagagagagggaaaaacgaggagcggggaaccagggagaagaccacaaatactgcgggggggaaaaatg

SEQ ID NO: 60940 - DNA, 2829 bp, Homo sapiens
ggctccactggttgccatcttccagagccctttcatcagtcttcccgcgtccgccgattcctcctccttggtcgccgcgtccttggctggcgtgtgagtaccgcggcccccgccggaaggagtcgggcgcgacagagacgcccgaggggccgggagggcgggcggcccgggctgcgccagaagctcgcgccgttagggactgaggcacaagtgcgccagcgcgggcttaggggccgtgggccaagtgcggcacttggggcgagcgcagagaggcggggcgacggaggccacgtggccggcttggagggcgtccgcgggacgggggcgccgggagcactgtctcacggcgcatcccggtcgtggaagcccctcggccaggctgctggggcctaaggcctgtgtttgctgccgtctccgtgggagaccagacatctgccccagctgtttctctggcctgcagaccttcgtacaccacgtctttgtcaagcaccagttactgcacgcatcagctgagcacggaggggataggcacggacgcaacacttttggaacttagacgctagtgagcacggaaaggaataagcctgaggccaaagcaaaatgaggagcgggaaggcctcctgcaccctggagaccgtgtgggaagacaagcacaagtatgaggaggccgagcggcgcttctacgaacacgaggccacacaggcggccgcctccgcccagcagctgccagccgaggggccagccatgaatgggcccggccaggacgaccctgaggacgctgatgaggcggaagcccctgacggcggcagcaggcgtgatcccaggaagagccaggacagcaggaagcccctgcagaaaaagaggaagcgctcccccaagagcgggctcggccccgcggacctggccctcctgggcctctcggccgaacgtgtgtggctggacaagtcacttttcgaccaggcagagagctcctaccgccagaagctggcagatgtggctgcccaggcagcctggcctcctgccttggccccttggggtctctgcacccatggaaaccaggtggcctgccaccacgtgacctgggggatctgggtcaacaagtcctccttcgaccaggctgagcgggccttcgtggagtggtctcaggccctgttgctggcccccgagggcagccgcaggcaggggactcccaacacaggccagcaggtggccgtccccgacctggcccaccagcccagcccaccggtcaatggccagcccccgctgggcagcctgcaggcactggttcgggaggtgtggctggagaagccccggtatgatgcagccgagaggggcttctacgaggccctgtttgacggccatcccccagggaaggtgcgcctgcaagagcgagccggcctggccgagggtgcccggcggggccgcagagaccggcggggccgcaacatcttagggaacaagcgggccgggctgcgacgggccgatggggaggccccctctgccttgccctactgttacttcctgcagaaggatgcagaggccccctggctcagcaagcctgcctacgacagcgccgagtgccgccaccacgctgccgaggccctgcgtgtggcctggtgcctcgaagctgcctccctgtctcaccgacccggtcctcggtctggcctgtccgtgtccagcctgagacccaagtaggagaaacgtgctgggtgggcacccagcctgggctgtgggcacagggacagccatcccaggctggggctcctccagcttcctcccctgcccacctggggtgggggctccccgagacccgtgggcccagcagagttgaatgcaggagcaggctgagtaaagcagaaaaatggctacaaacttcctagcacatgagaagatctggttcgacaagttcaaatatgacgacgcagaaaggagattctacgagcagatgaacgggcctgtggcaggtgcctcccgccaggagaacggcgccagcgtgatcctccgtgacattgcgagagccagagagaacatccagaaatccctggctggaagctcaggccccggggcctccagcggcaccagcggagaccacggtgagctcgtcgtccggattgccagtctggaagtggagaaccagagtctgcgtggcgtggtacaggagctgcagcaggccatctccaagctggaggcccggctgaacgtgctggagaagagctcgcctggccaccgggccacggccccacagacccagcacgtatctcccatgcgccaagtggagcccccagccaagaagccagccacaccagcagaggatgacgaggatgatgacattgacctgtttggcagtgacaatgaggaggaggacaaggaggcggcacagctgcgggaggagcggctacggcagtacgcggagaagaaggccaagaagcctgcactggtggccaagtcctccatcctgctggatgtcaagccttgggatgatgagacggacatggctcagctggaggcctgtgtgcgctctatccagctggacgggctggtctggggggcttccaagctggtgcccgtgggctacggtatccggaagctacagattcagtgtgtggtggaggacgacaaggtggggacagacttgctggaggaggagatcaccaagtttgaggagcacgtgcagagtgtcgatatcgcagctttcaacaagatctgaagcctgagtgtgtgtacgtgcgcgcgtgcgtgaggccctgccacgattaaagactgagaccggcaaaaaaaaaagataacactaccaaaccaaaacacaaaggggggggcctcaaaaaaccg

SEQ ID NO: 60941 - DNA, 3017 bp, Homo sapiens
ggctccactggttgccatcttccagagccctttcatcagtcttcccgcgtccgccgattcctcctccttggtcgccgcgtccttggctggcgtgtgagtaccgcggcccccgccggaaggagtcgggcgcgacagagacgcccgaggggccgggagggcgggcggcccgggctgcgccagaagctcgcgccgttagggactgaggcacaagtgcgccagcgcgggcttaggggccgtgggccaagtgcggcacttggggcgagcgcagagaggcggggcgacggaggccacgtggccggcttggagggcgtccgcgggacgggggcgccgggagcactgtctcacggcgcatcccggtcgtggaagcccctcggccaggctgctggggcctaaggcctgtgtttgctgccgtctccgtgggagaccagacatctgccccagctgtttctctggcctgcagaccttcgtacaccacgtctttgtcaagcaccagttactgcacgcatcagctgagcacggaggggataggcacggacgcaacacttttggaacttagacgctagtgagcacggaaaggaataagcctgaggccaaagcaaaatgaggagcgggaaggcctcctgcaccctggagaccgtgtgggaagacaagcacaagtatgaggaggccgagcggcgcttctacgaacacgaggccacacaggcggccgcctccgcccagcagctgccagccgaggggccagccatgaatgggcccggccaggacgaccctgaggacgctgatgaggcggaagcccctgacggcggcagcaggcgtgatcccaggaagagccaggacagcaggaagcccctgcagaaaaagaggaagcgctcccccaagagcgggctcggccccgcggacctggccctcctgggcctctcggccgaacgtgtgtggctggacaagtcacttttcgaccaggcagagagctcctaccgccagaagctggcagatgtggctgcccaggcagcctggcctcctgccttggccccttggggtctctgcacccatggaaaccaggtggcctgccaccacgtgacctgggggatctgggtcaacaagtcctccttcgaccaggctgagcgggccttcgtggagtggtctcaggccctgttgctggcccccgagggcagccgcaggcaggggactcccaacacaggccagcaggtggccgtccccgacctggcccaccagcccagcccaccggtcaatggccagcccccgctgggcagcctgcaggcactggttcgggaggtgtggctggagaagccccggtatgatgcagccgagaggggcttctacgaggccctgtttgacggccatcccccagggaaggtgcgcctgcaagagcgagccggcctggccgagggtgcccggcggggccgcagagaccggcggggccgcaacatcttagggaacaagcgggccgggctgcgacgggccgatggggaggccccctctgccttgccctactgttacttcctgcagaaggatgcagaggccccctggctcagcaagcctgcctacgacagcgccgagtgccgccaccacgctgccgaggccctgcgtgtggcctggtgcctcgaagctgcctccctgtctcaccgacccggtcctcggtctggcctgtccgtgtccagcctgagacccaagtaggagaaacgtgctgggtgggcacccagcctgggctgtgggcacagggacagccatcccaggctggggctcctccagcttcctcccctgcccacctggggtgggggctccccgagacccgtgggcccagcagagttgaatgcaggagcaggctgagtaaagcagaaaaatggctacaaacttcctagcacatgagaagatctggttcgacaagttcaaatatgacgacgcagaaaggagattctacgagcagatgaacgggcctgtggcaggtgcctcccgccaggagaacggcgccagcgtgatcctccgtgacattgcgagagccagagagaacatccagaaatccctggctggaagctcaggccccggggcctccagcggcaccagcggagaccacggtgagctcgtcgtccggattgccagtctggaagtggagaaccagagtctgcgtggcgtggtacaggagctgcagcaggccatctccaagctggaggcccggctgaacgtgctggagaagagctcgcctggccaccgggccacggccccacagacccagcacgtatctcccatgcgccaagtggagcccccagccaagaagccagccacaccagcagaggatgacgaggatgatgacattgacctgtttggcagtgacaatgaggaggaggacaaggaggcggcacagctgcgggaggagcggctacggcagtacgcggagaagaaggccaagaagcctgcactggtggccaagtcctccatcctgctggatgtcaagccttgggatgatgagacggacatggctcagctggaggcctgtgtgcgctctatccagctggacgggctggtctggggggcttccaagctggtgcccgtgggctacggtatccggaagctacagattcagtgtgtggtggaggacgacaaggtggggacagacttgctggaggaggagatcaccaagtttgaggagcacgtgcagagtgtcgatatcgcagctttcaacaagatctgaagcctgagtgtgtgtacgtgcgcgcgtgcgtgaggccctgccacgattaaagactgagaccggctcaaaaaaaaaccttctctcttaatgtctttataaaatgtactggccgtatgtttacaattcgtcatttgtgaaaccgtggcgttcccaaataatgtcctggtcgatattccccttttgccagctggggtattaacgaaatggccggacctgatcgccttctccaacattgtccaacctcaatggctaatggctaaatgttagccgacaattttggctaaatttcgcgtatattatctttgaatcc

SEQ ID NO: 60942 - DNA, 2806 bp, Homo sapiens
  misc_feature (2772)..(2772): n is a, c, g, or t
  misc_feature (2778)..(2778): n is a, c, g, or t
  misc_feature (2780)..(2782): n is a, c, g, or t
  misc_feature (2785)..(2787): n is a, c, g, or t
  misc_feature (2790)..(2790): n is a, c, g, or t
ggctccactggttgccatcttccagagccctttcatcagtcttcccgcgtccgccgattcctcctccttggtcgccgcgtccttggctggcgtgtgagtaccgcggcccccgccggaaggagtcgggcgcgacagagacgcccgaggggccgggagggcgggcggcccgggctgcgccagaagctcgcgccgttagggactgaggcacaagtgcgccagcgcgggcttaggggccgtgggccaagtgcggcacttggggcgagcgcagagaggcggggcgacggaggccacgtggccggcttggagggcgtccgcgggacgggggcgccgggagcactgtctcacggcgcatcccggtcgtggaagcccctcggccaggctgctggggcctaaggcctgtgtttgctgccgtctccgtgggagaccagacatctgccccagctgtttctctggcctgcagaccttcgtacaccacgtctttgtcaagcaccagttactgcacgcatcagctgagcacggaggggataggcacggacgcaacacttttggaacttagacgctagtgagcacggaaaggaataagcctgaggccaaagcaaaatgaggagcgggaaggcctcctgcaccctggagaccgtgtgggaagacaagcacaagtatgaggaggccgagcggcgcttctacgaacacgaggccacacaggcggccgcctccgcccagcagctgccagccgaggggccagccatgaatgggcccggccaggacgaccctgaggacgctgatgaggcggaagcccctgacggcggcagcaggcgtgatcccaggaagagccaggacagcaggaagcccctgcagaaaaagaggaagcgctcccccaagagcgggctcggccccgcggacctggccctcctgggcctctcggccgaacgtgtgtggctggacaagtcacttttcgaccaggcagagagctcctaccgccagaagctggcagatgtggctgcccaggcagcctggcctcctgccttggccccttggggtctctgcacccatggaaaccaggtggcctgccaccacgtgacctgggggatctgggtcaacaagtcctccttcgaccaggctgagcgggccttcgtggagtggtctcaggccctgttgctggcccccgagggcagccgcaggcaggggactcccaacacaggccagcaggtggccgtccccgacctggcccaccagcccagcccaccggtcaatggccagcccccgctgggcagcctgcaggcactggttcgggaggtgtggctggagaagccccggtatgatgcagccgagaggggcttctacgaggccctgtttgacggccatcccccagggaaggtgcgcctgcaagagcgagccggcctggccgagggtgcccggcggggccgcagagaccggcggggccgcaacatcttagggaacaagcgggccgggctgcgacgggccgatggggaggccccctctgccttgccctactgttacttcctgcagaaggatgcagaggccccctggctcagcaagcctgcctacgacagcgccgagtgccgccaccacgctgccgaggccctgcgtgtggcctggtgcctcgaagctgcctccctgtctcaccgacccggtcctcggtctggcctgtccgtgtccagcctgagacccaagtaggagaaacgtgctgggtgggcacccagcctgggctgtgggcacagggacagccatcccaggctggggctcctccagcttcctcccctgcccacctggggtgggggctccccgagacccgtgggcccagcagagttgaatgcaggagcaggctgagtaaagcagaaaaatggctacaaacttcctagcacatgagaagatctggttcgacaagttcaaatatgacgacgcagaaaggagattctacgagcagatgaacgggcctgtggcaggtgcctcccgccaggagaacggcgccagcgtgatcctccgtgacattgcgagagccagagagaacatccagaaatccctggctggaagctcaggccccggggcctccagcggcaccagcggagaccacggtgagctcgtcgtccggattgccagtctggaagtggagaaccagagtctgcgtggcgtggtacaggagctgcagcaggccatctccaagctggaggcccggctgaacgtgctggagaagagctcgcctggccaccgggccacggccccacagacccagcacgtatctcccatgcgccaagtggagcccccagccaagaagccagccacaccagcagaggatgacgaggatgatgacattgacctgtttggcagtgacaatgaggaggaggacaaggaggcggcacagctgcgggaggagcggctacggcagtacgcggagaagaaggccaagaagcctgcactggtggccaagtcctccatcctgctggatgtcaagccttgggatgatgagacggacatggctcagctggaggcctgtgtgcgctctatccagctggacgggctggtctggggggcttccaagctggtgcccgtgggctacggtatccggaagctacagattcagtgtgtggtggaggacgacaaggtggggacagacttgctggaggaggagatcaccaagtttgaggagcacgtgcagagtgtcgatatcgcagctttcaacaagatctgaagcctgagtgtgtgtacgtgcgcgcgtgcgtgaggccctgccacgattaaagactgagaccggcnaaaaanannnaannnacnaaaaaagtcgtatcga

SEQ ID NO: 60943 - DNA, 2972 bp, Homo sapiens
  misc_feature (2848)..(2848): n is a, c, g, or t
ggctccactggttgccatcttccagagccctttcatcagtcttcccgcgtccgccgattcctcctccttggtcgccgcgtccttggctggcgtgtgagtaccgcggcccccgccggaaggagtcgggcgcgacagagacgcccgaggggccgggagggcgggcggcccgggctgcgccagaagctcgcgccgttagggactgaggcacaagtgcgccagcgcgggcttaggggccgtgggccaagtgcggcacttggggcgagcgcagagaggcggggcgacggaggccacgtggccggcttggagggcgtccgcgggacgggggcgccgggagcactgtctcacggcgcatcccggtcgtggaagcccctcggccaggctgctggggcctaaggcctgtgtttgctgccgtctccgtgggagaccagacatctgccccagctgtttctctggcctgcagaccttcgtacaccacgtctttgtcaagcaccagttactgcacgcatcagctgagcacggaggggataggcacggacgcaacacttttggaacttagacgctagtgagcacggaaaggaataagcctgaggccaaagcaaaatgaggagcgggaaggcctcctgcaccctggagaccgtgtgggaagacaagcacaagtatgaggaggccgagcggcgcttctacgaacacgaggccacacaggcggccgcctccgcccagcagctgccagccgaggggccagccatgaatgggcccggccaggacgaccctgaggacgctgatgaggcggaagcccctgacggcggcagcaggcgtgatcccaggaagagccaggacagcaggaagcccctgcagaaaaagaggaagcgctcccccaagagcgggctcggccccgcggacctggccctcctgggcctctcggccgaacgtgtgtggctggacaagtcacttttcgaccaggcagagagctcctaccgccagaagctggcagatgtggctgcccaggcagcctggcctcctgccttggccccttggggtctctgcacccatggaaaccaggtggcctgccaccacgtgacctgggggatctgggtcaacaagtcctccttcgaccaggctgagcgggccttcgtggagtggtctcaggccctgttgctggcccccgagggcagccgcaggcaggggactcccaacacaggccagcaggtggccgtccccgacctggcccaccagcccagcccaccggtcaatggccagcccccgctgggcagcctgcaggcactggttcgggaggtgtggctggagaagccccggtatgatgcagccgagaggggcttctacgaggccctgtttgacggccatcccccagggaaggtgcgcctgcaagagcgagccggcctggccgagggtgcccggcggggccgcagagaccggcggggccgcaacatcttagggaacaagcgggccgggctgcgacgggccgatggggaggccccctctgccttgccctactgttacttcctgcagaaggatgcagaggccccctggctcagcaagcctgcctacgacagcgccgagtgccgccaccacgctgccgaggccctgcgtgtggcctggtgcctcgaagctgcctccctgtctcaccgacccggtcctcggtctggcctgtccgtgtccagcctgagacccaagtaggagaaacgtgctgggtgggcacccagcctgggctgtgggcacagggacagccatcccaggctggggctcctccagcttcctcccctgcccacctggggtgggggctccccgagacccgtgggcccagcagagttgaatgcaggagcaggctgagtaaagcagaaaaatggctacaaacttcctagcacatgagaagatctggttcgacaagttcaaatatgacgacgcagaaaggagattctacgagcagatgaacgggcctgtggcaggtgcctcccgccaggagaacggcgccagcgtgatcctccgtgacattgcgagagccagagagaacatccagaaatccctggctggaagctcaggccccggggcctccagcggcaccagcggagaccacggtgagctcgtcgtccggattgccagtctggaagtggagaaccagagtctgcgtggcgtggtacaggagctgcagcaggccatctccaagctggaggcccggctgaacgtgctggagaagagctcgcctggccaccgggccacggccccacagacccagcacgtatctcccatgcgccaagtggagcccccagccaagaagccagccacaccagcagaggatgacgaggatgatgacattgacctgtttggcagtgacaatgaggaggaggacaaggaggcggcacagctgcgggaggagcggctacggcagtacgcggagaagaaggccaagaagcctgcactggtggccaagtcctccatcctgctggatgtcaagccttgggatgatgagacggacatggctcagctggaggcctgtgtgcgctctatccagctggacgggctggtctggggggcttccaagctggtgcccgtgggctacggtatccggaagctacagattcagtgtgtggtggaggacgacaaggtggggacagacttgctggaggaggagatcaccaagtttgaggagcacgtgcagagtgtcgatatcgcagctttcaacaagatctgaagcctgagtgtgtgtacgtgcgcgcgtgcgtgaggccctgccacgattaaagactgagaccggctaaaaaaaaaaaaaaaaaaaaaaaaaaaaaaaaaaaaaaaaaaaaaaaaaaaaaaaaaaaaaaaaacaacaaaaaanaaaaaaaaaaaaaaaaaaaaacccaaaaaggtcccccaggggtaaactccaacttttgtagaggtttaaagaaacctaggaaaagggggcagcaaaggttgacatcctgaagcgtgccttgtgc

SEQ ID NO: 60944 - DNA, 3062 bp, Homo sapiens
ggctccactggttgccatcttccagagccctttcatcagtcttcccgcgtccgccgattcctcctccttggtcgccgcgtccttggctggcgtgtgagtaccgcggcccccgccggaaggagtcgggcgcgacagagacgcccgaggggccgggagggcgggcggcccgggctgcgccagaagctcgcgccgttagggactgaggcacaagtgcgccagcgcgggcttaggggccgtgggccaagtgcggcacttggggcgagcgcagagaggcggggcgacggaggccacgtggccggcttggagggcgtccgcgggacgggggcgccgggagcactgtctcacggcgcatcccggtcgtggaagcccctcggccaggctgctggggcctaaggcctgtgtttgctgccgtctccgtgggagaccagacatctgccccagctgtttctctggcctgcagaccttcgtacaccacgtctttgtcaagcaccagttactgcacgcatcagctgagcacggaggggataggcacggacgcaacacttttggaacttagacgctagtgagcacggaaaggaataagcctgaggccaaagcaaaatgaggagcgggaaggcctcctgcaccctggagaccgtgtgggaagacaagcacaagtatgaggaggccgagcggcgcttctacgaacacgaggccacacaggcggccgcctccgcccagcagctgccagccgaggggccagccatgaatgggcccggccaggacgaccctgaggacgctgatgaggcggaagcccctgacggcggcagcaggcgtgatcccaggaagagccaggacagcaggaagcccctgcagaaaaagaggaagcgctcccccaagagcgggctcggccccgcggacctggccctcctgggcctctcggccgaacgtgtgtggctggacaagtcacttttcgaccaggcagagagctcctaccgccagaagctggcagatgtggctgcccaggcagcctggcctcctgccttggccccttggggtctctgcacccatggaaaccaggtggcctgccaccacgtgacctgggggatctgggtcaacaagtcctccttcgaccaggctgagcgggccttcgtggagtggtctcaggccctgttgctggcccccgagggcagccgcaggcaggggactcccaacacaggccagcaggtggccgtccccgacctggcccaccagcccagcccaccggtcaatggccagcccccgctgggcagcctgcaggcactggttcgggaggtgtggctggagaagccccggtatgatgcagccgagaggggcttctacgaggccctgtttgacggccatcccccagggaaggtgcgcctgcaagagcgagccggcctggccgagggtgcccggcggggccgcagagaccggcggggccgcaacatcttagggaacaagcgggccgggctgcgacgggccgatggggaggccccctctgccttgccctactgttacttcctgcagaaggatgcagaggccccctggctcagcaagcctgcctacgacagcgccgagtgccgccaccacgctgccgaggccctgcgtgtggcctggtgcctcgaagctgcctccctgtctcaccgacccggtcctcggtctggcctgtccgtgtccagcctgagacccaagtaggagaaacgtgctgggtgggcacccagcctgggctgtgggcacagggacagccatcccaggctggggctcctccagcttcctcccctgcccacctggggtgggggctccccgagacccgtgggcccagcagagttgaatgcaggagcaggctgagtaaagcagaaaaatggctacaaacttcctagcacatgagaagatctggttcgacaagttcaaatatgacgacgcagaaaggagattctacgagcagatgaacgggcctgtggcaggtgcctcccgccaggagaacggcgccagcgtgatcctccgtgacattgcgagagccagagagaacatccagaaatccctggctggaagctcaggccccggggcctccagcggcaccagcggagaccacggtgagctcgtcgtccggattgccagtctggaagtggagaaccagagtctgcgtggcgtggtacaggagctgcagcaggccatctccaagctggaggcccggctgaacgtgctggagaagagctcgcctggccaccgggccacggccccacagacccagcacgtatctcccatgcgccaagtggagcccccagccaagaagccagccacaccagcagaggatgacgaggatgatgacattgacctgtttggcagtgacaatgaggaggaggacaaggaggcggcacagctgcgggaggagcggctacggcagtacgcggagaagaaggccaagaagcctgcactggtggccaagtcctccatcctgctggatgtcaagccttgggatgatgagacggacatggctcagctggaggcctgtgtgcgctctatccagctggacgggctggtctggggggcttccaagctggtgcccgtgggctacggtatccggaagctacagattcagtgtgtggtggaggacgacaaggtggggacagacttgctggaggaggagatcaccaagtttgaggagcacgtgcagagtgtcgatatcgcagctttcaacaagatctgaagcctgagtgtgtgtacgtgcgcgcgtgcgtgaggccctgccacgattaaagactgagaccggcaaaaaaaaaaaactcaaacacagttggctgcaaagttcccactgtcccccctaggaactttgaaaaaccaacatagcatcattaatcaggaatattacagtaatgaggattttttctgtctttttttaatacacatatgcaaccaattaaacagttataatctgggcactgttaatagaaaggtgggatagtcttggctgttggcggtgaaatgcttttggtccatgtgccgttttaactgatatgcttgttagaactcagctaatggagctcaaagtatgagatacagaa

SEQ ID NO: 60945 - DNA, 2860 bp, Homo sapiens
  misc_feature (2806)..(2806): n is a, c, g, or t
ggctccactggttgccatcttccagagccctttcatcagtcttcccgcgtccgccgattcctcctccttggtcgccgcgtccttggctggcgtgtgagtaccgcggcccccgccggaaggagtcgggcgcgacagagacgcccgaggggccgggagggcgggcggcccgggctgcgccagaagctcgcgccgttagggactgaggcacaagtgcgccagcgcgggcttaggggccgtgggccaagtgcggcacttggggcgagcgcagagaggcggggcgacggaggccacgtggccggcttggagggcgtccgcgggacgggggcgccgggagcactgtctcacggcgcatcccggtcgtggaagcccctcggccaggctgctggggcctaaggcctgtgtttgctgccgtctccgtgggagaccagacatctgccccagctgtttctctggcctgcagaccttcgtacaccacgtctttgtcaagcaccagttactgcacgcatcagctgagcacggaggggataggcacggacgcaacacttttggaacttagacgctagtgagcacggaaaggaataagcctgaggccaaagcaaaatgaggagcgggaaggcctcctgcaccctggagaccgtgtgggaagacaagcacaagtatgaggaggccgagcggcgcttctacgaacacgaggccacacaggcggccgcctccgcccagcagctgccagccgaggggccagccatgaatgggcccggccaggacgaccctgaggacgctgatgaggcggaagcccctgacggcggcagcaggcgtgatcccaggaagagccaggacagcaggaagcccctgcagaaaaagaggaagcgctcccccaagagcgggctcggccccgcggacctggccctcctgggcctctcggccgaacgtgtgtggctggacaagtcacttttcgaccaggcagagagctcctaccgccagaagctggcagatgtggctgcccaggcagcctggcctcctgccttggccccttggggtctctgcacccatggaaaccaggtggcctgccaccacgtgacctgggggatctgggtcaacaagtcctccttcgaccaggctgagcgggccttcgtggagtggtctcaggccctgttgctggcccccgagggcagccgcaggcaggggactcccaacacaggccagcaggtggccgtccccgacctggcccaccagcccagcccaccggtcaatggccagcccccgctgggcagcctgcaggcactggttcgggaggtgtggctggagaagccccggtatgatgcagccgagaggggcttctacgaggccctgtttgacggccatcccccagggaaggtgcgcctgcaagagcgagccggcctggccgagggtgcccggcggggccgcagagaccggcggggccgcaacatcttagggaacaagcgggccgggctgcgacgggccgatggggaggccccctctgccttgccctactgttacttcctgcagaaggatgcagaggccccctggctcagcaagcctgcctacgacagcgccgagtgccgccaccacgctgccgaggccctgcgtgtggcctggtgcctcgaagctgcctccctgtctcaccgacccggtcctcggtctggcctgtccgtgtccagcctgagacccaagtaggagaaacgtgctgggtgggcacccagcctgggctgtgggcacagggacagccatcccaggctggggctcctccagcttcctcccctgcccacctggggtgggggctccccgagacccgtgggcccagcagagttgaatgcaggagcaggctgagtaaagcagaaaaatggctacaaacttcctagcacatgagaagatctggttcgacaagttcaaatatgacgacgcagaaaggagattctacgagcagatgaacgggcctgtggcaggtgcctcccgccaggagaacggcgccagcgtgatcctccgtgacattgcgagagccagagagaacatccagaaatccctggctggaagctcaggccccggggcctccagcggcaccagcggagaccacggtgagctcgtcgtccggattgccagtctggaagtggagaaccagagtctgcgtggcgtggtacaggagctgcagcaggccatctccaagctggaggcccggctgaacgtgctggagaagagctcgcctggccaccgggccacggccccacagacccagcacgtatctcccatgcgccaagtggagcccccagccaagaagccagccacaccagcagaggatgacgaggatgatgacattgacctgtttggcagtgacaatgaggaggaggacaaggaggcggcacagctgcgggaggagcggctacggcagtacgcggagaagaaggccaagaagcctgcactggtggccaagtcctccatcctgctggatgtcaagccttgggatgatgagacggacatggctcagctggaggcctgtgtgcgctctatccagctggacgggctggtctggggggcttccaagctggtgcccgtgggctacggtatccggaagctacagattcagtgtgtggtggaggacgacaaggtggggacagacttgctggaggaggagatcaccaagtttgaggagcacgtgcagagtgtcgatatcgcagctttcaacaagatctgaagcctgagtgtgtgtacgtgcgcgcgtgcgtgaggccctgccacgattaaagactgagaccggcaaaaaaaaaaaaaaaaaaaaaaaacaacaaaaaanaaaaaaaaaaaaaaaaaaaaaaaaaaaaacaaaaaaaaataaaaaacaaaaaca

SEQ ID NO: 60946 - DNA, 2944 bp, Homo sapiens
ggctccactggttgccatcttccagagccctttcatcagtcttcccgcgtccgccgattcctcctccttggtcgccgcgtccttggctggcgtgtgagtaccgcggcccccgccggaaggagtcgggcgcgacagagacgcccgaggggccgggagggcgggcggcccgggctgcgccagaagctcgcgccgttagggactgaggcacaagtgcgccagcgcgggcttaggggccgtgggccaagtgcggcacttggggcgagcgcagagaggcggggcgacggaggccacgtggccggcttggagggcgtccgcgggacgggggcgccgggagcactgtctcacggcgcatcccggtcgtggaagcccctcggccaggctgctggggcctaaggcctgtgtttgctgccgtctccgtgggagaccagacatctgccccagctgtttctctggcctgcagaccttcgtacaccacgtctttgtcaagcaccagttactgcacgcatcagctgagcacggaggggataggcacggacgcaacacttttggaacttagacgctagtgagcacggaaaggaataagcctgaggccaaagcaaaatgaggagcgggaaggcctcctgcaccctggagaccgtgtgggaagacaagcacaagtatgaggaggccgagcggcgcttctacgaacacgaggccacacaggcggccgcctccgcccagcagctgccagccgaggggccagccatgaatgggcccggccaggacgaccctgaggacgctgatgaggcggaagcccctgacggcggcagcaggcgtgatcccaggaagagccaggacagcaggaagcccctgcagaaaaagaggaagcgctcccccaagagcgggctcggccccgcggacctggccctcctgggcctctcggccgaacgtgtgtggctggacaagtcacttttcgaccaggcagagagctcctaccgccagaagctggcagatgtggctgcccaggcagcctggcctcctgccttggccccttggggtctctgcacccatggaaaccaggtggcctgccaccacgtgacctgggggatctgggtcaacaagtcctccttcgaccaggctgagcgggccttcgtggagtggtctcaggccctgttgctggcccccgagggcagccgcaggcaggggactcccaacacaggccagcaggtggccgtccccgacctggcccaccagcccagcccaccggtcaatggccagcccccgctgggcagcctgcaggcactggttcgggaggtgtggctggagaagccccggtatgatgcagccgagaggggcttctacgaggccctgtttgacggccatcccccagggaaggtgcgcctgcaagagcgagccggcctggccgagggtgcccggcggggccgcagagaccggcggggccgcaacatcttagggaacaagcgggccgggctgcgacgggccgatggggaggccccctctgccttgccctactgttacttcctgcagaaggatgcagaggccccctggctcagcaagcctgcctacgacagcgccgagtgccgccaccacgctgccgaggccctgcgtgtggcctggtgcctcgaagctgcctccctgtctcaccgacccggtcctcggtctggcctgtccgtgtccagcctgagacccaagtaggagaaacgtgctgggtgggcacccagcctgggctgtgggcacagggacagccatcccaggctggggctcctccagcttcctcccctgcccacctggggtgggggctccccgagacccgtgggcccagcagagttgaatgcaggagcaggctgagtaaagcagaaaaatggctacaaacttcctagcacatgagaagatctggttcgacaagttcaaatatgacgacgcagaaaggagattctacgagcagatgaacgggcctgtggcaggtgcctcccgccaggagaacggcgccagcgtgatcctccgtgacattgcgagagccagagagaacatccagaaatccctggctggaagctcaggccccggggcctccagcggcaccagcggagaccacggtgagctcgtcgtccggattgccagtctggaagtggagaaccagagtctgcgtggcgtggtacaggagctgcagcaggccatctccaagctggaggcccggctgaacgtgctggagaagagctcgcctggccaccgggccacggccccacagacccagcacgtatctcccatgcgccaagtggagcccccagccaagaagccagccacaccagcagaggatgacgaggatgatgacattgacctgtttggcagtgacaatgaggaggaggacaaggaggcggcacagctgcgggaggagcggctacggcagtacgcggagaagaaggccaagaagcctgcactggtggccaagtcctccatcctgctggatgtcaagccttgggatgatgagacggacatggctcagctggaggcctgtgtgcgctctatccagctggacgggctggtctggggggcttccaagctggtgcccgtgggctacggtatccggaagctacagattcagtgtgtggtggaggacgacaaggtggggacagacttgctggaggaggagatcaccaagtttgaggagcacgtgcagagtgtcgatatcgcagctttcaacaagatctgaagcctgagtgtgtgtacgtgcgcgcgtgcgtgaggccctgccacgattaaagactgagaccggcaaaaaaaaagcaaaagacaacaaacacagtgtgcgcacgcgtggccgccgagaacgagcaaacacacgaaggcaggggcgcccgaaaggaaggagatgtgcaaagcagcgacagaacccggacaacagcggggactcccaagaaaaccccgggggcacggagctgaaaaccag

SEQ ID NO: 60947 - DNA, 2707 bp, Homo sapiens
ggctccactggttgccatcttccagagccctttcatcagtcttcccgcgtccgccgattcctcctccttggtcgccgcgtccttggctggcgtgtgagtaccgcggcccccgccggaaggagtcgggcgcgacagagacgcccgaggggccgggagggcgggcggcccgggctgcgccagaagctcgcgccgttagggactgaggcacaagtgcgccagcgcgggcttaggggccgtgggccaagtgcggcacttggggcgagcgcagagaggcggggcgacggaggccacgtggccggcttggagggcgtccgcgggacgggggcgccgggagcactgtctcacggcgcatcccggtcgtggaagcccctcggccaggctgctggggcctaaggcctgtgtttgctgccgtctccgtgggagaccagacatctgccccagctgtttctctggcctgcagaccttcgtacaccacgtctttgtcaagcaccagttactgcacgcatcagctgagcacggaggggataggcacggacgcaacacttttggaacttagacgctagtgagcacggaaaggaataagcctgaggccaaagcaaaatgaggagcgggaaggcctcctgcaccctggagaccgtgtgggaagacaagcacaagtatgaggaggccgagcggcgcttctacgaacacgaggccacacaggcggccgcctccgcccagcagctgccagccgaggggccagccatgaatgggcccggccaggacgaccctgaggacgctgatgaggcggaagcccctgacggcggcagcaggcgtgatcccaggaagagccaggacagcaggaagcccctgcagaaaaagaggaagcgctcccccaagagcgggctcggccccgcggacctggccctcctgggcctctcggccgaacgtgtgtggctggacaagtcacttttcgaccaggcagagagctcctaccgccagaagctggcagatgtggctgcccaggcagcctggcctcctgccttggccccttggggtctctgcacccatggaaaccaggtggcctgccaccacgtgacctgggggatctgggtcaacaagtcctccttcgaccaggctgagcgggccttcgtggagtggtctcaggccctgttgctggcccccgagggcagccgcaggcaggggactcccaacacaggccagcaggtggccgtccccgacctggcccaccagcccagcccaccggtcaatggccagcccccgctgggcagcctgcaggcactggttcgggaggtgtggctggagaagccccggtatgatgcagccgagaggggcttctacgaggccctgtttgacggccatcccccagggaaggtgcgcctgcaagagcgagccggcctggccgagggtgcccggcggggccgcagagaccggcggggccgcaacatcttagggaacaagcgggccgggctgcgacgggccgatggggaggccccctctgccttgccctactgttacttcctgcagaaggatgcagaggccccctggctcagcaagcctgcctacgacagcgccgagtgccgccaccacgctgccgaggccctgcgtgtggcctggtgcctcgaagctgcctccctgtctcaccgacccggtcctcggtctggcctgtccgtgtccagcctgagacccaagtaggagaaacgtgctgggtgggcacccagcctgggctgtgggcacagggacagccatcccaggctggggctcctccagcttcctcccctgcccacctggggtgggggctccccgagacccgtgggcccagcagagttgaatgcaggagcaggctgagtaaagcagaaaaatggctacaaacttcctagcacatgagaagatctggttcgacaagttcaaatatgacgacgcagaaaggagattctacgagcagatgaacgggcctgtggcaggtgcctcccgccaggagaacggcgccagcgtgatcctccgtgacattgcgagagccagagagaacatccagaaatccctggctggaagctcaggccccggggcctccagcggcaccagcggatggtacaggagctgcagcaggccatctccaagctggaggcccggctgaacgtgctggagaagagctcgcctggccaccgggccacggccccacagacccagcacgtatctcccatgcgccaagtggagcccccagccaagaagccagccacaccagcagaggatgacgaggatgatgacattgacctgtttggcagtgacaatgaggaggaggacaaggaggcggcacagctgcgggaggagcggctacggcagtacgcggagaagaaggccaagaagcctgcactggtggccaagtcctccatcctgctggatgtcaagccttgggatgatgagacggacatggctcagctggaggcctgtgtgcgctctatccagctggacgggctggtctggggggcttccaagctggtgcccgtgggctacggtatccggaagctacagattcagtgtgtggtggaggacgacaaggtggggacagacttgctggaggaggagatcaccaagtttgaggagcacgtgcagagtgtcgatatcgcagctttcaacaagatctgaagcctgagtgtgtgtacgtgcgcgcgtgcgtgaggccctgccacgattaaagactgagaccggc

SEQ ID NO: 60948 - DNA, 2798 bp, Homo sapiens
  misc_feature (2287)..(2287): n is a, c, g, or t
  misc_feature (2372)..(2372): n is a, c, g, or t
ggctccactggttgccatcttccagagccctttcatcagtcttcccgcgtccgccgattcctcctccttggtcgccgcgtccttggctggcgtgtgagtaccgcggcccccgccggaaggagtcgggcgcgacagagacgcccgaggggccgggagggcgggcggcccgggctgcgccagaagctcgcgccgttagggactgaggcacaagtgcgccagcgcgggcttaggggccgtgggccaagtgcggcacttggggcgagcgcagagaggcggggcgacggaggccacgtggccggcttggagggcgtccgcgggacgggggcgccgggagcactgtctcacggcgcatcccggtcgtggaagcccctcggccaggctgctggggcctaaggcctgtgtttgctgccgtctccgtgggagaccagacatctgccccagctgtttctctggcctgcagaccttcgtacaccacgtctttgtcaagcaccagttactgcacgcatcagctgagcacggaggggataggcacggacgcaacacttttggaacttagacgctagtgagcacggaaaggaataagcctgaggccaaagcaaaatgaggagcgggaaggcctcctgcaccctggagaccgtgtgggaagacaagcacaagtatgaggaggccgagcggcgcttctacgaacacgaggccacacaggcggccgcctccgcccagcagctgccagccgaggggccagccatgaatgggcccggccaggacgaccctgaggacgctgatgaggcggaagcccctgacggcggcagcaggcgtgatcccaggaagagccaggacagcaggaagcccctgcagaaaaagaggaagcgctcccccaagagcgggctcggccccgcggacctggccctcctgggcctctcggccgaacgtgtgtggctggacaagtcacttttcgaccaggcagagagctcctaccgccagaagctggcagatgtggctgcccaggcagcctggcctcctgccttggccccttggggtctctgcacccatggaaaccaggtggcctgccaccacgtgacctgggggatctgggtcaacaagtcctccttcgaccaggctgagcgggccttcgtggagtggtctcaggccctgttgctggcccccgagggcagccgcaggcaggggactcccaacacaggccagcaggtggccgtccccgacctggcccaccagcccagcccaccggtcaatggccagcccccgctgggcagcctgcaggcactggttcgggaggtgtggctggagaagccccggtatgatgcagccgagaggggcttctacgaggccctgtttgacggccatcccccagggaaggtgcgcctgcaagagcgagccggcctggccgagggtgcccggcggggccgcagagaccggcggggccgcaacatcttagggaacaagcgggccgggctgcgacgggccgatggggaggccccctctgccttgccctactgttacttcctgcagaaggatgcagaggccccctggctcagcaagcctgcctacgacagcgccgagtgccgccaccacgctgccgaggccctgcgtgtggcctggtgcctcgaagctgcctccctgtctcaccgacccggtcctcggtctggcctgtccgtgtccagcctgagacccaagtaggagaaacgtgctgggtgggcacccagcctgggctgtgggcacagggacagccatcccaggctggggctcctccagcttcctcccctgcccacctggggtgggggctccccgagacccgtgggcccagcagagttgaatgcaggagcaggctgagtaaagcagaaaaatggctacaaacttcctagcacatgagaagatctggttcgacaagttcaaatatgacgacgcagaaaggagattctacgagcagatgaacgggcctgtggcaggtgcctcccgccaggagaacggcgccagcgtgatcctccgtgacattgcgagagccagagagaacatccagaaatccctggctggaagctcaggccccggggcctccagcggcaccagcggagaccacggtgagctcgtcgtccggattgccagtctggaagtggagaaccagagtctgcgtggcgtggtacaggagctgcagcaggccatctccaagctggaggcccggctgaacgtgctggagaagagctcgcctggccaccgggccacggccccacagacccagcacgtatctcccatgcgccaaatggctacaaacttnctagcacatgagaagatctggttcgacaagttcaaatatgacgacgcagaaaggagattctacgagcagatgaacgggcctgtgnaggacaatgaggaggaggacaaggaggcggcacagctgcgggaggagcggctacggcagtacgcggagaagaaggccaagaagcctgcactggtggccaagtcctccatcctgctggatgtcaagccttgggatgatgagacggacatggctcagctggaggcctgtgtgcgctctatccagctggacgggctggtctggggggcttccaagctggtgcccgtgggctacggtatccggaagctacagattcagtgtgtggtggaggacgacaaggtggggacagacttgctggaggaggagatcaccaagtttgaggagcacgtgcagagtgtcgatatcgcagctttcaacaagatctgaagcctgagtgtgtgtacgtgcgcgcgtgcgtgaggccctgccacgattaaagactgagaccggc

SEQ ID NO: 60949 - DNA, 2786 bp, Homo sapiens
ggctccactggttgccatcttccagagccctttcatcagtcttcccgcgtccgccgattcctcctccttggtcgccgcgtccttggctggcgtgtgagtaccgcggcccccgccggaaggagtcgggcgcgacagagacgcccgaggggccgggagggcgggcggcccgggctgcgccagaagctcgcgccgttagggactgaggcacaagtgcgccagcgcgggcttaggggccgtgggccaagtgcggcacttggggcgagcgcagagaggcggggcgacggaggccacgtggccggcttggagggcgtccgcgggacgggggcgccgggagcactgtctcacggcgcatcccggtcgtggaagcccctcggccaggctgctggggcctaaggcctgtgtttgctgccgtctccgtgggagaccagacatctgccccagctgtttctctggcctgcagaccttcgtacaccacgtctttgtcaagcaccagttactgcacgcatcagctgagcacggaggggataggcacggacgcaacacttttggaacttagacgctagtgagcacggaaaggaataagcctgaggccaaagcaaaatgaggagcgggaaggcctcctgcaccctggagaccgtgtgggaagacaagcacaagtatgaggaggccgagcggcgcttctacgaacacgaggccacacaggcggccgcctccgcccagcagctgccagccgaggggccagccatgaatgggcccggccaggacgaccctgaggacgctgatgaggcggaagcccctgacggcggcagcaggcgtgatcccaggaagagccaggacagcaggaagcccctgcagaaaaagaggaagcgctcccccaagagcgggctcggccccgcggacctggccctcctgggcctctcggccgaacgtgtgtggctggacaagtcacttttcgaccaggcagagagctcctaccgccagaagctggcagatgtggctgcccaggcagcctggcctcctgccttggccccttggggtctctgcacccatggaaaccaggtggcctgccaccacgtgacctgggggatctgggtcaacaagtcctccttcgaccaggctgagcgggccttcgtggagtggtctcaggccctgttgctggcccccgagggcagccgcaggcaggggactcccaacacaggccagcaggtggccgtccccgacctggcccaccagcccagcccaccggtcaatggccagcccccgctgggcagcctgcaggcactggttcgggaggtgtggctggagaagccccggtatgatgcagccgagaggggcttctacgaggccctgtttgacggccatcccccagggaaggtgcgcctgcaagagcgagccggcctggccgagggtgcccggcggggccgcagagaccggcggggccgcaacatcttagggaacaagcgggccgggctgcgacgggccgatggggaggccccctctgccttgccctactgttacttcctgcagaaggatgcagaggccccctggctcagcaagcctgcctacgacagcgccgagtgccgccaccacgctgccgaggccctgcgtgtggcctggtgcctcgaagctgcctccctgtctcaccgacccggtcctcggtctggcctgtccgtgtccagcctgagacccaagtaggagaaacgtgctgggtgggcacccagcctgggctgtgggcacagggacagccatcccaggctggggctcctccagcttcctcccctgcccacctggggtgggggctccccgagacccgtgggcccagcagagttgaatgcaggagcaggctgagtaaagcagaaaaatggctacaaacttcctagcacatgagaagatctggttcgacaagttcaaatatgacgacgcagaaaggagattctacgagcagatgaacgggcctgtggcaggtgcctcccgccaggagaacggcgccagcgtgatcctccgtgacattgcgagagccagagagaacatccagaaatccctggctggaagctcaggccccggggcctccagcggcaccagcggagaccacggtgagctcgtcgtccggattgccagtctggaagtggagaaccagagtctgcgtggcgtggtacaggagctgcagcaggccatctccaagctggaggcccggctgaacgtgctggagaagagctcgcctggccaccgggccacggccccacagacccagcacgtatctcccatgcgccaagtggagcccccagccaagaagccagccacaccagcagaggatgacgaggatgatgacattgacctgtttggcagtgacaatgaggaggaggacaaggaggcggcacagctgcgggaggagcggctacggcagtacgcggagaagaaggccaagaagcctgcactggtggccaagtcctccatcctgctggatgtcaagccttgggatgatgagacggacatggctcagctggaggcctgtgtgcgctctatccagctggacgggctggtctggggggcttccaagctggtgcccgtgggctacggtatccggaagctacagattcagtgtgtggtggaggacgacaaggtggggacagacttgctggaggaggagatcaccaagtttgaggagcacagtttgaggagccacgtgcagagtgtcgatatcgcagctttcaacaagatctgaagcctgagtgtgtgtacgtgcgcgcgtgcgtgaggccctgccacgattaaagactgagaccggc

SEQ ID NO: 60950 - DNA, 2971 bp, Homo sapiens
ggctccactggttgccatcttccagagccctttcatcagtcttcccgcgtccgccgattcctcctccttggtcgccgcgtccttggctggcgtgtgagtaccgcggcccccgccggaaggagtcgggcgcgacagagacgcccgaggggccgggagggcgggcggcccgggctgcgccagaagctcgcgccgttagggactgaggcacaagtgcgccagcgcgggcttaggggccgtgggccaagtgcggcacttggggcgagcgcagagaggcggggcgacggaggccacgtggccggcttggagggcgtccgcgggacgggggcgccgggagcactgtctcacggcgcatcccggtcgtggaagcccctcggccaggctgctggggcctaaggcctgtgtttgctgccgtctccgtgggagaccagacatctgccccagctgtttctctggcctgcagaccttcgtacaccacgtctttgtcaagcaccagttactgcacgcatcagctgagcacggaggggataggcacggacgcaacacttttggaacttagacgctagtgagcacggaaaggaataagcctgaggccaaagcaaaatgaggagcgggaaggcctcctgcaccctggagaccgtgtgggaagacaagcacaagtatgaggaggccgagcggcgcttctacgaacacgaggccacacaggcggccgcctccgcccagcagctgccagccgaggggccagccatgaatgggcccggccaggacgaccctgaggacgctgatgaggcggaagcccctgacggcggcagcaggcgtgatcccaggaagagccaggacagcaggaagcccctgcagaaaaagaggaagcgctcccccaagagcgggctcggccccgcggacctggccctcctgggcctctcggccgaacgtgtgtggctggacaagtcacttttcgaccaggcagagagctcctaccgccagaagctggcagatgtggctgcccaggcagcctggcctcctgccttggccccttggggtctctgcacccatggaaaccaggtggcctgccaccacgtgacctgggggatctgggtcaacaagtcctccttcgaccaggctgagcgggccttcgtggagtggtctcaggccctgttgctggcccccgagggcagccgcaggcaggggactcccaacacaggccagcaggtggccgtccccgacctggcccaccagcccagcccaccggtcaatggccagcccccgctgggcagcctgcaggcactggttcgggaggtgtggctggagaagccccggtatgatgcagccgagaggggcttctacgaggccctgtttgacggccatcccccagggaaggtgcgcctgcaagagcgagccggcctggccgagggtgcccggcggggccgcagagaccggcggggccgcaacatcttagggaacaagcgggccgggctgcgacgggccgatggggaggccccctctgccttgccctactgttacttcctgcagaaggatgcagaggccccctggctcagcaagcctgcctacgacagcgccgagtgccgccaccacgctgccgaggccctgcgtgtggcctggtgcctcgaagctgcctccctgtctcaccgacccggtcctcggtctggcctgtccgtgtccagcctgagacccaagtaggagaaacgtgctgggtgggcacccagcctgggctgtgggcacagggacagccatcccaggctggggctcctccagcttcctcccctgcccacctggggtgggggctccccgagacccgtgggcccagcagagttgaatgcaggagcaggctgagtaaagcagaaaaatggctacaaacttcctagcacatgagaagatctggttcgacaagttcaaatatgacgacgcagaaaggagattctacgagcagatgaacgggcctgtggcaggtgcctcccgccaggagaacggcgccagcgtgatcctccgtgacattgcgagagccagagagaacatccagaaatccctggctggaagctcaggccccggggcctccagcggcaccagcggagaccacggtgagctcgtcgtccggattgccagtctggaagtggagaaccagagtctgcgtggcgtggtacaggagctgcagcaggccatctccaagctggaggcccggctgaacgtgctggagaagagctcgcctggccaccgggccacggccccacagacccagcacgtatctcccatgcgccaagtggagcccccagccaagaagccagccacaccagcagaggatgacgaggatgatgacattgacctgtttggcagtgacaatgaggaggaggacaaggaggcggcacagctgcgggaggagcggctacggcagtacgcggagaagaaggccaagaagcctgcactggtggccaagtcctccatcctgctggatgtcaagccttgggatgatgagacggacatggctcagctggaggcctgtgtgcgctctatccagctggacgggctggtctggggggcttccaagctggtgcccgtgggctacggtatccggaagctacagattcagtgtgtggtggaggacgacaaggtggggacagacttgctggaggaggagatcaccaagtttgaggagcacagtttgaggagccacgtgcagagtgccgagtccgctgcattggaggggagaggagactggggaccctggcccataccctgcactccaccccacggcagtggggagcgagtcccagagtgaaccccacctcagaggaggctcctggctccgagtgggctgtaggggaacagccctgaccgtcaccctccgcctctcctcaggtgcagagtgtcgatatcgcagctttcaacaagatctgaagcctgagtgtgtgtacgtgcgcgcgtgcgtgaggccctgccacgattaaagactgagaccggc

SEQ ID NO: 60951 - DNA, 3194 bp, Homo sapiens
  misc_feature (3082)..(3082): n is a, c, g, or t
ggctccactggttgccatcttccagagccctttcatcagtcttcccgcgtccgccgattcctcctccttggtcgccgcgtccttggctggcgtgtgagtaccgcggcccccgccggaaggagtcgggcgcgacagagacgcccgaggggccgggagggcgggcggcccgggctgcgccagaagctcgcgccgttagggactgaggcacaagtgcgccagcgcgggcttaggggccgtgggccaagtgcggcacttggggcgagcgcagagaggcggggcgacggaggccacgtggccggcttggagggcgtccgcgggacgggggcgccgggagcactgtctcacggcgcatcccggtcgtggaagcccctcggccaggctgctggggcctaaggcctgtgtttgctgccgtctccgtgggagaccagacatctgccccagctgtttctctggcctgcagaccttcgtacaccacgtctttgtcaagcaccagttactgcacgcatcagctgagcacggaggggataggcacggacgcaacacttttggaacttagacgctagtgagcacggaaaggaataagcctgaggccaaagcaaaatgaggagcgggaaggcctcctgcaccctggagaccgtgtgggaagacaagcacaagtatgaggaggccgagcggcgcttctacgaacacgaggccacacaggcggccgcctccgcccagcagctgccagccgaggggccagccatgaatgggcccggccaggacgaccctgaggacgctgatgaggcggaagcccctgacggcggcagcaggcgtgatcccaggaagagccaggacagcaggaagcccctgcagaaaaagaggaagcgctcccccaagagcgggctcggccccgcggacctggccctcctgggcctctcggccgaacgtgtgtggctggacaagtcacttttcgaccaggcagagagctcctaccgccagaagctggcagatgtggctgcccaggcagcctggcctcctgccttggccccttggggtctctgcacccatggaaaccaggtggcctgccaccacgtgacctgggggatctgggtcaacaagtcctccttcgaccaggctgagcgggccttcgtggagtggtctcaggccctgttgctggcccccgagggcagccgcaggcaggggactcccaacacaggccagcaggtggccgtccccgacctggcccaccagcccagcccaccggtcaatggccagcccccgctgggcagcctgcaggcactggttcgggaggtgtggctggagaagccccggtatgatgcagccgagaggggcttctacgaggccctgtttgacggccatcccccagggaaggtgcgcctgcaagagcgagccggcctggccgagggtgcccggcggggccgcagagaccggcggggccgcaacatcttagggaacaagcgggccgggctgcgacgggccgatggggaggccccctctgccttgccctactgttacttcctgcagaaggatgcagaggccccctggctcagcaagcctgcctacgacagcgccgagtgccgccaccacgctgccgaggccctgcgtgtggcctggtgcctcgaagctgcctccctgtctcaccgacccggtcctcggtctggcctgtccgtgtccagcctgagacccaagtaggagaaacgtgctgggtgggcacccagcctgggctgtgggcacagggacagccatcccaggctggggctcctccagcttcctcccctgcccacctggggtgggggctccccgagacccgtgggcccagcagagttgaatgcaggagcaggctgagtaaagcagaaaaatggctacaaacttcctagcacatgagaagatctggttcgacaagttcaaatatgacgacgcagaaaggagattctacgagcagatgaacgggcctgtggcaggtgcctcccgccaggagaacggcgccagcgtgatcctccgtgacattgcgagagccagagagaacatccagaaatccctggctggaagctcaggccccggggcctccagcggcaccagcggagaccacggtgagctcgtcgtccggattgccagtctggaagtggagaaccagagtctgcgtggcgtggtacaggagctgcagcaggccatctccaagctggaggcccggctgaacgtgctggagaagagctcgcctggccaccgggccacggccccacagacccagcacgtatctcccatgcgccaagtggagcccccagccaagaagccagccacaccagcagaggatgacgaggatgatgacattgacctgtttggcagtgacaatgaggaggaggacaaggaggcggcacagctgcgggaggagcggctacggcagtacgcggagaagaaggccaagaagcctgcactggtggccaagtcctccatcctgctggatgtcaagccttgggatgatgagacggacatggctcagctggaggcctgtgtgcgctctatccagctggacgggctggtctggggggcttccaagctggtgcccgtgggctacggtatccggaagctacagattcagtgtgtggtggaggacgacaaggtggggacagacttgctggaggaggagatcaccaagtttgaggagcacagtttgaggagccacgtgcagagtgtcgatatcgcagctttcaacaagatctgaagcctgagtgtgtgtacgtgcgcgcgtgcgtgaggccctgccacgattaaagactgagaccggcaaaaaaaaaaaaaaaaaaaaaaggggggggggggtaaaaaatatacccccgggggggccccaattacgggaaacccccccgttttcggggcaccagaggggcggccctacatggggggaggggcgaatttaataaagcaaggggacagcggggcggggcgttattaaacaacggttttgtggtagcggggggaacaacccggtctagctgggggatcttgggggaggagggaaaccccttattctgggggggggcgacatattggggagaacactacctctacggagagatattanaaggaccgagggggaactattaacactttcaggcgtgtatagtgtgtgttaccacgacgtcatatgctggcgggagaaaattggccacgggagattattgtgaaacttatca

SEQ ID NO: 60952 - DNA, 2880 bp, Homo sapiens
ggctccactggttgccatcttccagagccctttcatcagtcttcccgcgtccgccgattcctcctccttggtcgccgcgtccttggctggcgtgtgagtaccgcggcccccgccggaaggagtcgggcgcgacagagacgcccgaggggccgggagggcgggcggcccgggctgcgccagaagctcgcgccgttagggactgaggcacaagtgcgccagcgcgggcttaggggccgtgggccaagtgcggcacttggggcgagcgcagagaggcggggcgacggaggccacgtggccggcttggagggcgtccgcgggacgggggcgccgggagcactgtctcacggcgcatcccggtcgtggaagcccctcggccaggctgctggggcctaaggcctgtgtttgctgccgtctccgtgggagaccagacatctgccccagctgtttctctggcctgcagaccttcgtacaccacgtctttgtcaagcaccagttactgcacgcatcagctgagcacggaggggataggcacggacgcaacacttttggaacttagacgctagtgagcacggaaaggaataagcctgaggccaaagcaaaatgaggagcgggaaggcctcctgcaccctggagaccgtgtgggaagacaagcacaagtatgaggaggccgagcggcgcttctacgaacacgaggccacacaggcggccgcctccgcccagcagctgccagccgaggggccagccatgaatgggcccggccaggacgaccctgaggacgctgatgaggcggaagcccctgacggcggcagcaggcgtgatcccaggaagagccaggacagcaggaagcccctgcagaaaaagaggaagcgctcccccaagagcgggctcggccccgcggacctggccctcctgggcctctcggccgaacgtgtgtggctggacaagtcacttttcgaccaggcagagagctcctaccgccagaagctggcagatgtggctgcccaggcagcctggcctcctgccttggccccttggggtctctgcacccatggaaaccaggtggcctgccaccacgtgacctgggggatctgggtcaacaagtcctccttcgaccaggctgagcgggccttcgtggagtggtctcaggccctgttgctggcccccgagggcagccgcaggcaggggactcccaacacaggccagcaggtggccgtccccgacctggcccaccagcccagcccaccggtcaatggccagcccccgctgggcagcctgcaggcactggttcgggaggtgtggctggagaagccccggtatgatgcagccgagaggggcttctacgaggccctgtttgacggccatcccccagggaaggtgcgcctgcaagagcgagccggcctggccgagggtgcccggcggggccgcagagaccggcggggccgcaacatcttagggaacaagcgggccgggctgcgacgggccgatggggaggccccctctgccttgccctactgttacttcctgcagaaggatgcagaggccccctggctcagcaagcctgcctacgacagcgccgagtgccgccaccacgctgccgaggccctgcgtgtggcctggtgcctcgaagctgcctccctgtctcaccgacccggtcctcggtctggcctgtccgtgtccagcctgagacccaagtaggagaaacgtgctgggtgggcacccagcctgggctgtgggcacagggacagccatcccaggctggggctcctccagcttcctcccctgcccacctggggtgggggctccccgagacccgtgggcccagcagagttgaatgcaggagcaggctgagtaaagcagaaaaatggctacaaacttcctagcacatgagaagatctggttcgacaagttcaaatatgacgacgcagaaaggagattctacgagcagatgaacgggcctgtggcaggtgcctcccgccaggagaacggcgccagcgtgatcctccgtgacattgcgagagccagagagaacatccagaaatccctggctggaagctcaggccccggggcctccagcggcaccagcggagaccacggtgagctcgtcgtccggattgccagtctggaagtggagaaccagagtctgcgtggcgtggtacaggagctgcagcaggccatctccaagctggaggcccggctgaacgtgctggagaagagctcgcctggccaccgggccacggccccacagacccagcacgtatctcccatgcgccaagtggagcccccagccaagaagccagccacaccagcagaggatgacgaggatgatgacattgacctgtttggcagtgacaatgaggaggaggacaaggaggcggcacagctgcgggaggagcggctacggcagtacgcggagaagaaggccaagaagcctgcactggtggccaagtcctccatcctgctggatgtcaagccttgggatgatgagacggacatggctcagctggaggcctgtgtgcgctctatccagctggacgggctggtctggggggcttccaagctggtgcccgtgggctacggtatccggaagctacagattcagtgtgtggtggaggacgacaaggtggggacagacttgctggaggaggagatcaccaagtttgaggagcacagtttgaggagccacgtgcagagtgtcgatatcgcagctttcaacaagatctgaagcctgagtgtgtgtacgtgcgcgcgtgcgtgaggccctgccacgattaaagactgagaccggcgccctctggctccgtcctggtcatttcctgctcgtacctggcctgtctccctccctgtctcagccccatctctgccctgctgttcccacacagt

SEQ ID NO: 60953 - DNA, 3320 bp, Homo sapiens
  misc_feature (2821)..(2821): n is a, c, g, or t
  misc_feature (3317)..(3317): n is a, c, g, or t
ggctccactggttgccatcttccagagccctttcatcagtcttcccgcgtccgccgattcctcctccttggtcgccgcgtccttggctggcgtgtgagtaccgcggcccccgccggaaggagtcgggcgcgacagagacgcccgaggggccgggagggcgggcggcccgggctgcgccagaagctcgcgccgttagggactgaggcacaagtgcgccagcgcgggcttaggggccgtgggccaagtgcggcacttggggcgagcgcagagaggcggggcgacggaggccacgtggccggcttggagggcgtccgcgggacgggggcgccgggagcactgtctcacggcgcatcccggtcgtggaagcccctcggccaggctgctggggcctaaggcctgtgtttgctgccgtctccgtgggagaccagacatctgccccagctgtttctctggcctgcagaccttcgtacaccacgtctttgtcaagcaccagttactgcacgcatcagctgagcacggaggggataggcacggacgcaacacttttggaacttagacgctagtgagcacggaaaggaataagcctgaggccaaagcaaaatgaggagcgggaaggcctcctgcaccctggagaccgtgtgggaagacaagcacaagtatgaggaggccgagcggcgcttctacgaacacgaggccacacaggcggccgcctccgcccagcagctgccagccgaggggccagccatgaatgggcccggccaggacgaccctgaggacgctgatgaggcggaagcccctgacggcggcagcaggcgtgatcccaggaagagccaggacagcaggaagcccctgcagaaaaagaggaagcgctcccccaagagcgggctcggccccgcggacctggccctcctgggcctctcggccgaacgtgtgtggctggacaagtcacttttcgaccaggcagagagctcctaccgccagaagctggcagatgtggctgcccaggcagcctggcctcctgccttggccccttggggtctctgcacccatggaaaccaggtggcctgccaccacgtgacctgggggatctgggtcaacaagtcctccttcgaccaggctgagcgggccttcgtggagtggtctcaggccctgttgctggcccccgagggcagccgcaggcaggggactcccaacacaggccagcaggtggccgtccccgacctggcccaccagcccagcccaccggtcaatggccagcccccgctgggcagcctgcaggcactggttcgggaggtgtggctggagaagccccggtatgatgcagccgagaggggcttctacgaggccctgtttgacggccatcccccagggaaggtgcgcctgcaagagcgagccggcctggccgagggtgcccggcggggccgcagagaccggcggggccgcaacatcttagggaacaagcgggccgggctgcgacgggccgatggggaggccccctctgccttgccctactgttacttcctgcagaaggatgcagaggccccctggctcagcaagcctgcctacgacagcgccgagtgccgccaccacgctgccgaggccctgcgtgtggcctggtgcctcgaagctgcctccctgtctcaccgacccggtcctcggtctggcctgtccgtgtccagcctgagacccaagtaggagaaacgtgctgggtgggcacccagcctgggctgtgggcacagggacagccatcccaggctggggctcctccagcttcctcccctgcccacctggggtgggggctccccgagacccgtgggcccagcagagttgaatgcaggagcaggctgagtaaagcagaaaaatggctacaaacttcctagcacatgagaagatctggttcgacaagttcaaatatgacgacgcagaaaggagattctacgagcagatgaacgggcctgtggcaggtgcctcccgccaggagaacggcgccagcgtgatcctccgtgacattgcgagagccagagagaacatccagaaatccctggctggaagctcaggccccggggcctccagcggcaccagcggagaccacggtgagctcgtcgtccggattgccagtctggaagtggagaaccagagtctgcgtggcgtggtacaggagctgcagcaggccatctccaagctggaggcccggctgaacgtgctggagaagagctcgcctggccaccgggccacggccccacagacccagcacgtatctcccatgcgccaagtggagcccccagccaagaagccagccacaccagcagaggatgacgaggatgatgacattgacctgtttggcagtgacaatgaggaggaggacaaggaggcggcacagctgcgggaggagcggctacggcagtacgcggagaagaaggccaagaagcctgcactggtggccaagtcctccatcctgctggatgtcaagccttgggatgatgagacggacatggctcagctggaggcctgtgtgcgctctatccagctggacgggctggtctggggggcttccaagctggtgcccgtgggctacggtatccggaagctacagattcagtgtgtggtggaggacgacaaggtggggacagacttgctggaggaggagatcaccaagtttgaggagcacagtttgaggagccacgtgcagagtgtcgatatcgcagctttcaacaagatctgaagcctgagtgtgtgtacgtgcgcgcgtgcgtgaggccctgccacgattaaagactgagaccggcaaaaaaaaaaaaaaaaaaaaaaaacaacaaaaaanaaaaaaaaaaaaaaaaaaaaattatataaaaatataaatttaactatatgataaagattaaatatataatactttaatataaaaaaaaaatcttaggggggggccctgtcccaaatttgccttttagggggttgtttaaaaattaattggcggtgtttttaaacccttataattggaaaaaccttggggttcccaaacttaaatgcttttaataaaattcctttttgtctatgtgggttaatatttaaaaggtccgttccattggttttttcaaacagttgtgcacttaaaatgggaatgggcaattgttaaggttaaattttttgtaaaaatttcgtttaaatttttgtaaaataatttatttttttacacaatgggctaaattgggaaaatctctttttaataaaaaaatttctccgcaatagggtgtaggtattttccattttgtaaaaaaagtttccttttataatataatgggctttcaacgttaataggngaa

SEQ ID NO: 60954 - DNA, 1677 bp, Homo sapiens
ggctccactggttgccatcttccagagccctttcatcagtcttcccgcgtccgccgattcctcctccttggtcgccgcgtccttggctggcgtgtgagtaccgcggcccccgccggaaggagtcgggcgcgacagagacgcccgaggggccgggagggcgggcggcccgggctgcgccagaagctcgcgccgttagggactgaggcacaagtgcgccagcgcgggcttaggggccgtgggccaagtgcggcacttggggcgagcgcagagaggcggggcgacggaggccacgtggccggcttggagggcgtccgcgggacgggggcgccgggagcactgtctcacggcgcatcccggtcgtggaagcccctcggccaggctgctggggcctaaggcctgtgtttgctgccgtctccgtgggagaccagacatctgccccagctgtttctctggcctgcagaccttcgtacaccacgtctttgtcaagcaccagttactgcacgcatcagctgagcacggaggggataggcacggacgcaacacttttggaacttagacgctagtgagcacggaaaggaataagcctcagaaaaatggctacaaacttcctagcacatgagaagatctggttcgacaagttcaaatatgacgacgcagaaaggagattctacgagcagatgaacgggcctgtggcaggtgcctcccgccagagctcaggccccggggcctccagcggcaccagcggagaccacggtgagctcgtcgtccggattgccagtctggaagtggagaaccagagtctgcgtggcgtggtacaggagctgcagcaggccatctccaagctggaggcccggctgaacgtgctggagaagagctcgcctggccaccgggccacggccccacagacccagcacgtatctcccatgcgccaagtggagcccccagccaagaagccagccacaccagcagaggatgacgaggatgatgacattgacctgtttggcagtgacaatgaggaggaggacaaggaggcggcacagctgcgggaggagcggctacggcagtacgcggagaagaaggccaagaagcctgcactggtggccaagtcctccatcctgctggatgtcaagccttgggatgatgagacggacatggctcagctggaggcctgtgtgcgctctatccagctggacgggctggtctggggggcttccaagctggtgcccgtgggctacggtatccggaagctacagattcagtgtgtggtggaggacgacaaggtggggacagacttgctggaggaggagatcaccaagtttgaggagcacgtgcagagtgtcgatatcgcagctttcaacaagatctgaagcctgagtgtgtgtacgtgcgcgcgtgcgtgaggccctgccacgattaaagactgagaccggctcaaaaaaaaaccttctctcttaatgtctttataaaatgtactggccgtatgtttacaattcgtcatttgtgaaaccgtggcgttcccaaataatgtcctggtcgatattccccttttgccagctggggtattaacgaaatggccggacctgatcgccttctccaacattgtccaacctcaatggctaatggctaaatgttagccgacaattttggctaaatttcgcgtatattatctttgaatcc

SEQ ID NO: 60955 - DNA, 378 bp, Homo sapiens
cttatgttctgacccacccttatgttctgacgaagcctgcactggtggccaagtcctccatcctgctggatgtcaagccttgggatgatgagacggacatggctcagctggaggcctgtgtgcgctctatccagctggacgggctggtctggggggcttccaagctggtgcccgtgggctacggtatccggaagctacagattcagtgtgtggtggaggacgacaaggtggggacagacttgctggaggaggagatcaccaagtttgaggagcacgtgcagagtgtcgatatcgcagctttcaacaagatctgaagcctgagtgtgtgtacgtgcgcgcgtgcgtgaggccctgccacgattaaagactgagaccggc

SEQ ID NO: 60956 - DNA, 1612 bp, Homo sapiens
ggctccactggttgccatcttccagagccctttcatcagtcttcccgcgtccgccgattcctcctccttggtcgccgcgtccttggctggcgtgtgagtaccgcggcccccgccggaaggagtcgggcgcgacagagacgcccgaggggccgggagggcgggcggcccgggctgcgccagaagctcgcgccgttagggactgaggcacaagtgcgccagcgcgggcttaggggccgtgggccaagtgcggcacttggggcgagcgcagagaggcggggcgacggaggccacgtggccggcttggagggcgtccgcgggacgggggcgccgggagcactgtctcacggcgcatcccggtcgtggaagcccctcggccaggctgctggggcctaaggcctgtgtttgctgccgtctccgtgggagaccagacatctgccccagctgtttctctggcctgcagaccttcgtacaccacgtctttgtcaagcaccagttactgcacgcatcagctgagcacggaggggataggcacggacgcaacacttttggaacttagacgctagtgagcacggaaaggaataagcctcagaaaaatggctacaaacttcctagcacatgagaagatctggttcgacaagttcaaatatgacgacgcagaaaggagattctacgagcagatgaacgggcctgtggcaggtgcctcccgccaggagaacggcgccagcgtgatcctccgtgacattgcgagagccagagagaacatccagaaatccctggctggaagctcaggccccggggcctccagcggcaccagcggacacgtatctcccatgcgccaagtggagcccccagccaagaagccagccacaccagcagaggatgacgaggatgatgacattgacctgtttggcagtgacaatgaggaggaggacaaggaggcggcacagctgcgggaggagcggctacggcagtacgcggagaagaaggccaagaagcctgcactggtggccaagtcctccatcctgctggatgtcaagccttgggatgatgagacggacatggctcagctggaggcctgtgtgcgctctatccagctggacgggctggtctggggggcttccaagctggtgcccgtgggctacggtatccggaagctacagattcagtgtgtggtggaggacgacaaggtggggacagacttgctggaggaggagatcaccaagtttgaggagcacgtgcagagtgtcgatatcgcagctttcaacaagatctgaagcctgagtgtgtgtacgtgcgcgcgtgcgtgaggccctgccacgattaaagactgagaccggcaaaaaaaacagaaacacaacacaaaaacagcaaaactacacaaaacacaaaaagcaaaacacacaaaacaagggcagcaaaacaccgagcccagaaaagaacccacatataaagacgcaccagccgacgaaaaagacgacacaaaaacaagaaaagaagcagaagacgccgcgcgcagccacaacacgagcaacaacaaaacccggaccacacagcgacacacgcaaataaaagacgagacaaaaaacaccccaccccaccacccagcagcccc

SEQ ID NO: 60957 - DNA, 1393 bp, Homo sapiens
  misc_feature (1330)..(1330): n is a, c, g, or t
  misc_feature (1344)..(1344): n is a, c, g, or t
  misc_feature (1347)..(1347): n is a, c, g, or t
  misc_feature (1354)..(1354): n is a, c, g, or t
ggctccactggttgccatcttccagagccctttcatcagtcttcccgcgtccgccgattcctcctccttggtcgccgcgtccttggctggcgtgtgagtaccgcggcccccgccggaaggagtcgggcgcgacagagacgcccgaggggccgggagggcgggcggcccgggctgcgccagaagctcgcgccgttagggactgaggcacaagtgcgccagcgcgggcttaggggccgtgggccaagtgcggcacttggggcgagcgcagagaggcggggcgacggaggccacgtggccggcttggagggcgtccgcgggacgggggcgccgggagcactgtctcacggcgcatcccggtcgtggaagcccctcggccaggctgctggggcctaaggcctgtgtttgctgccgtctccgtgggagaccagacatctgccccagctgtttctctggcctgcagaccttcgtacaccacgtctttgtcaagcaccagttactgcacgcatcagctgagcacggaggggataggcacggacgcaacacttttggaacttagacgctagtgagcacggaaaggaataagcctcagaaaaatggctacaaacttcctagcacatgagaagatctggttcgacaagttcaaatatgacgacgcagaaaggagattctacgagcagatgaacgggcctgtggcaggtgcctcccgccagagctcaggccccggggcctccagcggcaccagcggagaccacggtgagctcgtcgtccggattgccagtctggaagtggagaaccagagtctgcgtggcgtggtacaggagctgcagcaggccatctccaagctggaggcccggctgaacgtgctggagaagagctcgcctggccaccgggccacggccccacagacccagcacgtatctcccatgcgccaagtggagcccccagccaagaagccagccacaccagcagaggatgacgaggatgatgacattgacctgtttggcagtgacaatgaggaggaggacaaggaggcggcacagctgcgggaggagcggctacggcagtacgcggagaagaaggccaagaagcctgcactggtggccaagtcctccatcctgctggatgtcaagccttgggatgatgagacggacatggctcagctggaggcctgtgtgcgctctatccagctggacgggctggtctggggggcttccaagctggtgcccgtgggctacggtatccggaagctacagattcagtgtgtggtggaggacgacaaggtggggacagacttgctggaggaggagatcaccaagtttgaggagcaccncccgtggggccgcntgnggggggnatccccgttggggcacggcccgtgccgttcccttcaccg

SEQ ID NO: 60958 - DNA, 2526 bp, Homo sapiens
ggctccactggttgccatcttccagagccctttcatcagtcttcccgcgtccgccgattcctcctccttggtcgccgcgtccttggctggcgtgtgagtaccgcggcccccgccggaaggagtcgggcgcgacagagacgcccgaggggccgggagggcgggcggcccgggctgcgccagaagctcgcgccgttagggactgaggcacaagtgcgccagcgcgggcttaggggccgtgggccaagtgcggcacttggggcgagcgcagagaggcggggcgacggaggccacgtggccggcttggagggcgtccgcgggacgggggcgccgggagcactgtctcacggcgcatcccggtcgtggaagcccctcggccaggctgctggggcctaaggcctgtgtttgctgccgtctccgtgggagaccagacatctgccccagctgtttctctggcctgcagaccttcgtacaccacgtctttgtcaagcaccagttactgcacgcatcagctgagcacggaggggataggcacggacgcaacacttttggaacttagacgctagtgagcacggaaaggaataagcctgaggccaaagcaaaatgaggagcgggaaggcctcctgcaccctggagaccgtgtgggaagacaagcacaagtatgaggaggccgagcggcgcttctacgaacacgaggccacacaggcggccgcctccgcccagcagctgccagccgaggggccagccatgaatgggcccggccaggacgaccctgaggacgctgatgaggcggaagcccctgacggcggcagcaggcgtgatcccaggaagagccaggacagcaggaagcccctgcagaaaaagaggaagcgctcccccaagagcgggctcggccccgcggacctggccctcctgggcctctcggccgaacgtgtgtggctggacaagtcacttttcgaccaggcagagagctcctaccgccagaagctggcagatgtggctgcccaggcagcctggcctcctgccttggccccttggggtctctgcacccatggaaaccaggtggcctgccaccacgtgacctgggggatctgggtcaacaagtcctccttcgaccaggctgagcgggccttcgtggagtggtctcaggccctgttgctggcccccgagggcagccgcaggcaggggactcccaacacaggccagcaggtggccgtccccgacctggcccaccagcccagcccaccggtcaatggccagcccccgctgggcagcctgcaggcactggttcgggaggtgtggctggagaagccccggtatgatgcagccgagaggggcttctacgaggccctgtttgacggccatcccccagggaaggtgcgcctgcaagagcgagccggcctggccgagggtgcccggcggggccgcagagaccggcggggccgcaacatcttagggaacaagcgggccgggctgcgacgggccgatggggaggccccctctgccttgccctactgttacttcctgcagaaggatgcagaggccccctggctcagcaagcctgcctacgacagcgccgagtgccgccaccacgctgccgaggccctgcgtgtggcctggtgcctcgaagctgcctccctgtctcaccgacccggtcctcggtctggcctgtccgtgtccagcctgagacccaagtaggagaaacgtgctgggtgggcacccagcctgggctgtgggcacagggacagccatcccaggctggggctcctccagcttcctcccctgcccacctggggtgggggctccccgagacccgtgggcccagcagagttgaatgcaggagcaggctgagtaaagcagaaaaatggctacaaacttcctagcacatgagaagatctggttcgacaagttcaaatatgacgacgcagaaaggagattctacgagcagatgaacgggcctgtggcaggtgcctcccgccaggagaacggcgccagcgtgatcctccgtgacattgcgagagccagagagaacatccagaaatccctggctggaagctcaggccccggggcctccagcggcaccagcggagaccacggtgagctcgtcgtccggattgccagtctggaagtggagaaccagagtctgcgtggcgtggtacaggagctgcagcaggccatctccaagctggaggcccggctgaacgtgctggagaagagctcgcctggccaccgggccacggccccacagacccagcacgtatctcccatgcgccaagtggagcccccagccaagaagccagccacaccagcagaggatgacgaggatgatgacattgacctgtttggcagtgacaatgaggaggaggacaaggaggcggcacagctgcgggaggagcggctacggcagtacgcggagaagaaggccaagaagcctgcactggtggccaagtcctccatcctgctggatgtcaagcctttgggatgatgagacggcggccatcgtgcgcttcgggatctctagagtcacct

SEQ ID NO: 60959 - DNA, 3161 bp, Homo sapiens
  misc_feature (2726)..(2726): n is a, c, g, or t
  misc_feature (2738)..(2738): n is a, c, g, or t
  misc_feature (2898)..(2898): n is a, c, g, or t
ggctccactggttgccatcttccagagccctttcatcagtcttcccgcgtccgccgattcctcctccttggtcgccgcgtccttggctggcgtgtgagtaccgcggcccccgccggaaggagtcgggcgcgacagagacgcccgaggggccgggagggcgggcggcccgggctgcgccagaagctcgcgccgttagggactgaggcacaagtgcgccagcgcgggcttaggggccgtgggccaagtgcggcacttggggcgagcgcagagaggcggggcgacggaggccacgtggccggcttggagggcgtccgcgggacgggggcgccgggagcactgtctcacggcgcatcccggtcgtggaagcccctcggccaggctgctggggcctaaggcctgtgtttgctgccgtctccgtgggagaccagacatctgccccagctgtttctctggcctgcagaccttcgtacaccacgtctttgtcaagcaccagttactgcacgcatcagctgagcacggaggggataggcacggacgcaacacttttggaacttagacgctagtgagcacggaaaggaataagcctgaggccaaagcaaaatgaggagcgggaaggcctcctgcaccctggagaccgtgtgggaagacaagcacaagtatgaggaggccgagcggcgcttctacgaacacgaggccacacaggcggccgcctccgcccagcagctgccagccgaggggccagccatgaatgggcccggccaggacgaccctgaggacgctgatgaggcggaagcccctgacggcggcagcaggcgtgatcccaggaagagccaggacagcaggaagcccctgcagaaaaagaggaagcgctcccccaagagcgggctcggccccgcggacctggccctcctgggcctctcggccgaacgtgtgtggctggacaagtcacttttcgaccaggcagagagctcctaccgccagaagctggcagatgtggctgcccaggcagcctggcctcctgccttggccccttggggtctctgcacccatggaaaccaggtggcctgccaccacgtgacctgggggatctgggtcaacaagtcctccttcgaccaggctgagcgggccttcgtggagtggtctcaggccctgttgctggcccccgagggcagccgcaggcaggggactcccaacacaggccagcaggtggccgtccccgacctggcccaccagcccagcccaccggtcaatggccagcccccgctgggcagcctgcaggcactggttcgggaggtgtggctggagaagccccggtatgatgcagccgagaggggcttctacgaggccctgtttgacggccatcccccagggaaggtgcgcctgcaagagcgagccggcctggccgagggtgcccggcggggccgcagagaccggcggggccgcaacatcttagggaacaagcgggccgggctgcgacgggccgatggggaggccccctctgccttgccctactgttacttcctgcagaaggatgcagaggccccctggctcagcaagcctgcctacgacagcgccgagtgccgccaccacgctgccgaggccctgcgtgtggcctggtgcctcgaagctgcctccctgtctcaccgacccggtcctcggtctggcctgtccgtgtccagcctgagacccaagtaggagaaacgtgctgggtgggcacccagcctgggctgtgggcacagggacagccatcccaggctggggctcctccagcttcctcccctgcccacctggggtgggggctccccgagacccgtgggcccagcagagttgaatgcaggagcaggctgagtaaagcagaaaaatggctacaaacttcctagcacatgagaagatctggttcgacaagttcaaatatgacgacgcagaaaggagattctacgagcagatgaacgggcctgtggcaggtgcctcccgccaggagaacggcgccagcgtgatcctccgtgacattgcgagagccagagagaacatccagaaatccctggctggaagctcaggccccggggcctccagcggcaccagcggagaccacggtgagctcgtcgtccggattgccagtctggaagtggagaaccagagtctgcgtggcgtggtacaggagctgcagcaggccatctccaagctggaggcccggctgaacgtgctggagaagagctcgcctggccaccgggccacggccccacagacccagacaatgaggaggaggacaaggaggcggcacagctgcgggaggagcggctacggcagtacgcggagaagaaggccaagaagcctgcactggtggccaagtcctccatcctgctggatgtcaagccttgggatgatgagacggacatggctcagctggaggcctgtgtgcgctctatccagctggacgggctggtctggggggcttccaagctggtgcccgtgggctacggtatccggaagctacagattcagtgtgtggtggaggacgacaaggtggggacagacttgctggaggaggagatcaccaagtttgaggagcacagtttgaggagccacgtgcagagtgtcgatatcgcagctttcaacaagatctgaagcctgagtgtgtgtacgtgcgcgcgtgcgtgaggccctgccacgattaaagactgagaccggcaaaaaaaaaaaataaaaaaaaaaaaaacgggggggantatatggggggngggggaaaaagagaggtgtattgagaatggcgacatggggtcataggcgtgtgtttccgtggacccaaggttttttgtgtgtacaacgggggtaaattcggaggggtctccatataggggaggccagtataaattgcgaataagcgcccggggttttacncgggggttgttatgaacttgttgtggagaaaaaacgggaacgataccacagacaagcagacgcccggccggcaaccaagcgcacagacaaagaagcaacgcggggggcctctcacacacgccatttgtaggctaccaacaaaacacacagcgggggtcgcctcgggaaaaaaaacacgccgtacatacgcaaatggcgagtacgacgaaacaacaagttacaccaagaccaggacgtccgacgcgaagtcacacataagagac

SEQ ID NO: 60960 - DNA, 3288 bp, Homo sapiens
ggctccactggttgccatcttccagagccctttcatcagtcttcccgcgtccgccgattcctcctccttggtcgccgcgtccttggctggcgtgtgagtaccgcggcccccgccggaaggagtcgggcgcgacagagacgcccgaggggccgggagggcgggcggcccgggctgcgccagaagctcgcgccgttagggactgaggcacaagtgcgccagcgcgggcttaggggccgtgggccaagtgcggcacttggggcgagcgcagagaggcggggcgacggaggccacgtggccggcttggagggcgtccgcgggacgggggcgccgggagcactgtctcacggcgcatcccggtcgtggaagcccctcggccaggctgctggggcctaaggcctgtgtttgctgccgtctccgtgggagaccagacatctgccccagctgtttctctggcctgcagaccttcgtacaccacgtctttgtcaagcaccagttactgcacgcatcagctgagcacggaggggataggcacggacgcaacacttttggaacttagacgctagtgagcacggaaaggaataagcctgaggccaaagcaaaatgaggagcgggaaggcctcctgcaccctggagaccgtgtgggaagacaagcacaagtatgaggaggccgagcggcgcttctacgaacacgaggccacacaggcggccgcctccgcccagcagctgccagccgaggggccagccatgaatgggcccggccaggacgaccctgaggacgctgatgaggcggaagcccctgacggcggcagcaggcgtgatcccaggaagagccaggacagcaggaagcccctgcagaaaaagaggaagcgctcccccaagagcgggctcggccccgcggacctggccctcctgggcctctcggccgaacgtgtgtggctggacaagtcacttttcgaccaggcagagagctcctaccgccagaagctggcagatgtggctgcccaggcagcctggcctcctgccttggccccttggggtctctgcacccatggaaaccaggtggcctgccaccacgtgacctgggggatctgggtcaacaagtcctccttcgaccaggctgagcgggccttcgtggagtggtctcaggccctgttgctggcccccgagggcagccgcaggcaggggactcccaacacaggccagcaggtggccgtccccgacctggcccaccagcccagcccaccggtcaatggccagcccccgctgggcagcctgcaggcactggttcgggaggtgtggctggagaagccccggtatgatgcagccgagaggggcttctacgaggccctgtttgacggccatcccccagggaaggtgcgcctgcaagagcgagccggcctggccgagggtgcccggcggggccgcagagaccggcggggccgcaacatcttagggaacaagcgggccgggctgcgacgggccgatggggaggccccctctgccttgccctactgttacttcctgcagaaggatgcagaggccccctggctcagcaagcctgcctacgacagcgccgagtgccgccaccacgctgccgaggccctgcgtgtggcctggtgcctcgaagctgcctccctgtctcaccgacccggtcctcggtctggcctgtccgtgtccagcctgagacccaagtaggagaaacgtgctgggtgggcacccagcctgggctgtgggcacagggacagccatcccaggctggggctcctccagcttcctcccctgcccacctggggtgggggctccccgagacccgtgggcccagcagagttgaatgcaggagcaggctgagtaaaggtggtgctgcgcttgtgggttccagggacactgcttgaggttacaaaattccaggctgcctggatgagggcagggaagggctcagcacagggcagaatctctgccttgcccagggtccctctttggctgggaagctccccaagtcccctgtggctgtcacatgccagggctgagaagataaggctacttataggggcgggaagcattgaagctggtttctggccctagcgctcccctgcgatgagatgtgggagccagtgtgtccctgcctgtccatcctgtgcacccccagctttccttgtcacctgaaaccacctctgagggaaggtggtggcgtctcagatgcatgggcatgtgactggtcaggtggcctccatcccagggtgccccgtctgtgtgacctccctctgggtgctgtgggcttgctccagggtgcaggtgcaaccccagcagcggtctctggggccaggcaggtgggtggacgattggacttggaggggaatacagagggcatggaagtggcgaggctggcctgttggcgagggtatcctggtggtggggcgggctgagtcagggaaggactctgaaggtcccaagcagctgctgaggcccccaaggaagtggttccaaccttggacccctaggggtctggatttgctggttaacaagataacctgagggcaggaccccataggggaatgctacctcctgcccttccacctgccctggtgttcacggtggcctggtccctccttgccgagagagtgtcctgggtcagggacgcagaggacgctcacagactccagccctttgttaccgagaggacacttggcaaggtccagcgatggtccggagtccacacacagactggcggcagggcaggagggggacagttctgttgtgcttggttggacagtaagagggtcttggccagtccagggtggggggcggcaaactccataaagaaccagagggtctgggccccggccacagagtcatctgcccagctcctctgctgctggccagtgggagtggcacgaggtggggctttgtgccagtaaaaccacaggctggatttgcctgcgggccatggtccctgtctagggcagcaattctcaaccttcttgctctcaggaccccaaagagctttcattgtatctattgatttttaccacattacctgatacccaagggttagacacacgttacaagaaaagaaaactacagataagtattctcttgaacacaggtacaaaaatgctaaatagaatttttgcaaattaaattcaatgctatataaaaacaaaacatgatctagtgggatttatttcagggatgcaaacctgtttaaggattgaaaaatcaatggatgcctcttcagattattaaagaattatttttaaagagagaaaagtccatgtaatttaccatatt

SEQ ID NO: 60961 - DNA, 1148 bp, Homo sapiens
ggctccactggttgccatcttccagagccctttcatcagtcttcccgcgtccgccgattcctcctccttggtcgccgcgtccttggctggcgtgtgagtaccgcggcccccgccggaaggagtcgggcgcgacagagacgcccgaggggccgggagggcgggcggcccgggctgcgccagaagctcgcgccgttagggactgaggcacaagtgcgccagcgcgggcttaggggccgtgggccaagtgcggcacttggggcgagcgcagagaggcggggcgacggaggccacgtggccggcttggagggcgtccgcgggacgggggcgccgggagcactgtctcacggcgcatcccggtcgtggaagcccctcggccaggctgctggggcctaaggcctgtgtttgctgccgtctccgtgggagaccagacatctgccccagctgtttctctggcctgcagaccttcgtacaccacgtctttgtcaagcaccagttactgcacgcatcagctgagcacggaggggataggcacggacgcaacacttttggaacttagacgctagtgagcacggaaaggaataagcctcagaaaaatggctacaaacttcctagcacatgagaagatctggttcgacaagttcaaatatgacgacgcagaaaggagattctacgagcagatgaacgggcctgtggcaggtgcctcccgccagacaatgaggaggaggacaaggaggcggcacagctgcgggaggagcggctacggcagtacgcggagaagaaggccaagaagcctgcactggtggccaagtcctccatcctgctggatgtcaagccttgggatgatgagacggacatggctcagctggaggcctgtgtgcgctctatccagctggacgggctggtctggggggcttccaagctggtgcccgtgggctacggtatccggaagctacagattcagtgtgtggtggaggacgacaaggtggggacagacttgctggaggaggagatcaccaagtttgaggagcacagtttgaggagccacgtgcagagtgtcgatatcgcagctttcaacaagatctgaagcctgagtgtgtgtacgtgcgcgcgtgcgtgaggccctgccacgattaaagactgagaccggc

SEQ ID NO: 60962 - DNA, 1125 bp, Homo sapiens
ggctccactggttgccatcttccagagccctttcatcagtcttcccgcgtccgccgattcctcctccttggtcgccgcgtccttggctggcgtgtgagtaccgcggcccccgccggaaggagtcgggcgcgacagagacgcccgaggggccgggagggcgggcggcccgggctgcgccagaagctcgcgccgttagggactgaggcacaagtgcgccagcgcgggcttaggggccgtgggccaagtgcggcacttggggcgagcgcagagaggcggggcgacggaggccacgtggccggcttggagggcgtccgcgggacgggggcgccgggagcactgtctcacggcgcatcccggtcgtggaagcccctcggccaggctgctggggcctaaggcctgtgtttgctgccgtctccgtgggagaccagacatctgccccagctgtttctctggcctgcagaccttcgtacaccacgtctttgtcaagcaccagttactgcacgcatcagctgagcacggaggggataggcacggacgcaacacttttggaacttagacgctagtgagcacggaaaggaataagcctgtactgtgactgggtcaaaatttctgtctcttgatttggatagggtggtcgggcagtctctgaagggggcggggatgctgttgctaagaagtagtactttcagaggctttaagtggaaggaagaaggcaaagggggcggagtgggttggggacctgatgagacgtcaggattggtttccagaatgaaggaccgcctggcagcagaagaactgtgtagctaaacttggggttgtccctgcccgacagggcggggtgcttcttaagttgacactgcctgcggctcacctcccagggaggcaggccaggccatctcacctgagcagcctccttctacagctccgcccaccccgtcatctggaccccatgagccttaagcagctggctcgcaggcagttggttacttccggagcccgtgtgtgcccagccccgttctgggggtgggggatgcagctgaggggctgggcaggtgtggaaggagcccccgagcgaccgtaacggcacgtggatactcaagagtctacctacagatgcagactact

SEQ ID NO: 60963 - DNA, 464 bp, Homo sapiens
tagggagcgtcttcatgggccctgtggcctcccatgggccccggttcctcgttggtgccattagaacttgttgctgggactgcgggattcgggccacatgcccgcaaagaactccatgttccacttagaggcttcagagtgcagtgccaggggtgccttcccaaaagtcctccctgcctgggtggagcgtagacagctcagcaccccacggggggcgttggagccagccttggttttgttgggtaaggatgttagaagaggggcgaagacccatagccactggtgtgaagggtctgctcttgaccgaaggctgcctccctctgggtgcagaccaggcaggtggtcccagtcacggtgccctggggccactgggtctgtctgccctcaggctccactagacacacctgcggaggcagcagactagcagcggtgtctgtgaggggcagctgcacagccccctcttg

SEQ ID NO: 60964 - DNA, 1233 bp, Homo sapiens
ggctccactggttgccatcttccagagccctttcatcagtcttcccgcgtccgccgattcctcctccttggtcgccgcgtccttggctggcgtgtgagtaccgcggcccccgccggaaggagtcgggcgcgacagagacgcccgaggggccgggagggcgggcggcccgggctgcgccagaagctcgcgccgttagggactgaggcacaagtgcgccagcgcgggcttaggggccgtgggccaagtgcggcacttggggcgagcgcagagaggcggggcgacggaggccacgtggccggcttggagggcgtccgcgggacgggggcgccgggagcactgtctcacggcgcatcccggtcgtggaagcccctcggccaggctgctggggcctaaggcctgtgtttgctgccgtctccgtgggagaccagacatctgccccagctgtttctctggcctgcagaccttcgtacaccacgtctttgtcaagcaccagttactgcacgcatcagctgagcacggaggggataggcacggacgcaacacttttggaacttagacgctagtgagcacggaaaggaataagcctcagaaaaatggctacaaacttcctagcacatgagaagatctggttcgacaagttcaaatatgacgacgcagaaaggagattctacaagagctcgcctggccaccgggccacggccccacagacccagcacgtatctcccatgcgccaagtggagcccccagccaagaagccagccacaccagcagaggatgacgaggatgatgacattgacctgtttggcagtgacaatgaggaggaggacaaggaggcggcacagctgcgggaggagcggctacggcagtacgcggagaagaaggccaagaagcctgcactggtggccaagtcctccatcctgctggatgtcaagccttgggatgatgagacggacatggctcagctggaggcctgtgtgcgctctatccagctggacgggctggtctggggggcttccaagctggtgcccgtgggctacggtatccggaagctacagattcagtgtgtggtggaggacgacaaggtggggacagacttgctggaggaggagatcaccaagtttgaggagcacgtgcagagtgtcgatatcgcagctttcaacaagatctgaagcctgagtgtgtgtacgtgcgcgcgtgcgtgaggccctgccacgattaaagactgagaccggc

SEQ ID NO: 60965 - DNA, 2860 bp, Homo sapiens
  misc_feature (2685)..(2685): n is a, c, g, or t
  misc_feature (2688)..(2688): n is a, c, g, or t
  misc_feature (2694)..(2694): n is a, c, g, or t
  misc_feature (2699)..(2700): n is a, c, g, or t
  misc_feature (2719)..(2720): n is a, c, g, or t
  misc_feature (2724)..(2724): n is a, c, g, or t
  misc_feature (2729)..(2729): n is a, c, g, or t
  misc_feature (2735)..(2735): n is a, c, g, or t
  misc_feature (2745)..(2746): n is a, c, g, or t
ggctccactggttgccatcttccagagccctttcatcagtcttcccgcgtccgccgattcctcctccttggtcgccgcgtccttggctggcgtgtgagtaccgcggcccccgccggaaggagtcgggcgcgacagagacgcccgaggggccgggagggcgggcggcccgggctgcgccagaagctcgcgccgttagggactgaggcacaagtgcgccagcgcgggcttaggggccgtgggccaagtgcggcacttggggcgagcgcagagaggcggggcgacggaggccacgtggccggcttggagggcgtccgcgggacgggggcgccgggagcactgtctcacggcgcatcccggtcgtggaagcccctcggccaggctgctggggcctaaggcctgtgtttgctgccgtctccgtgggagaccagacatctgccccagctgtttctctggcctgcagaccttcgtacaccacgtctttgtcaagcaccagttactgcacgcatcagctgagcacggaggggataggcacggacgcaacacttttggaacttagacgctagtgagcacggaaaggaataagcctgaggccaaagcaaaatgaggagcgggaaggcctcctgcaccctggagaccgtgtgggaagacaagcacaagtatgaggaggccgagcggcgcttctacgaacacgaggccacacaggcggccgcctccgcccagcagctgccagccgaggggccagccatgaatgggcccggccaggacgaccctgaggacgctgatgaggcggaagcccctgacggcggcagcaggcgtgatcccaggaagagccaggacagcaggaagcccctgcagaaaaagaggaagcgctcccccaagagcgggctcggccccgcggacctggccctcctgggcctctcggccgaacgtgtgtggctggacaagtcacttttcgaccaggcagagagctcctaccgccagaagctggcagatgtggctgcccaggcagcctggcctcctgccttggccccttggggtctctgcacccatggaaaccaggtggcctgccaccacgtgacctgggggatctgggtcaacaagtcctccttcgaccaggctgagcgggccttcgtggagtggtctcaggccctgttgctggcccccgagggcagccgcaggcaggggactcccaacacaggccagcaggtggccgtccccgacctggcccaccagcccagcccaccggtcaatggccagcccccgctgggcagcctgcaggcactggttcgggaggtgtggctggagaagccccggtatgatgcagccgagaggggcttctacgaggccctgtttgacggccatcccccagggaaggtgcgcctgcaagagcgagccggcctggccgagggtgcccggcggggccgcagagaccggcggggccgcaacatcttagggaacaagcgggccgggctgcgacgggccgatggggaggccccctctgccttgccctactgttacttcctgcagaaggatgcagaggccccctggctcagcaagcctgcctacgacagcgccgagtgccgccaccacgctgccgaggccctgcgtgtggcctggtgcctcgaagctgcctccctgtctcaccgacccggtcctcggtctggcctgtccgtgtccagcctgagacccaagtaggagaaacgtgctgggtgggcacccagcctgggctgtgggcacagggacagccatcccaggctggggctcctccagcttcctcccctgcccacctggggtgggggctccccgagacccgtgggcccagcagagttgaatgcaggagcaggctgagtaaagcagaaaaatggctacaaacttcctagcacatgagaagatctggttcgacaagttcaaatatgacgacgcagaaaggagattctacgagcagatgaacgggcctgtggcaggtgcctcccgccaggagaacggcgccagcgtgatcctccgtgacattgcgagagccagagagaacatccagaaatccctggctggaagctcaggccccggggcctccagcggcaccagcggagaccacggtgagctcgtcgtccggattgccagtctggaagtggagaaccagagtctgcgtggcgtggtacaggagctgcagcaggccatctccaagctggaggcccggctgaacgtgctggagaagagctcgcctggccaccgggccacggccccacagacccagcacgtatctcccatgcgccaagtggagcccccagccaagaagccagccacaccagcagaggatgacgaggatgatgacattgacctgtttggcagtgacaatgaggaggaggacaaggaggcggcacagctgcgggaggagcggctacggcagtacgcggagaagaaggccaagaagcctgcactggtggccaagtcctccatcctgctggatgtcaagccttgggatgatgagacggacatggctcagctggaggcctgtgtgcgctctatccagctggacgggctggtctggggggcttccaagctggtgcccgtgggctacggtatccggaagctacagattcagtgtgtggtggaggacgacaaggtggggacagacttgctggaggaggagatcaccaagtttgaggagcacagtttgaggagccaccnagngtcatntcgcnnttcaaaaattgactgagtnntctnccctntaggcncccaataaanngaccggaaaaaaaaggggcccaaatctccgggccctgccccttggacggcacataggataaaacggggacaagaaacggttgggcactgggaccccaacaatatatcgtgcacc

SEQ ID NO: 60966 - DNA, 3534 bp, Homo sapiens
  misc_feature (2850)..(2850): n is a, c, g, or t
  misc_feature (2862)..(2862): n is a, c, g, or t
ggctccactggttgccatcttccagagccctttcatcagtcttcccgcgtccgccgattcctcctccttggtcgccgcgtccttggctggcgtgtgagtaccgcggcccccgccggaaggagtcgggcgcgacagagacgcccgaggggccgggagggcgggcggcccgggctgcgccagaagctcgcgccgttagggactgaggcacaagtgcgccagcgcgggcttaggggccgtgggccaagtgcggcacttggggcgagcgcagagaggcggggcgacggaggccacgtggccggcttggagggcgtccgcgggacgggggcgccgggagcactgtctcacggcgcatcccggtcgtggaagcccctcggccaggctgctggggcctaaggcctgtgtttgctgccgtctccgtgggagaccagacatctgccccagctgtttctctggcctgcagaccttcgtacaccacgtctttgtcaagcaccagttactgcacgcatcagctgagcacggaggggataggcacggacgcaacacttttggaacttagacgctagtgagcacggaaaggaataagcctgaggccaaagcaaaatgaggagcgggaaggcctcctgcaccctggagaccgtgtgggaagacaagcacaagtatgaggaggccgagcggcgcttctacgaacacgaggccacacaggcggccgcctccgcccagcagctgccagccgaggggccagccatgaatgggcccggccaggacgaccctgaggacgctgatgaggcggaagcccctgacggcggcagcaggcgtgatcccaggaagagccaggacagcaggaagcccctgcagaaaaagaggaagcgctcccccaagagcgggctcggccccgcggacctggccctcctgggcctctcggccgaacgtgtgtggctggacaagtcacttttcgaccaggcagagagctcctaccgccagaagctggcagatgtggctgcccaggcagcctggcctcctgccttggccccttggggtctctgcacccatggaaaccaggtggcctgccaccacgtgacctgggggatctgggtcaacaagtcctccttcgaccaggctgagcgggccttcgtggagtggtctcaggccctgttgctggcccccgagggcagccgcaggcaggggactcccaacacaggccagcaggtggccgtccccgacctggcccaccagcccagcccaccggtcaatggccagcccccgctgggcagcctgcaggcactggttcgggaggtgtggctggagaagccccggtatgatgcagccgagaggggcttctacgaggccctgtttgacggccatcccccagggaaggtgcgcctgcaagagcgagccggcctggccgagggtgcccggcggggccgcagagaccggcggggccgcaacatcttagggaacaagcgggccgggctgcgacgggccgatggggaggccccctctgccttgccctactgttacttcctgcagaaggatgcagaggccccctggctcagcaagcctgcctacgacagcgccgagtgccgccaccacgctgccgaggccctgcgtgtggcctggtgcctcgaagctgcctccctgtctcaccgacccggtcctcggtctggcctgtccgtgtccagcctgagacccaagtaggagaaacgtgctgggtgggcacccagcctgggctgtgggcacagggacagccatcccaggctggggctcctccagcttcctcccctgcccacctggggtgggggctccccgagacccgtgggcccagcagagttgaatgcaggagcaggctgagtaaagcagaaaaatggctacaaacttcctagcacatgagaagatctggttcgacaagttcaaatatgacgacgcagaaaggagattctacgagcagatgaacgggcctgtggcaggtgcctcccgccaggagaacggcgccagcgtgatcctccgtgacattgcgagagccagagagaacatccagaaatccctggctggaagctcaggccccggggcctccagcggcaccagcggagaccacggtgagctcgtcgtccggattgccagtctggaagtggagaaccagagtctgcgtggcgtggtacaggagctgcagcaggccatctccaagctggaggcccggctgaacgtgctggagaagagctcgcctggccaccgggccacggccccacagacccagcacgtatctcccatgcgccaagtggagcccccagccaagaagccagccacaccagcagaggatgacgaggatgatgacattgacctgtttggcagtgacaatgaggaggaggacaaggaggcggcacagctgcgggaggagcggctacggcagtacgcggagaagaaggccaagaagcctgcactggtggccaagtcctccatcctgctggatgtcaagccttgggatgatgagacggacatggctcagctggaggcctgtgtgcgctctatccagctggacgggctggtctggggggcttccaagctggtgcccgtgggctacggtatccggaagctacagattcagtgtgtggtggaggacgacaaggtggggacagacttgctggaggaggagatcaccaagtttgaggagcacagtttgaggagccacgtgcagagtgtcgatatcgcagctttcaacaagatctgaagcctgagtgtgtgtacgtgcgcgcgtgcgtgaggccctgccacgattaaagactgagaccggcaaaaaaaaagaaacatataaataaaagaaaaaaaaaaaataaaaaaaaaaaaaacgggggggantatatggggggngggggaaaaaggggataaaaatggggggccgtgggtacaatggggtgtttcctgggtcccattattgttttgtaacaagggggaaacgagaatggcgcgcgggggaccgcccaaggggggaggacggagatgaactgtggcgaagaaagccgcggttaaccctgtttataggagaataagttacacacaaggggcctgaggattaacgaaggagaaaaaggaaacaaggggccacacgtagaccacaaggaggacgcgaactcagaaagagggaacactgcggcggtgccaagggaagagagggcaccggtacgtgggagaaccaaagggacccctgtgggaggaaggaatggcgcaagggttgcaacaagagagaaaggagaaaagcgaacttagcccataaaaacgagagggtatcaaggtggtccccgggcgggcgactatgccaggggaccgtaagagacatgggaaaaaatcacagaagggagcaggtgtagggcgcacaccaaacaaaaagcccacaaacaggcggacataaggcagacgaccggagcagcgcgagagaaggacacacaaggacagcgaccaggcggacgcaaagcaccacaactcaagaagggcaggaaacacagcagcgccccgagcgcggacgaaaagaaccagcaaagccga

SEQ ID NO: 60967 - DNA, 2729 bp, Homo sapiens
ggctccactggttgccatcttccagagccctttcatcagtcttcccgcgtccgccgattcctcctccttggtcgccgcgtccttggctggcgtgtgagtaccgcggcccccgccggaaggagtcgggcgcgacagagacgcccgaggggccgggagggcgggcggcccgggctgcgccagaagctcgcgccgttagggactgaggcacaagtgcgccagcgcgggcttaggggccgtgggccaagtgcggcacttggggcgagcgcagagaggcggggcgacggaggccacgtggccggcttggagggcgtccgcgggacgggggcgccgggagcactgtctcacggcgcatcccggtcgtggaagcccctcggccaggctgctggggcctaaggcctgtgtttgctgccgtctccgtgggagaccagacatctgccccagctgtttctctggcctgcagaccttcgtacaccacgtctttgtcaagcaccagttactgcacgcatcagctgagcacggaggggataggcacggacgcaacacttttggaacttagacgctagtgagcacggaaaggaataagcctgaggccaaagcaaaatgaggagcgggaaggcctcctgcaccctggagaccgtgtgggaagacaagcacaagtatgaggaggccgagcggcgcttctacgaacacgaggccacacaggcggccgcctccgcccagcagctgccagccgaggggccagccatgaatgggcccggccaggacgaccctgaggacgctgatgaggcggaagcccctgacggcggcagcaggcgtgatcccaggaagagccaggacagcaggaagcccctgcagaaaaagaggaagcgctcccccaagagcgggctcggccccgcggacctggccctcctgggcctctcggccgaacgtgtgtggctggacaagtcacttttcgaccaggcagagagctcctaccgccagaagctggcagatgtggctgcccaggcagcctggcctcctgccttggccccttggggtctctgcacccatggaaaccaggtggcctgccaccacgtgacctgggggatctgggtcaacaagtcctccttcgaccaggctgagcgggccttcgtggagtggtctcaggccctgttgctggcccccgagggcagccgcaggcaggggactcccaacacaggccagcaggtggccgtccccgacctggcccaccagcccagcccaccggtcaatggccagcccccgctgggcagcctgcaggcactggttcgggaggtgtggctggagaagccccggtatgatgcagccgagaggggcttctacgaggccctgtttgacggccatcccccagggaaggtgcgcctgcaagagcgagccggcctggccgagggtgcccggcggggccgcagagaccggcggggccgcaacatcttagggaacaagcgggccgggctgcgacgggccgatggggaggccccctctgccttgccctactgttacttcctgcagaaggatgcagaggccccctggctcagcaagcctgcctacgacagcgccgagtgccgccaccacgctgccgaggccctgcgtgtggcctggtgcctcgaagctgcctccctgtctcaccgacccggtcctcggtctggcctgtccgtgtccagcctgagacccaagtaggagaaacgtgctgggtgggcacccagcctgggctgtgggcacagggacagccatcccaggctggggctcctccagcttcctcccctgcccacctggggtgggggctccccgagacccgtgggcccagcagagttgaatgcaggagcaggctgagtaaagcagaaaaatggctacaaacttcctagcacatgagaagatctggttcgacaagttcaaatatgacgacgcagaaaggagattctacgagcagatgaacgggcctgtggcaggtgcctcccgccaggagaacggcgccagcgtgatcctccgtgacattgcgagagccagagagaacatccagaaatccctggctggaagctcaggccccggggcctccagcggcaccagcggagaccacggtgagctcgtcgtccggattgccagtctggaagtggagaaccagagtctgcgtggcgtggtacaggagctgcagcaggccatctccaagctggaggcccggctgaacgtgctggagaagagctcgcctggccaccgggccacggccccacagacccagcacgtatctcccatgcgccaagtggagcccccagccaagaagccagccacaccagcagaggatgacgaggatgatgacattgacctgtttggcagtgagcggctacggcagtacgcggagaagaaggccaagaagcctgcactggtggccaagtcctccatcctgctggatgtcaagccttgggatgatgagacggacatggctcagctggaggcctgtgtgcgctctatccagctggacgggctggtctggggggcttccaagctggtgcccgtgggctacggtatccggaagctacagattcagtgtgtggtggaggacgacaaggtggggacagacttgctggaggaggagatcaccaagtttgaggagcacgtgcagagtgtcgatatcgcagctttcaacaagatctgaagcctgagtgtgtgtacgtgcgcgcgtgcgtgaggccctgccacgattaaagactgagaccggc

SEQ ID NO: 60968 - DNA, 2598 bp, Homo sapiens
ggctccactggttgccatcttccagagccctttcatcagtcttcccgcgtccgccgattcctcctccttggtcgccgcgtccttggctggcgtgtgagtaccgcggcccccgccggaaggagtcgggcgcgacagagacgcccgaggggccgggagggcgggcggcccgggctgcgccagaagctcgcgccgttagggactgaggcacaagtgcgccagcgcgggcttaggggccgtgggccaagtgcggcacttggggcgagcgcagagaggcggggcgacggaggccacgtggccggcttggagggcgtccgcgggacgggggcgccgggagcactgtctcacggcgcatcccggtcgtggaagcccctcggccaggctgctggggcctaaggcctgtgtttgctgccgtctccgtgggagaccagacatctgccccagctgtttctctggcctgcagaccttcgtacaccacgtctttgtcaagcaccagttactgcacgcatcagctgagcacggaggggataggcacggacgcaacacttttggaacttagacgctagtgagcacggaaaggaataagcctgaggccaaagcaaaatgaggagcgggaaggcctcctgcaccctggagaccgtgtgggaagacaagcacaagtatgaggaggccgagcggcgcttctacgaacacgaggccacacaggcggccgcctccgcccagcagctgccagccgaggggccagccatgaatgggcccggccaggacgaccctgaggacgctgatgaggcggaagcccctgacggcggcagcaggcgtgatcccaggaagagccaggacagcaggaagcccctgcagaaaaagaggaagcgctcccccaagagcgggctcggccccgcggacctggccctcctgggcctctcggccgaacgtgtgtggctggacaagtcacttttcgaccaggcagagagctcctaccgccagaagctggcagatgtggctgcccaggcagcctggcctcctgccttggccccttggggtctctgcacccatggaaaccaggtggcctgccaccacgtgacctgggggatctgggtcaacaagtcctccttcgaccaggctgagcgggccttcgtggagtggtctcaggccctgttgctggcccccgagggcagccgcaggcaggggactcccaacacaggccagcaggtggccgtccccgacctggcccaccagcccagcccaccggtcaatggccagcccccgctgggcagcctgcaggcactggttcgggaggtgtggctggagaagccccggtatgatgcagccgagaggggcttctacgaggccctgtttgacggccatcccccagggaaggtgcgcctgcaagagcgagccggcctggccgagggtgcccggcggggccgcagagaccggcggggccgcaacatcttagggaacaagcgggccgggctgcgacgggccgatggggaggccccctctgccttgccctactgttacttcctgcagaaggatgcagaggccccctggctcagcaagcctgcctacgacagcgccgagtgccgccaccacgctgccgaggccctgcgtgtggcctggtgcctcgaagctgcctccctgtctcaccgacccggtcctcggtctggcctgtccgtgtccagcctgagacccaagtaggagaaacgtgctgggtgggcacccagcctgggctgtgggcacagggacagccatcccaggctggggctcctccagcttcctcccctgcccacctggggtgggggctccccgagacccgtgggcccagcagagttgaatgcaggagcaggctgagtaaagcagaaaaatggctacaaacttcctagcacatgagaagatctggttcgacaagttcaaatatgacgacgcagaaaggagattctacgagcagatgaacgggcctgtggcaggtgcctcccgccaggagaacggcgccagcgtgatcctccgtgacattgcgagagccagagagaacatccagaaatccctggctggaagctcaggccccggggcctccagcggcaccagcggagaccacggtgagctcgtcgtccggattgccagtctggaagtggagaaccagagtctgcgtggcgtggtacaggagctgcagcaggccatctccaagctggaggcccggctgaacgtgctggagaagagctcgcctggccaccgggccacggccccacagacccaggaagcctgcactggtggccaagtcctccatcctgctggatgtcaagccttgggatgatgagacggacatggctcagctggaggcctgtgtgcgctctatccagctggacgggctggtctggggggcttccaagctggtgcccgtgggctacggtatccggaagctacagattcagtgtgtggtggaggacgacaaggtggggacagacttgctggaggaggagatcaccaagtttgaggagcacgtgcagagtgtcgatatcgcagctttcaacaagatctgaagcctgagtgtgtgtacgtgcgcgcgtgcgtgaggccctgccacgattaaagactgagaccggc

SEQ ID NO: 60969 - DNA, 2722 bp, Homo sapiens
ggctccactggttgccatcttccagagccctttcatcagtcttcccgcgtccgccgattcctcctccttggtcgccgcgtccttggctggcgtgtgagtaccgcggcccccgccggaaggagtcgggcgcgacagagacgcccgaggggccgggagggcgggcggcccgggctgcgccagaagctcgcgccgttagggactgaggcacaagtgcgccagcgcgggcttaggggccgtgggccaagtgcggcacttggggcgagcgcagagaggcggggcgacggaggccacgtggccggcttggagggcgtccgcgggacgggggcgccgggagcactgtctcacggcgcatcccggtcgtggaagcccctcggccaggctgctggggcctaaggcctgtgtttgctgccgtctccgtgggagaccagacatctgccccagctgtttctctggcctgcagaccttcgtacaccacgtctttgtcaagcaccagttactgcacgcatcagctgagcacggaggggataggcacggacgcaacacttttggaacttagacgctagtgagcacggaaaggaataagcctgaggccaaagcaaaatgaggagcgggaaggcctcctgcaccctggagaccgtgtgggaagacaagcacaagtatgaggaggccgagcggcgcttctacgaacacgaggccacacaggcggccgcctccgcccagcagctgccagccgaggggccagccatgaatgggcccggccaggacgaccctgaggacgctgatgaggcggaagcccctgacggcggcagcaggcgtgatcccaggaagagccaggacagcaggaagcccctgcagaaaaagaggaagcgctcccccaagagcgggctcggccccgcggacctggccctcctgggcctctcggccgaacgtgtgtggctggacaagtcacttttcgaccaggcagagagctcctaccgccagaagctggcagatgtggctgcccaggcagcctggcctcctgccttggccccttggggtctctgcacccatggaaaccaggtggcctgccaccacgtgacctgggggatctgggtcaacaagtcctccttcgaccaggctgagcgggccttcgtggagtggtctcaggccctgttgctggcccccgagggcagccgcaggcaggggactcccaacacaggccagcaggtggccgtccccgacctggcccaccagcccagcccaccggtcaatggccagcccccgctgggcagcctgcaggcactggttcgggaggtgtggctggagaagccccggtatgatgcagccgagaggggcttctacgaggccctgtttgacggccatcccccagggaaggtgcgcctgcaagagcgagccggcctggccgagggtgcccggcggggccgcagagaccggcggggccgcaacatcttagggaacaagcgggccgggctgcgacgggccgatggggaggccccctctgccttgccctactgttacttcctgcagaaggatgcagaggccccctggctcagcaagcctgcctacgacagcgccgagtgccgccaccacgctgccgaggccctgcgtgtggcctggtgcctcgaagctgcctccctgtctcaccgacccggtcctcggtctggcctgtccgtgtccagcctgagacccaagtaggagaaacgtgctgggtgggcacccagcctgggctgtgggcacagggacagccatcccaggctggggctcctccagcttcctcccctgcccacctggggtgggggctccccgagacccgtgggcccagcagagttgaatgcaggagcaggctgagtaaagcagaaaaatggctacaaacttcctagcacatgagaagatctggttcgacaagttcaaatatgacgacgcagaaaggagattctacgagcagatgaacgggcctgtggcaggtgcctcccgccaggagaacggcgccagcgtgatcctccgtgacattgcgagagccagagagaacatccagaaatccctggctggaagctcaggccccggggcctccagcggcaccagcggatggtacaggagctgcagcaggccatctccaagctggaggcccggctgaacgtgctggagaagagctcgcctggccaccgggccacggccccacagacccagcacgtatctcccatgcgccaagtggagcccccagccaagaagccagccacaccagcagaggatgacgaggatgatgacattgacctgtttggcagtgacaatgaggaggaggacaaggaggcggcacagctgcgggaggagcggctacggcagtacgcggagaagaaggccaagaagcctgcactggtggccaagtcctccatcctgctggatgtcaagccttgggatgatgagacggacatggctcagctggaggcctgtgtgcgctctatccagctggacgggctggtctggggggcttccaagctggtgcccgtgggctacggtatccggaagctacagattcagtgtgtggtggaggacgacaaggtggggacagacttgctggaggaggagatcaccaagtttgaggagcacagtttgaggagccacgtgcagagtgtcgatatcgcagctttcaacaagatctgaagcctgagtgtgtgtacgtgcgcgcgtgcgtgaggccctgccacgattaaagactgagaccggc

SEQ ID NO: 60970 - DNA, 3450 bp, Homo sapiens
  misc_feature (2766)..(2766): n is a, c, g, or t
  misc_feature (2778)..(2778): n is a, c, g, or t
ggctccactggttgccatcttccagagccctttcatcagtcttcccgcgtccgccgattcctcctccttggtcgccgcgtccttggctggcgtgtgagtaccgcggcccccgccggaaggagtcgggcgcgacagagacgcccgaggggccgggagggcgggcggcccgggctgcgccagaagctcgcgccgttagggactgaggcacaagtgcgccagcgcgggcttaggggccgtgggccaagtgcggcacttggggcgagcgcagagaggcggggcgacggaggccacgtggccggcttggagggcgtccgcgggacgggggcgccgggagcactgtctcacggcgcatcccggtcgtggaagcccctcggccaggctgctggggcctaaggcctgtgtttgctgccgtctccgtgggagaccagacatctgccccagctgtttctctggcctgcagaccttcgtacaccacgtctttgtcaagcaccagttactgcacgcatcagctgagcacggaggggataggcacggacgcaacacttttggaacttagacgctagtgagcacggaaaggaataagcctgaggccaaagcaaaatgaggagcgggaaggcctcctgcaccctggagaccgtgtgggaagacaagcacaagtatgaggaggccgagcggcgcttctacgaacacgaggccacacaggcggccgcctccgcccagcagctgccagccgaggggccagccatgaatgggcccggccaggacgaccctgaggacgctgatgaggcggaagcccctgacggcggcagcaggcgtgatcccaggaagagccaggacagcaggaagcccctgcagaaaaagaggaagcgctcccccaagagcgggctcggccccgcggacctggccctcctgggcctctcggccgaacgtgtgtggctggacaagtcacttttcgaccaggcagagagctcctaccgccagaagctggcagatgtggctgcccaggcagcctggcctcctgccttggccccttggggtctctgcacccatggaaaccaggtggcctgccaccacgtgacctgggggatctgggtcaacaagtcctccttcgaccaggctgagcgggccttcgtggagtggtctcaggccctgttgctggcccccgagggcagccgcaggcaggggactcccaacacaggccagcaggtggccgtccccgacctggcccaccagcccagcccaccggtcaatggccagcccccgctgggcagcctgcaggcactggttcgggaggtgtggctggagaagccccggtatgatgcagccgagaggggcttctacgaggccctgtttgacggccatcccccagggaaggtgcgcctgcaagagcgagccggcctggccgagggtgcccggcggggccgcagagaccggcggggccgcaacatcttagggaacaagcgggccgggctgcgacgggccgatggggaggccccctctgccttgccctactgttacttcctgcagaaggatgcagaggccccctggctcagcaagcctgcctacgacagcgccgagtgccgccaccacgctgccgaggccctgcgtgtggcctggtgcctcgaagctgcctccctgtctcaccgacccggtcctcggtctggcctgtccgtgtccagcctgagacccaagtaggagaaacgtgctgggtgggcacccagcctgggctgtgggcacagggacagccatcccaggctggggctcctccagcttcctcccctgcccacctggggtgggggctccccgagacccgtgggcccagcagagttgaatgcaggagcaggctgagtaaagcagaaaaatggctacaaacttcctagcacatgagaagatctggttcgacaagttcaaatatgacgacgcagaaaggagattctacgagcagatgaacgggcctgtggcaggtgcctcccgccaggagaacggcgccagcgtgatcctccgtgacattgcgagagccagagagaacatccagaaatccctggctggaagctcaggccccggggcctccagcggcaccagcggagaccacggtgagctcgtcgtccggattgccagtctggaagtggagaaccagagtctgcgtggcgtggtacaggagctgcagcaggccatctccaagctggaggcccggctgaacgtgctggagaagagctcgcctggccaccgggccacggccccacagacccagcacgtatctcccatgcgccaagtggagcccccagccaagaagccagccacaccagcagaggatgacgaggatgatgacattgacctgtttggcagtgagcggctacggcagtacgcggagaagaaggccaagaagcctgcactggtggccaagtcctccatcctgctggatgtcaagccttgggatgatgagacggacatggctcagctggaggcctgtgtgcgctctatccagctggacgggctggtctggggggcttccaagctggtgcccgtgggctacggtatccggaagctacagattcagtgtgtggtggaggacgacaaggtggggacagacttgctggaggaggagatcaccaagtttgaggagcacgtgcagagtgtcgatatcgcagctttcaacaagatctgaagcctgagtgtgtgtacgtgcgcgcgtgcgtgaggccctgccacgattaaagactgagaccggcaaaaaaaaaaaataaaaaaaaaaaaaacgggggggantatatggggggngggggaaaaaggggataaaaatggggggccgtgggtacaatggggtgtttcctgggtcccattattgttttgtaacaagggggaaacgagaatggcgcgcgggggaccgcccaaggggggaggacggagatgaactgtggcgaagaaagccgcggttaaccctgtttataggagaataagttacacacaaggggcctgaggattaacgaaggagaaaaaggaaacaaggggccacacgtagaccacaaggaggacgcgaactcagaaagagggaacactgcggcggtgccaagggaagagagggcaccggtacgtgggagaaccaaagggacccctgtgggaggaaggaatggcgcaagggttgcaacaagagagaaaggagaaaagcgaacttagcccataaaaacgagagggtatcaaggtggtccccgggcgggcgactatgccaggggaccgtaagagacatgggaaaaaatcacagaagggagcaggtgtagggcgcacaccaaacaaaaagcccacaaacaggcggacataaggcagacgaccggagcagcgcgagagaaggacacacaaggacagcgaccaggcggacgcaaagcaccacaactcaagaagggcaggaaacacagcagcgccccgagcgcggacgaaaagaaccagcaaagccga

SEQ ID NO: 60971 - DNA, 2743 bp, Homo sapiens
ggctccactggttgccatcttccagagccctttcatcagtcttcccgcgtccgccgattcctcctccttggtcgccgcgtccttggctggcgtgtgagtaccgcggcccccgccggaaggagtcgggcgcgacagagacgcccgaggggccgggagggcgggcggcccgggctgcgccagaagctcgcgccgttagggactgaggcacaagtgcgccagcgcgggcttaggggccgtgggccaagtgcggcacttggggcgagcgcagagaggcggggcgacggaggccacgtggccggcttggagggcgtccgcgggacgggggcgccgggagcactgtctcacggcgcatcccggtcgtggaagcccctcggccaggctgctggggcctaaggcctgtgtttgctgccgtctccgtgggagaccagacatctgccccagctgtttctctggcctgcagaccttcgtacaccacgtctttgtcaagcaccagttactgcacgcatcagctgagcacggaggggataggcacggacgcaacacttttggaacttagacgctagtgagcacggaaaggaataagcctgaggccaaagcaaaatgaggagcgggaaggcctcctgcaccctggagaccgtgtgggaagacaagcacaagtatgaggaggccgagcggcgcttctacgaacacgaggccacacaggcggccgcctccgcccagcagctgccagccgaggggccagccatgaatgggcccggccaggacgaccctgaggacgctgatgaggcggaagcccctgacggcggcagcaggcgtgatcccaggaagagccaggacagcaggaagcccctgcagaaaaagaggaagcgctcccccaagagcgggctcggccccgcggacctggccctcctgggcctctcggccgaacgtgtgtggctggacaagtcacttttcgaccaggcagagagctcctaccgccagaagctggcagatgtggctgcccaggcagcctggcctcctgccttggccccttggggtctctgcacccatggaaaccaggtggcctgccaccacgtgacctgggggatctgggtcaacaagtcctccttcgaccaggctgagcgggccttcgtggagtggtctcaggccctgttgctggcccccgagggcagccgcaggcaggggactcccaacacaggccagcaggtggccgtccccgacctggcccaccagcccagcccaccggtcaatggccagcccccgctgggcagcctgcaggcactggttcgggaggtgtggctggagaagccccggtatgatgcagccgagaggggcttctacgaggccctgtttgacggccatcccccagggaaggtgcgcctgcaagagcgagccggcctggccgagggtgcccggcggggccgcagagaccggcggggccgcaacatcttagggaacaagcgggccgggctgcgacgggccgatggggaggccccctctgccttgccctactgttacttcctgcagaaggatgcagaggccccctggctcagcaagcctgcctacgacagcgccgagtgccgccaccacgctgccgaggccctgcgtgtggcctggtgcctcgaagctgcctccctgtctcaccgacccggtcctcggtctggcctgtccgtgtccagcctgagacccaagtaggagaaacgtgctgggtgggcacccagcctgggctgtgggcacagggacagccatcccaggctggggctcctccagcttcctcccctgcccacctggggtgggggctccccgagacccgtgggcccagcagagttgaatgcaggagcaggctgagtaaagcagaaaaatggctacaaacttcctagcacatgagaagatctggttcgacaagttcaaatatgacgacgcagaaaggagattctacgagcagatgaacgggcctgtggcaggtgcctcccgccaggagaacggcgccagcgtgatcctccgtgacattgcgagagccagagagaacatccagaaatccctggctggaagctcaggccccggggcctccagcggcaccagcggagaccacggtgagctcgtcgtccggattgccagtctggaagtggagaaccagagtctgcgtggcgtggtacaggagctgcagcaggccatctccaagctggaggcccggctgaacgtgctggagaagagctcgcctggccaccgggccacggccccacagacccagcacgtatctcccatgcgccaagtggagcccccagccaagaagccagccacaccagcagaggatgacgaggatgatgacattgacctgtttggcagtgacaatgaggaggaggacaaggaggcggcacagctgcgggaggagcggctacggcagtacgcggagaagaaggccaagaagcctgcactggtggccaagtcctccatcctgctggatgtcaagcctctcagaggaggctcctggctccgagtgggctgtaggggaacagccctgaccgtcaccctccgcctctcctcaggtgcagagtgtcgatatcgcagctttcaacaagatctgaagcctgagtgtgtgtacgtgcgcgcgtgcgtgaggccctgccacgattaaagactgagaccggcgccctctggctccgtcctggtcatttcctgctcgtacctggcctgtctccctccctgtctcagccccatctctgccctgctgttcccacacagt

SEQ ID NO: 60972 - DNA, 2466 bp, Homo sapiens
ggctccactggttgccatcttccagagccctttcatcagtcttcccgcgtccgccgattcctcctccttggtcgccgcgtccttggctggcgtgtgagtaccgcggcccccgccggaaggagtcgggcgcgacagagacgcccgaggggccgggagggcgggcggcccgggctgcgccagaagctcgcgccgttagggactgaggcacaagtgcgccagcgcgggcttaggggccgtgggccaagtgcggcacttggggcgagcgcagagaggcggggcgacggaggccacgtggccggcttggagggcgtccgcgggacgggggcgccgggagcactgtctcacggcgcatcccggtcgtggaagcccctcggccaggctgctggggcctaaggcctgtgtttgctgccgtctccgtgggagaccagacatctgccccagctgtttctctggcctgcagaccttcgtacaccacgtctttgtcaagcaccagttactgcacgcatcagctgagcacggaggggataggcacggacgcaacacttttggaacttagacgctagtgagcacggaaaggaataagcctgaggccaaagcaaaatgaggagcgggaaggcctcctgcaccctggagaccgtgtgggaagacaagcacaagtatgaggaggccgagcggcgcttctacgaacacgaggccacacaggcggccgcctccgcccagcagctgccagccgaggggccagccatgaatgggcccggccaggacgaccctgaggacgctgatgaggcggaagcccctgacggcggcagcaggcgtgatcccaggaagagccaggacagcaggaagcccctgcagaaaaagaggaagcgctcccccaagagcgggctcggccccgcggacctggccctcctgggcctctcggccgaacgtgtgtggctggacaagtcacttttcgaccaggcagagagctcctaccgccagaagctggcagatgtggctgcccaggcagcctggcctcctgccttggccccttggggtctctgcacccatggaaaccaggtggcctgccaccacgtgacctgggggatctgggtcaacaagtcctccttcgaccaggctgagcgggccttcgtggagtggtctcaggccctgttgctggcccccgagggcagccgcaggcaggggactcccaacacaggccagcaggtggccgtccccgacctggcccaccagcccagcccaccggtcaatggccagcccccgctgggcagcctgcaggcactggttcgggaggtgtggctggagaagccccggtatgatgcagccgagaggggcttctacgaggccctgtttgacggccatcccccagggaaggtgcgcctgcaagagcgagccggcctggccgagggtgcccggcggggccgcagagaccggcggggccgcaacatcttagggaacaagcgggccgggctgcgacgggccgatggggaggccccctctgccttgccctactgttacttcctgcagaaggatgcagaggccccctggctcagcaagcctgcctacgacagcgccgagtgccgccaccacgctgccgaggccctgcgtgtggcctggtgcctcgaagctgcctccctgtctcaccgacccggtcctcggtctggcctgtccgtgtccagcctgagacccaagtaggagaaacgtgctgggtgggcacccagcctgggctgtgggcacagggacagccatcccaggctggggctcctccagcttcctcccctgcccacctggggtgggggctccccgagacccgtgggcccagcagagttgaatgcaggagcaggctgagtaaagcagaaaaatggctacaaacttcctagcacatgagaagatctggttcgacaagttcaaatatgacgacgcagaaaggagattctacgagcagatgaacgggcctgtggcaggtgcctcccgccaggagaacggcgccagcgtgatcctccgtgacattgcgagagccagagagaacatccagaaatccctggctggaagctcaggccccggggcctccagcggcaccagcggagaccacggtgagctcgtcgtccggattgccagtctggaagtggagaaccagagtctgcgtggcgtggtacaggagctgcagcaggccatctccaagctggaggcccggctgaacgtgctggagaagagctcgcctggccaccgggccacggccccacagacccagcacgtatctcccatgcgccaagtggagcccccagccaagaagccagccacaccagcagaggatgacgaggatgatgacattgacctgtttggcagtgagtttgaggagccacgtgcagagtgtcgatatcgcagctttcaacaagatctgaagcctgagtgtgtgtacgtgcgcgcgtgcgtgaggccctgccacgattaaagactgagaccggc

SEQ ID NO: 60973 - DNA, 1898 bp, Homo sapiens
  misc_feature (1214)..(1214): n is a, c, g, or t
  misc_feature (1226)..(1226): n is a, c, g, or t
ggctccactggttgccatcttccagagccctttcatcagtcttcccgcgtccgccgattcctcctccttggtcgccgcgtccttggctggcgtgtgagtaccgcggcccccgccggaaggagtcgggcgcgacagagacgcccgaggggccgggagggcgggcggcccgggctgcgccagaagctcgcgccgttagggactgaggcacaagtgcgccagcgcgggcttaggggccgtgggccaagtgcggcacttggggcgagcgcagagaggcggggcgacggaggccacgtggccggcttggagggcgtccgcgggacgggggcgccgggagcactgtctcacggcgcatcccggtcgtggaagcccctcggccaggctgctggggcctaaggcctgtgtttgctgccgtctccgtgggagaccagacatctgccccagctgtttctctggcctgcagaccttcgtacaccacgtctttgtcaagcaccagttactgcacgcatcagctgagcacggaggggataggcacggacgcaacacttttggaacttagacgctagtgagcacggaaaggaataagcctcagaaaaatggctacaaacttcctagcacatgagaagatctggttcgacaagttcaaatatgacgacgcagaaaggagattctacgagcagatgaacgggcctgtggcaggtgcctcccgccagacaatgaggaggaggacaaggaggcggcacagctgcgggaggagcggctacggcagtacgcggagaagaaggccaagaagcctgcactggtggccaagtcctccatcctgctggatgtcaagccttgggatgatgagacggacatggctcagctggaggcctgtgtgcgctctatccagctggacgggctggtctggggggcttccaagctggtgcccgtgggctacggtatccggaagctacagattcagtgtgtggtggaggacgacaaggtggggacagacttgctggaggaggagatcaccaagtttgaggagcacagtttgaggagccacgtgcagagtgtcgatatcgcagctttcaacaagatctgaagcctgagtgtgtgtacgtgcgcgcgtgcgtgaggccctgccacgattaaagactgagaccggcaaaaaaaaaaaaaaaaaaaaaacaaaaaaaaaaaaaaaaaataaaaaaaaaaaaaacgggggggantatatggggggngggggaaaaaggggataaaaatggggggccgtgggtacaatggggtgtttcctgggtcccattattgttttgtaacaagggggaaacgagaatggcgcgcgggggaccgcccaaggggggaggacggagatgaactgtggcgaagaaagccgcggttaaccctgtttataggagaataagttacacacaaggggcctgaggattaacgaaggagaaaaaggaaacaaggggccacacgtagaccacaaggaggacgcgaactcagaaagagggaacactgcggcggtgccaagggaagagagggcaccggtacgtgggagaaccaaagggacccctgtgggaggaaggaatggcgcaagggttgcaacaagagagaaaggagaaaagcgaacttagcccataaaaacgagagggtatcaaggtggtccccgggcgggcgactatgccaggggaccgtaagagacatgggaaaaaatcacagaagggagcaggtgtagggcgcacaccaaacaaaaagcccacaaacaggcggacataaggcagacgaccggagcagcgcgagagaaggacacacaaggacagcgaccaggcggacgcaaagcaccacaactcaagaagggcaggaaacacagcagcgccccgagcgcggacgaaaagaaccagcaaagccga

SEQ ID NO: 60974 - DNA, 949 bp, Homo sapiens
ggctccactggttgccatcttccagagccctttcatcagtcttcccgcgtccgccgattcctcctccttggtcgccgcgtccttggctggcgtgtgagtaccgcggcccccgccggaaggagtcgggcgcgacagagacgcccgaggggccgggagggcgggcggcccgggctgcgccagaagctcgcgccgttagggactgaggcacaagtgcgccagcgcgggcttaggggccgtgggccaagtgcggcacttggggcgagcgcagagaggcggggcgacggaggccacgtggccggcttggagggcgtccgcgggacgggggcgccgggagcactgtctcacggcgcatcccggtcgtggaagcccctcggccaggctgctggggcctaaggcctgtgtttgctgccgtctccgtgggagaccagacatctgccccagctgtttctctggcctgcagaccttcgtacaccacgtctttgtcaagcaccagttactgcacgcatcagctgagcacggaggggataggcacggacgcaacacttttggaacttagacgctagtgagcacggaaaggaataagcctcagaaaaatggctacaaacttcctagcacatgagaagatctggttcgacaagttcaaatatgacgacgcagaaaggagattctacgagcagatgaacgggcctgtggcaggtgcctcccgccagagctcaggccccggggcctccagcggcaccagcggagaccacggtgagctcgtcgtccggattgccagtctggaagtggagaaccagagtctgcgtggcgtggtacaggagctgcagcaggccatctccaagctggaggcccggctgaacgtgctggagaagagctcgcctggccaccgggccacggccccacagacccagcacgtatcatcccatgtccccgtacatcgttagaagct

SEQ ID NO: 60975 - DNA, 422 bp, Homo sapiens
cccaaagtgctgggattacaggtgtgagccattgcacgcccggccaacagtgtttttaaagagaatcacccccttgtaaacaaacaaaaacaaacaaacatgctgctaagaaattattccaagttggagagaagagcaacaggtgagttccactctattcctcccttgagtttttcctcttctttttgtctggcattcactgcctggatcagcatgcatgctgtatcacagaatatcttctagttttacagaggtagcttgagggaaagaatacagaccatagctattttcagataagaagcttatgttctttaaatacatttatttgttttacatttttttatatttctgattttactttattagtttgactaattttttttttaatttcagccttatttaacttaaggagaatgagatat

SEQ ID NO: 60976 - DNA, 466 bp, Homo sapiens
caataagatgagccccactgctcgggtacattttcagcccctggttgtgtcatgtctactgatatctcattggtcaaaggaagtcagagggccaagatgaagaggcagggaaatatgcactgcccacagtgaagccatgacaagagtgaggatgcaggaaggcatgaagaattggggccaacagttcaatctaccataccttctctcacctggaattccagatgcttgagctacgaaacttagatgcaaagaaagttaaagctagaaggaacctcaggcccagttgctcattttgcagattccaaatgtgaatttcagagagctgagataacttgcccaaggccatatagaggctgtgactaaatctggacttaaatccagactatcaatcttaggccagtgttcttttttcaatatagtccttggcataatgctatgcttattaggtagataaaagggcttatgt

SEQ ID NO: 60977 - DNA, 248 bp, Homo sapiens
aggcccaagagtcctaatctccagcctactgtacagcagacaacttggccaaaactttgtcaattcattttctggcatgaggaagaattacactgattaacgcaacagtagcttaggggtgggagacagttcaaccaatcagaacaacttgaccaatctgacatcagtactaggggcaatgatatcacttcctacttcttattttatacagaggaaagaagaaaagacttctcagccattaccctaaa

SEQ ID NO: 60978 - DNA, 296 bp, Homo sapiens
gaaaatagttaccattcgttgaaactttgttatactaattggttctttatatttttggtaatttttaaaatgtggaaataatctacctgcataaatgtgaaggccgattgcacacaggtatatcttaattattgtggagtaaattgttataaaatattattaagtggacactcatgttggctcatgttatcatcactgatgtcaatcaaaggagtattgtcaggatcccagaagctgccctctggctgtcctagtgataaacctctcccttccctccaaagtaataactatctcat

SEQ ID NO: 60979 - DNA, 191 bp, Homo sapiens
agacactcaaggcgtgctgataaaagtgttcaaggggcccccttgctagtcccctcagcctcagtagtctcctatcctgaacttgtctggatttctcagttgacaactactcatataatcttgcaatggcttttccattgttgacttgcttacattgttacttagttaacttttcatcatttgtacctctt

SEQ ID NO: 60980 - DNA, 429 bp, Homo sapiens
cttgtctgaccgcagtttgctcatctgcacctactatataaacgcttgcagtgcaccaggatgcagttctaagggctggtggtgcattagacacagtttctgcccttatagaactcagactggtgggtgagaccgattgtacatagagtggattgcaatgtgattttggccacatgcacagatgagaaaagggttgatttgttttgttttgctattttaagacagtattgtttttattttaaaagcagtaaatattacagaatttaggaagtagaaataagcaaatggaggacatttgaaacatccatagtcccaccaacaagagagaactattaatgcttatgtttggccatcagatatttattaaaccccttttgtgttttttctatgccttttttttccttttgtatatatgtgtgcatgtattaa

SEQ ID NO: 60981 - DNA, 700 bp, Homo sapiens
aactgtcaagcttctgatgacaataaaaatgtttcaaatatgtatatatttaaagctcaagttttatcattggcaacaaatactgttgattatttttcttgaaatgtcagggtcactttattcatttttgggaaaacacctgccacatattcatgttgaataactacagtttgccagtcattctttgaagtaaaaatggtgttgcatgaaaaaaagcaactagtccagctcacaactcaatcaaatagtgcttttcttcaaggcaacttcacacttcaatatgcagaagtactttatgtgttcttccattttgtcttccattaatttaaaaagatgggttctcaagaactgatttaataaaattaataatctttacttctacatcgaagacattcttaaatgcagctggccttttttgtttattggtgccactgccttgatttgtggtaaggctattaccagctgtttttacccattagttgcttttgcactatcaatgtaaatgtctatgcagtgaaaaatgcaaataatgttattacaaaaatagttttaaacttacagcctcctaaaggcatttcaggatctctttaagaaaaaaattggccagacatggtggctcatgcctctgttcccaactacacaggaggctgaggagcccaggaggtggtggagattgcagtgagctgtgatcacaccactg

SEQ ID NO: 60982 - DNA, 928 bp, Homo sapiens
gactgaaaacatagatgggggcctgtgcttaggaagagctctctgtatattgatgatctggtgagtaaataaggaaagctcttcaaacatcacatttcatggatatgtttaagattaaagtttaagagtgtgtgggtgaaatatttggtttaactggaattaaataactttactgtggttttcagcaagatgagtggtatttggagttttcctttgggactggaagaaaaaagcaaaaaaataaattttaatttgatttgcatagtgtggcctgatcgtttaagtgttgttagaaagagagatgactaaaattagttgagattattatattatggattaagtatattgaccttattttcattatgattttttggtaccattatgtgttatgagaaagaaatagaaaaagaggcctccctgtggttggcgaagggagtttttgatctttatttcgtgggcgtgatgatgaggggagggaggtggcttacttatttgtcactagcactttgatttgctcagtgtacatttttgtgtataacgttctccccactgtgcaaggcaaattgacaaattgtttattaaataatttgtgtgacctaggaattttaaagaaatgctctgaaaaactggaagtctgaagtttttaaaaatgaaatgtacagactcatctatcttgtataactgctattgtttttgccaaaaaatgagtgaatgattgttttttggaaaatttttcaagtcctgattttatgtctgccttggatgtagccacttcctgaaaacaagtcctaatgtaaaatggacatgtaggaagatgctgcttatatgacatcacgtgtcactgagggaagattgggagtggaggcaggagtttggtggcaggaaaatggaaatgggcagatatgtggcatcgataatgcaaggtcat

SEQ ID NO: 60983 - DNA, 331 bp, Homo sapiens
gttctcaagctctaggagatatagacccctcacagaggcatgtgcctttcttgctggtggagcgcaggtgcacatccacatgtggcccaggcatccgtgaagaggcctactcactggcacgtctccatacctgcactgactccatttatgtatttaagggcagagaaatgcaaagccaagccaggaagagcattcactcttttgacacaagcaggggtgtctctgggtggaaacagaaccagacaaatctcaaggtgggtgagtgtgatgccctctcctcctcttctctactcagcagcctccctgatgcaagctctcttcctttctacct

SEQ ID NO: 60984 - DNA, 813 bp, Homo sapiens
cccatcgccagcccgactcagaagtttctgttttagcttcccacccacaggccaggactgcctcgcctgtctgtgcgtcgtggagaattcagcagtagcgaccccaacatcagagctccccaacttccgggaacttcagagccctcggcctacagcccgggaggcctcgtgcccagacgccatgcaccctccggtaaccagcagccgcctgtccatcccccaagaccggaaaggcagcagcagcccccgggagcccagggctgtcctcggtgcatctggctgcagagggaaattgaggaccttacacagcagctagcggccatgcagttcctcactgacaagttccaggacctttgaagttggagccagcatcttcctacaagatgaacagctgccacctttggagctccggagctgcagccaagcgggttccctccatatcctgttcagccagggcttcctctcttccgctgcatttgcccccttcccaacgcagttcaaagcaatttgaaataaagtcgttctcatattcaaaaaaaaaaaaaaaaaaaaaaccgcggagacgaagtgactgctcgctctctgccacagggcgggagggcggcagcaaacattgggggggacgggaccgggggcgcgcccatttctaaaagttacccacttgggtaacacccggaaccagaggcggaccgaacagcggctcgcgtggggcggcccatagaaaaggaatgggcgttgacagtgggaaacacgggtagccattaccccgagaatcacagggagcggggtccaaaaaaaaggcccgggaagtcg

SEQ ID NO: 60985 - DNA, 802 bp, Homo sapiens
tactgggatggcccagcacctgagaaccactttcccgcttagaaggcatttccacatttaattcaggtgacgggtgggtgagtcagtcccagggctggtggggtttctggttgcagggctaggtggttccccaccggggcagggcgtgggtttctgtttccctgggtctggagtgtccatttctgcctctctctttcagcggccatgcagttcctcactgacaagttccaggacctttgaagtgagtgttgcacacaccatgcccctttccacaatcatggtaccttaggagggctgtgggctggccctggctgagggcccgtccctgagcctactctgtttcacaggttggagccagcatcttcctacaagatgaacagctgccacctttggagctccggagctgcagccaagcgggttccctccatatcctgttcagccagggcttcctctcttccgctgcatttgcccccttcccaacgcagttcaaagcaatttgaaataaagtcgttctcatattcaaaaaaaaaaaaaaaaaaaaaaccgcggagacgaagtgactgctcgctctctgccacagggcgggagggcggcagcaaacattgggggggacgggaccgggggcgcgcccatttctaaaagttacccacttgggtaacacccggaaccagaggcggaccgaacagcggctcgcgtggggcggcccatagaaaaggaatgggcgttgacagtgggaaacacgggtagccattaccccgagaatcacagggagcggggtccaaaaaaaaggcccgggaagtcg

SEQ ID NO: 60986 - DNA, 523 bp, Homo sapiens
ccatctgctgccatgagaaaagggaagccgcctttgcaaaacattgctgcctaaagaaactcagcagcctcaggccaattctgccacttctggtttgggtacagttaaaggcaaccctgagggacttggcagtagaaatccagggcctcccctggggctggcagcttcgtgtgcagctagagctttacctgaagaatgtcaagtccaagatcggctccactgagaacctgaagcaccagccgggaggcgggaaggtgcaaatagtctacaaaccagttgacctgagcaaggtgacctccaagtgtggctcattaggcaacatccatcataaaccaggaggtggccaggtggaagtaaaatctgagaagcttgacttcaaggacagagtccagtcgaagattgggtccctggacaatatcacccacgtccctggcggaggaaataaaaagattgaaacccacaagctgaccttccgcgagaacgccaaagccaagacagaccacggggcggagatcgtgtacaa

SEQ ID NO: 60987 - DNA, 179 bp, Homo sapiens
agcagcttccaaaagtctaaatgaattgagaattgtctcaatatcacaatcaagattttaaggtctggaagtttatgtaaaataatctcagcctaatgtttctggaagttgacaaggaagcctcatgtttctggaagttgtattagggagtatatacaaaaaaaatttagaagctgtga

SEQ ID NO: 60988 - DNA, 332 bp, Homo sapiens
caaaatatacaaataactcttaaatctcaatattaagacaatgagggctgggcaccatggctcacgcctgtaatcccaacacttcgggaggccaaggggggtggattgcttgagctcaggagtttgagaccagcctgggcaacatagtgaaacccccatctctacaaaaaaccacacaaaaaaatcagccgggtattgtggtgtgtgcctgtagtcccagctactcgggaggctgaggtgggaggatggcttgaacctaggaggtggaagttgcagtgagctgattgagccactgcactccggcctgggtgacaaagccagaccctgtctca

SEQ ID NO: 60989 - DNA, 1166 bp, Homo sapiens
ccatctgcgtatgtcttgtattactctttccatcccaaataactttcatcagctgttttaccactgaaatgaaaagtagtcaaaggaaataattatgtttaatcattattggttgtgctataaaataatgtgaatcacagtgggagtgttttgtgagcaaacttcatattactattcccaacacacacacacaggtacacgcaacatatttagtatgcaaaatggaagtattattaatagtggttcaccattcttttacttttctagttatttctcaaggtatggttcacagacccagggagacctttacacatgcttaagattgggtaccattgctttaaacaaacacagcctctggctcctcatagcaaacaataaacttattccaccaggagggaaaaacagaaagaagattcaactacttttggcaaatatatggcaaccttgtcccccatactggattactccctcccatactatacattcactggccacttgtatcgattaatgttttcaaagacagagaactacagttgtccctccgtatccaagggagaccggttccaggacctctgcagataccaaaatccacagacgcttaagtcctttatataaaacggcatagtataacctatgcacatcctccaatatacttcaaatcatctcgtttacttataatacctaatacaatgtattataaatgccatggaaatcattgttacaatgtattatttgtaattattgttgtattattggtttttattgttataaaaattttttccaatattttttatcaggagttgattgaatcagggatgtggaacctgtggatatggagggccaactctattgtacagaagacataaaaaaaaaggaaaacctgggccaggtacggtggctcatgcctgtaatcccaacactttgggaggccaaggcgggtggatcacgaggtcaggagatcgagaccatcctggctaacacggtgaaacccggtctctactaaaaatacaaaaaattagctgggcatggtggtgagcacctgtagtcccagccactcgggaggctgaggcaggagaattgcatgaacccgggaggtgaaggttgcagtgagccgagatcacaccattgcactccagcctgggtgacagagcaagattctgactcaa

SEQ ID NO: 60990 - DNA, 1304 bp, Homo sapiens
ccatctgcgtatgtcttgtattactctttccatcccaaataactttcatcagctgttttaccactgaaatgaaaagtagtcaaaggaaataattatgtttaatcattattggttgtgctataaaataatgtgaatcacagtgggagtgttttgtgagcaaacttcatattactattcccaacacacacacacaggtacacgcaacatatttagtatgcaaaatggaagtattattaatagtggttcaccattcttttacttttctagttatttctcaaggtatggttcacagacccagggagacctttacacatgcttaagattgggtaccattgctttaaacaaacacagcctctggctcctcatagcaaacaataaacttattccaccaggagggaaaaacagaaagaagattcaactacttttggcaaatatatggcaaccttgtcccccatactggattactccctcccatactatacattcactggccacttgtatcgattaatgttttcaaagacagagaactacagttgtccctccgtatccaagggagaccggttccaggacctctgcagataccaaaatccacagacgcttaagtcctttatataaaacggcatagtataacctatgcacatcctccaatatacttcaaatcatctcgtttacttataatacctaatacaatgtattataaatgccatggaaatcattgttacaatgtattatttgtaattattgttgtattattggtttttattgttataaaaattttttccaatattttttatcaggagttgattgaatcagggatgtggaacctgtggatatggagggccaactctattgtacagaagacataaaaaaaaaggaaaacctgggccaggtacggtggctcatgcctgtaatcccaacactttgggaggctgaggcaggagaatctctggaacctgggaggcggagacggcagtgagccaagattgtgccactgcactccagcctgggtgacagagcaagactgtctcaaaaaaaaaaaagaaaaaaaaatttaaaaaaaaggaaaaccagtgtcaaaacactaaaatgcattccaaaatcaaaatcaagtggctatgatttgtggcactccttcgaattagcagtgataatcaagaaatgaaaattgcaattatttctcctgggaaaactactcttagtactatacactatatgcagatgaaaatggtaagggctgagaaggtaacagtgttcagttggtattttatttctcctggaagatgcaggattgggagggaggcaag

SEQ ID NO: 60991 - DNA, 465 bp, Homo sapiens
tttaatttttcctcattattctaaaacttagaactcctccatatataattaaaagtgtgaaaatctaaaaatacttctgccagtacaagatgcacagacacatacacacttaattcaaagacatatgggtacttagaatattgaagtattttctaaattgttttctattttactcagatcatttctagcaccaactcaacctttgctttttggatgagtttggtaaggattaattctacttccaatttggtgtgtttggtgtgccaaaatgtatctattataagatatgttatattgcatacaagtggaagtaggtggagtattcctctgttataaagagtatttacaaatttccattgggaaatatcagctgctcactattatctgcagtattgataagactacagctatatctttatccatttattctccattaaagaaattgtgataaactgcaaaataatg

SEQ ID NO: 60992 - DNA, 1026 bp, Homo sapiens
gacgccctctggatccagttaaagtaacatgcctccgaggtactgcatccttccgctcagtgtcaccatctgtgatctcatttcaccgcattggctgtggctctccccgtacaagtgttcagccttctgtattttgatttctttctgctgagaacgtctaggcttcatgtggcccatctactcagtcttgagaagctcttttaaaaacctccgtttgccttagcgttgttgttctctcttagtggtacataagcatcgcatagcacctcatgtttcacgcttcaaattcagattttctttgctgccagagaaggccacctccagcaaaactggagcataggggaacacacagaagaagggaaggtgtggaaaatttttttaatgggtacaatgttacctcatttccagttctagtttgtgtccccttctaataccttctcaagaatacttggcccaactccttaaatttgtttaggattaattctccttaatgctaaaatacaccttgcccagtagaacatttctcttttggttaaaaaaaaaaagtttctattaagtgtactgcagagataatacgacttcagcagtattaatagctgattactttgcagttgatctgcactattgtaggccaggcagaggggtgggaaggaggaatcaggaggtatccagttgattcagcaagtgcaaatacagacctagacaaatagaagtgttatagtgccaacaaaacattgttcacacctgaaaaatccatatcaaaaagctcaatattaacctatacagttcagtggcagttttattggctggaaagacttaatattgatttactgaaatagggataaaaatttttcctggtgaggaaatcacagtaaaaaaaaaagccggattatcactgctaaggccctagttattggaaagaatactctacttctgcactccctcctgagatgctcacagtgattctggacattatgtgcctaggatgcatatgtagtttttgttagcagctgagattccctaggc

SEQ ID NO: 60993 - DNA, 4149 bp, Homo sapiens
  misc_feature (2718)..(2718): n is a, c, g, or t
  misc_feature (3151)..(3151): n is a, c, g, or t
  misc_feature (3954)..(3954): n is a, c, g, or t
  misc_feature (3964)..(3965): n is a, c, g, or t
  misc_feature (3971)..(3971): n is a, c, g, or t
  misc_feature (3973)..(3973): n is a, c, g, or t
  misc_feature (3981)..(3981): n is a, c, g, or t
  misc_feature (3989)..(3989): n is a, c, g, or t
  misc_feature (4015)..(4016): n is a, c, g, or t
  misc_feature (4020)..(4020): n is a, c, g, or t
  misc_feature (4022)..(4022): n is a, c, g, or t
  misc_feature (4029)..(4029): n is a, c, g, or t
  misc_feature (4032)..(4032): n is a, c, g, or t
  misc_feature (4049)..(4049): n is a, c, g, or t
  misc_feature (4066)..(4067): n is a, c, g, or t
  misc_feature (4073)..(4074): n is a, c, g, or t
  misc_feature (4076)..(4079): n is a, c, g, or t
  misc_feature (4085)..(4085): n is a, c, g, or t
  misc_feature (4090)..(4090): n is a, c, g, or t
  misc_feature (4095)..(4095): n is a, c, g, or t
  misc_feature (4106)..(4106): n is a, c, g, or t
  misc_feature (4116)..(4116): n is a, c, g, or t
  misc_feature (4118)..(4119): n is a, c, g, or t
  misc_feature (4126)..(4127): n is a, c, g, or t
  misc_feature (4130)..(4130): n is a, c, g, or t
  misc_feature (4133)..(4133): n is a, c, g, or t
  misc_feature (4148)..(4148): n is a, c, g, or t
gagagttacaattgtttttgcatcagaatgattatgggacagaaaagggcatttcatgcaaatggacaccaaaagccagcagcagtagctattctcatatgagacaaaacaaactttaaagcaacagtagctaaaagagacaaagacaggcagtatataatggtaaaggtctcatccaacagaaaaatatgacaatcctaaacatacatgaacctaacactggagctcccaaatttataaaacaattactagtagacataagaaatgagatagacagcaacacaatgatagtgggggacttcaatactctactgacagcactagacaggtcatcaagacagaaagtcaacaaagaaacactggatttaaactatactttggaacaaatggacttaacagatatatacagaacatttcatccaacaaccacagaatacacattctattcaacagcacatggaattttctctaagatagaccatatgataggccataaaatgagtctcagtaaattgaagaaaattgaaattgtatcacgcactctctcagatcacagtggaacaaaactgaaaatcaactccaaaaggaatcttcaaaaccatgcaaatacatggaatttaaataacctactcctgaatgagcattgggtgaaaaacgaaatcatggtggaaatgtaaaaaatttcttcgaactggatgacacaacctatcaagacctctgggatacagcaaaggcagtgctaagaggaaagtttgtagccctaaacaccgacgtcaaaaagtctgaaagagcacaaacagacaatctaagttcacatctcagggaaccagagaagcaggaacaagccaaacccaatcccagcaaacaaaggaaataaccaagatcagagcagaactaaatgaaattgacacaagaacaacaacaacaaatacaaacataaataaaacaaaaagttggttatttgaaaagataaataaaattgatagactattaccaagattaaccaagaaaagaagagagaaaatccaaataacctcactaagaaatgaaacaggggatattacaaatggaaccactgaaatattaaaggttattcaagggtactattaacaccttttggcacataaactagaaaaaatagaagagttggataaactgctggaaaaatacaaccctcctaacttaaatcaggaagaattagataaaaaaagcagaccaataaatcaagcagcaagattgaaatggtaattttaaaatttccaaaaaaaaaagccgaagaccagacagattcagagcagaattctaccagacattcaaagaatgtcttctttcattcaaagaagaaatgataccatcctttcacactattccacaagacagagaaagaagaaatcctcccagattcctagagcggacagggcgatggcaggttcgccgggtgtgaggcttcacagcggtccggtgaccaagtcgaggatttttctggtggtctagtctcagagattacatctgtagtcagcacaatgattcccttccaagcccagtggtgcccagttgcctccaggtcccagacctttatgtggacaagaaaagcttacagaggaaatggtaattctccacttgcacactgaggtgtccagttgcagcccatggagatccagttcaattatgaatctcaggaacaccaccttctgtcagatggtgagaacaagaccaagattggaaagccagcttcagaggagggaattacagcaaaaattgaaccattgacagaagagtctagcagtctcagaatgttctccaggattctgaaggcaaagaattctgtgaatttggggataaattaaatgaaaaagatcagaacgtctttaaaaggagacctcataactgtgacgaatatgggcaaagctttgtttggagtacaagcctttttaggcatcgaaaaacgcactgtgagaaaccttatgaatgggataagtgtggaaaggccactggggagaaaccttattcctgtaattggtgtattaaaagtttcagttggagctcagaccttattaaacaccaaagagtccacactggggaaaaaccttataaatgtgatgagtgtgggaaagccttcagtcagagctcagatcttattatacatcagagaatccatataggagaaaaaccctatcaatgccgtcattgtagtaaaagttttagccagcgctcagatctggttaaacatcagagaatccatactggagagaagccttatacttgtaaccagtgtaacaaacattttagtcagagttctgatgtgataaaacatcaaagaatccacactggggagaaaccatataaatgtgatgtgtgtgggaaagccttcagtcagagctcagatcttattctgcatcagagaatccatactggggagaaaccatatccatgtaatcagtgtagcaaaagtttcagtcagaattcagaccttattaaacatcgaaggatccacactggagagaaaccctataaatgtaatgagtgtgggaaagcttttaatcagagctcagtccttattttacatcagaggattcatactggagagaaaccctatccctgtgatcaatgtagcaaaaccttcagtaggctttcagatcttattaatcatcaacgaattcacactggagagaagccttacccatgtaatcagtgcaataaaatgtttagtcgaagatnagatcttgttaaacatcacagaattcatacaggtgagaaaccctatgaatgtgatgaatgtgggaaaacctttagtcagagctccaaccttattcttcatcagagaatccacactggagagaaaccttatgcatgtagtgattgtactaaaagctttagtcgccgttcagatcttgttaagcatcaaagaatacacactggagagaaaccatatgcatgtaatcagtgtgataaaagttttagtcaaagctcagacctcactaaacatcagagagtacactctggtgaaaagccttatcattgcaatagttgtgagaaagccttcagtcagagttctgaccttattcttcatcagagaattcacactggagaaaaactattatctgtgcacacagtgcagcaaaagtttcagtcagatctcagacctcattanacaccagagaatccacactggggaaaaaccatataaatgcagtgagtgcaggaaggctttcagtcagtgctcactcttaccctacaccagagaatccacactgggaagaaaccaaatccatgtgatgagtgtggcaaaagctttagtcggcgttctgatctcattaaccatcaaaaaatacacactggtgaaaagccgtataagtgtgatgcatgtgggaaagccttcagcacatgtactgatcttattgaacaccagaaaacccatgctgaggagaaaccctaccagtgtgttcagtgcagcagaagttgtagccaactctctgaacttactattcatgaggaagtccattgtggagaagacagtcaaaatgtgatgaatgtgagaaaacctttagtgtgtacaccaactctattcagtaccagagacactgtaccagaaaaaaatctaatgaatgctgttgattattgatgagtatgaaaaaggttttaatcagtgttcaactcttatgctacattaaaaccgcactggatccggatacgtgtggtggctcacgcctgtaatcccaacactttgggaggcagatgtggaagcatcatttgagcccaggagtttgaggctgcagtgagctatgattccaccattgcactccagtctgggcaacagagcaagaccctgtctatttaaaaaaaaaaaaaaaccaccaataccacaggggagaaaacattaattcagtttttgtaatgaaaggttaactcagagctcagacattaactaaaattaagaaaaattctccagcctgnccaacatggnnaaaccntntctctacnaaaaatanaaaaattagctgggcatggtggcacnnctgnantcccagntantcgggaggctgaggcangagaatcacttgaaccnnggaggnngnnnntgcagngagcngagantgccactgcantccagcctgngnnacagagnnagnctntctcaaaaaaaaaana

SEQ ID NO: 60994 - DNA, 625 bp, Homo sapiens
ggcctggtttaacctggcccccgggagtacggatcaggcgatggcaggttcgccgggtgtgaggcttcacagcggtccggtgaccaagtcgaggatttttctggtggtctagtctcagagattacatctgtagtcagcacaatgattcccttccaagcccagtggtgcccagttgcctccaggtcccagacctttatgtggacaagaaaagcttacagaggaaatggtaattctccacttgcacactgaggtgtccagttgcagcccatggagatccagttcaattatgaatctcaggaacaccaccttctgtcagactaggactcaatgaaattgctgcccccatgttcctgaggctctgcaagctgaagcttatttctcatgatataggcaagaaaaatgtgtcaggttgccaccaccttcctccctgggccagaattttctgctcttacaatgctgatgattgtctaagattgcaccatccaccctggaggttgctgactcccatttgattgctggcctgccactcatcctgtgctgttttcttggagcctgacctcctcagtgattgctgctggagagactgaatggtgcaacctggaagtgcggtgtagctgatgctctg

SEQ ID NO: 60995 - DNA, 2786 bp, Homo sapiens
  misc_feature (1355)..(1355): n is a, c, g, or t
  misc_feature (1788)..(1788): n is a, c, g, or t
  misc_feature (2591)..(2591): n is a, c, g, or t
  misc_feature (2601)..(2602): n is a, c, g, or t
  misc_feature (2608)..(2608): n is a, c, g, or t
  misc_feature (2610)..(2610): n is a, c, g, or t
  misc_feature (2618)..(2618): n is a, c, g, or t
  misc_feature (2626)..(2626): n is a, c, g, or t
  misc_feature (2652)..(2653): n is a, c, g, or t
  misc_feature (2657)..(2657): n is a, c, g, or t
  misc_feature (2659)..(2659): n is a, c, g, or t
  misc_feature (2666)..(2666): n is a, c, g, or t
  misc_feature (2669)..(2669): n is a, c, g, or t
  misc_feature (2686)..(2686): n is a, c, g, or t
  misc_feature (2703)..(2704): n is a, c, g, or t
  misc_feature (2710)..(2711): n is a, c, g, or t
  misc_feature (2713)..(2716): n is a, c, g, or t
  misc_feature (2722)..(2722): n is a, c, g, or t
  misc_feature (2727)..(2727): n is a, c, g, or t
  misc_feature (2732)..(2732): n is a, c, g, or t
  misc_feature (2743)..(2743): n is a, c, g, or t
  misc_feature (2753)..(2753): n is a, c, g, or t
  misc_feature (2755)..(2756): n is a, c, g, or t
  misc_feature (2763)..(2764): n is a, c, g, or t
  misc_feature (2767)..(2767): n is a, c, g, or t
  misc_feature (2770)..(2770): n is a, c, g, or t
  misc_feature (2785)..(2785): n is a, c, g, or t
gcgcggtgaagcgccatagagctgagcactcctcccagattcctagagcggacagggcgatggcaggttcgccgggtgtgaggcttcacagcggtccggtgaccaagtcgaggatttttctggtggtctagtctcagagattacatctgtagtcagcacaatgattcccttccaagcccagtggtgcccagttgcctccaggtcccagacctttatgtggacaagaaaagcttacagaggaaatggtaattctccacttgcacactgaggtgtccagttgcagcccatggagatccagttcaattatgaatctcaggaacaccaccttctgtcagatggtgagaacaagaccaagattggaaagccagcttcagaggagggaattacagcaaaaattgaaccattgacagaagagtctagcagtctcagaatgttctccaggattctgaaggcaaagaattctgtgaatttggggataaattaaatgaaaaagatcagaacgtctttaaaaggagacctcataactgtgacgaatatgggcaaagctttgtttggagtacaagcctttttaggcatcgaaaaacgcactgtgagaaaccttatgaatgggataagtgtggaaaggccactggggagaaaccttattcctgtaattggtgtattaaaagtttcagttggagctcagaccttattaaacaccaaagagtccacactggggaaaaaccttataaatgtgatgagtgtgggaaagccttcagtcagagctcagatcttattatacatcagagaatccatataggagaaaaaccctatcaatgccgtcattgtagtaaaagttttagccagcgctcagatctggttaaacatcagagaatccatactggagagaagccttatacttgtaaccagtgtaacaaacattttagtcagagttctgatgtgataaaacatcaaagaatccacactggggagaaaccatataaatgtgatgtgtgtgggaaagccttcagtcagagctcagatcttattctgcatcagagaatccatactggggagaaaccatatccatgtaatcagtgtagcaaaagtttcagtcagaattcagaccttattaaacatcgaaggatccacactggagagaaaccctataaatgtaatgagtgtgggaaagcttttaatcagagctcagtccttattttacatcagaggattcatactggagagaaaccctatccctgtgatcaatgtagcaaaaccttcagtaggctttcagatcttattaatcatcaacgaattcacactggagagaagccttacccatgtaatcagtgcaataaaatgtttagtcgaagatnagatcttgttaaacatcacagaattcatacaggtgagaaaccctatgaatgtgatgaatgtgggaaaacctttagtcagagctccaaccttattcttcatcagagaatccacactggagagaaaccttatgcatgtagtgattgtactaaaagctttagtcgccgttcagatcttgttaagcatcaaagaatacacactggagagaaaccatatgcatgtaatcagtgtgataaaagttttagtcaaagctcagacctcactaaacatcagagagtacactctggtgaaaagccttatcattgcaatagttgtgagaaagccttcagtcagagttctgaccttattcttcatcagagaattcacactggagaaaaactattatctgtgcacacagtgcagcaaaagtttcagtcagatctcagacctcattanacaccagagaatccacactggggaaaaaccatataaatgcagtgagtgcaggaaggctttcagtcagtgctcactcttaccctacaccagagaatccacactgggaagaaaccaaatccatgtgatgagtgtggcaaaagctttagtcggcgttctgatctcattaaccatcaaaaaatacacactggtgaaaagccgtataagtgtgatgcatgtgggaaagccttcagcacatgtactgatcttattgaacaccagaaaacccatgctgaggagaaaccctaccagtgtgttcagtgcagcagaagttgtagccaactctctgaacttactattcatgaggaagtccattgtggagaagacagtcaaaatgtgatgaatgtgagaaaacctttagtgtgtacaccaactctattcagtaccagagacactgtaccagaaaaaaatctaatgaatgctgttgattattgatgagtatgaaaaaggttttaatcagtgttcaactcttatgctacattaaaaccgcactggatccggatacgtgtggtggctcacgcctgtaatcccaacactttgggaggcagatgtggaagcatcatttgagcccaggagtttgaggctgcagtgagctatgattccaccattgcactccagtctgggcaacagagcaagaccctgtctatttaaaaaaaaaaaaaaaccaccaataccacaggggagaaaacattaattcagtttttgtaatgaaaggttaactcagagctcagacattaactaaaattaagaaaaattctccagcctgnccaacatggnnaaaccntntctctacnaaaaatanaaaaattagctgggcatggtggcacnnctgnantcccagntantcgggaggctgaggcangagaatcacttgaaccnnggaggnngnnnntgcagngagcngagantgccactgcantccagcctgngnnacagagnnagnctntctcaaaaaaaaaana

SEQ ID NO: 60996 - DNA, 341 bp, Homo sapiens
aaaatatccaaaattatgccacggtaatggtggcacacgccctgtagagcccagctatcttgggaggctgtaggtatggaggatcaccttgagctcacaggagcgtcgaggctgtccgtgaagctgtgaaacgtgccactggactcccgcctggtgatggagtgagaccctgtttccaaaaccaccattaccaaaaaaaaaaaaaaattaagcttttacttttaagatgataaactttagtgatcaggaaagttatcttatgtatattatattccttaatattggagaactaaagaattatgtattttctttaaaagcgctcactggatattttttttaaa

SEQ ID NO: 60997 - DNA, 958 bp, Homo sapiens
aagtcaaaataatgtaacaaagctgatgtactttactcattagaacaattcttcacaatttaatattaattttagatatacatagttcatgtttgataaccagatcaatactgagtgaaaaatagcatagtgggaagagcaggggaggggaggtagggatctggagacctagagtgtacttccatattgcaactagtgagcagtaggactttgagaaagttacccaataggcctcagggttctaatttataaaatgggtatgatatgcctgccttatctgtcttgggaacttaagtaaggttaaaatgaactaatgaacttgaaatgttttataaactgaaaatgctatacgaatgtgagattgatcttgtatttcaatagtcccaacaatatcactgcattgttatattaggtggaataaaaggacaatatttaactgttttgactctacaatagtgtcaatttagttgtgttcagctctattttataaaatagggatacgcatactgtagaaaatttcctgttaaattaagctttgacggccaggtgctcacgcctgtaatcccagcactttgggaggccaaggtgggcagatcacttgcgctcaggagtttgagaccagcctgagcaacatagtgaaatcctgtctctacaaaaatatgtatatataaattagtcataatctcagctacttgagaggctgaggtgggaggatcacttgattccagaggcagggcttggttgcagtaagcagagatcacgtctctgcactccagcctggctgacagagtaagaccgtgttcaccaaaaaaaaaaaaaaaaaattaagcttttacttttaagatgataaactttagtgatcaggaaagttatcttatgtatattatattccttaatattggagaactaaagaattatgtattttctttaaaagcgctcactggatattttttttaaa

SEQ ID NO: 60998 - DNA, 1639 bp, Homo sapiens
aagaaaatgatctgtcttctggtaggtgaattatatcttcgtttttaaaaaccaatggctgtttaaactctgtgcacaccaggggttagcaggacatgagggagtgtagctctgatgcggtgacctgggccggagccctcggactagcctcagctttggtggcagcacgccctgccttgtggagccacggcctcccgggacggactccccggctctcccccagccgcccgcagccgccggatgatcctctgctcccgtctctgtctcccacagtcggcctcgctgaggatggagcccgccccgggcctcgtggagcagcccaagtgcttggaggccgggagcccggagcctgagccggcgccgtggcaggccctccctgtcctgtccgagaagcagtcaggggacgtggagctggtgctggcctacgccgcgcccgtcctggacaagcgccagacctcacgcctcctgaaggaggtgtcggccctgcacccgctccccgcccagcctcacctcaagcgggtgcggcccagccgcgatgccggcagcccccacgccctggagatgctgctttgcctggctgggccggcctcgggcccgcgctcgctggctgagctcctgccacggccggctgtggacccccgcggcctggggcaacccttcctggtgcccgtgcccgcccggccgcctctgaccaggggccagttcgaggaggcccgggcccactggcccacgtccttccacgaggacaagcaggtgaccagcgccctggctgggcggctcttctccacgcaggagcgcgccgccatgcagagccacatggagcgggcggtgtgggcggcccggcgggcagcagcgcggggcttgcgggccgtgggggccgtggtagtggacccggcctcggaccgcgtgctggccaccggccacgactgcagctgcgcggacaaccccctcctgcacgccgtcatggtgtgcgtggacctcgtggcgcgcggccagggccgcggcacctacgacttcagacccttccccgcctgctccttcgccccggccgctgccccccaggccgtccgcgcaggcgccgtgcgtaaactggacgcagacgaggacggcctcccctacctgtgcactggctacgacctgtacgtgacccgcgagccctgcgccatgtgcgccatggccctggtgcacgcacgcatcctgcgcgtcttctacggtgcgccctcgcccgacggcgccctgggcacccgcttccgcatccacgcacggcccgacctcaaccaccgcttccaggtgttccgcggggtgctggaggagcagtgccgctggctggaccccgacacgtaggcgccgccctcctgcctccggacccttcccgctcccggccgtggggcgcccctcctggacttccgggcctcgatttcttccgcacaagcctgaccgtggatttcagggacacataccgcctccagcggggagcacgggtgctgccttccgtgcggatcgagctttcctggactcggtcattggggccaccccgtgccagcggtgcccttctgcggccgcccttgctgcgtttgtgtcccctctgtctcgcgggccgggaaactgctctgatgggaaaataaacagcccaaaacca

SEQ ID NO: 60999 - DNA, 820 bp, Homo sapiens
tccaccagaaaccatcggctaggtgcgaggctgggtggtgcgctcgcgcccggatccctcagggttagcaggacatgagggagtgtagctctgatgcggtgacctgggccggagccctcggactagcctcagctttggtggcagcacgccctgccttgtggagccacggcctcccgggacggactccccggctctcccccagccgcccgcagccgccggatgatcctctgctcccgtctctgtctcccacagtcggcctcgctgaggatggagcccgccccgggcctcgtggagcagcccaagtgcttggaggccgggagcccggagcctgagccggcgccgtggcaggccctccctgtcctgtccgagaagcagtcaggggacgtggagctggtgctggcctacgccgcgcccgtcctggacaagcgccagacctcacgcctcctgaaggaggtgtcggccctgcacccgctccccgcccagcctcacctcaagcgggtgcggcccagccgcgatgccggcagcccccacgccctggagatgctgctttgcctggctgggccggcctcgggcccgcgctcgctggctgagctcctgccacggccggctgtggacccccgcggcctggggcaacccttcctggtgcccgtgcccgcccggccgcctctgaccaggggccagttcgaggaggcccgggcccactggcccacgtccttccacgaggacaagcaggtgaccagcgccccttgctgcgtttgtgtcccctctgtctcgcgggccgggaaactgctctgatgggaaaataaacagcccaaaacca

SEQ ID NO: 61000 - DNA, 1618 bp, Homo sapiens
tccaccagaaaccatcggctaggtgcgaggctgggtggtgcgctcgcgcccggatccctcagggttagcaggacatgagggagtgtagctctgatgcggtgacctgggccggagccctcggactagcctcagctttggtggcagcacgccctgccttgtggagccacggcctcccgggacggactccccggctctcccccagccgcccgcagccgccggatgatcctctgctcccgtctctgtctcccacagtcggcctcgctgaggatggagcccgccccgggcctcgtggagcagcccaagtgcttggaggccgggagcccggagcctgagccggcgccgtggcaggccctccctgtcctgtccgagaagcagtcaggggacgtggagctggtgctggcctacgccgcgcccgtcctggacaagcgccagacctcacgcctcctgaaggaggtgtcggccctgcacccgctccccgcccagcctcacctcaagcgggtgcggcccagccgcgatgccggcagcccccacgccctggagatgctgctttgcctggctgggccggcctcgggcccgcgctcgctggctgagctcctgccacggccggctgtggacccccgcggcctggggcaacccttcctggtgcccgtgcccgcccggccgcctctgaccaggggccagttcgaggaggcccgggcccactggcccacgtccttccacgaggacaagcaggtgaccagcgccctggctgggcggctcttctccacgcaggagcgcgccgccatgcagagccacatggagcgggcggtgtgggcggcccggcgggcagcagcgcggggcttgcgggccgtgggggccgtggtagtggacccggcctcggaccgcgtgctggccaccggccacgactgcagctgcgcggacaaccccctcctgcacgccgtcatggtgtgcgtggacctcgtggcgcgcggccagggccgcggcacctacgacttcagacccttccccgcctgctccttcgccccggccgctgccccccaggccgtccgcgcaggcgccgtgcgtaaactggacgcagacgaggacggcctcccctacctgtgcactggctacgacctgtacgtgacccgcgagccctgcgccatgtgcgccatggccctggtgcacgcacgcatcctgcgcgtcttctacggtgcgccctcgcccgacggcgccctgggcacccgcttccgcatccacgcacggcccgacctcaaccaccgcttccaggtgttccgcggggtgctggaggagcagtgccgctggctggaccccgacacgtaggcgccgccctcctgcctccggacccttcccgctcccggccgtggggcgcccctcctggacttccgggcctcgatttcttccgcacaagcctgaccgtggatttcagggacacataccgcctccagcggggagcacgggtgctgccttccgtgcggatcgagctttcctggactcggtcattggggccaccccgtgccagcggtgcccttctgcggccgcccttgctgcgtttgtgtcccctctgtctcgcgggccgggaaactgctctgatgggaaaataaacagcccaaaacca

SEQ ID NO: 61001 - DNA, 1154 bp, Homo sapiens
aagaaaatgatctgtcttctggtaggtgaattatatcttcgtttttaaaaaccaatggctgtttaaactctgtgcacaccaggggttagcaggacatgagggagtgtagctctgatgcggtgacctgggccggagccctcggactagcctcagctttggtggcagcacgccctgccttgtggagccacggcctcccgggacggactccccggctctcccccagccgcccgcagccgccggatgatcctctgctcccgtctctgtctcccacagtcggcctcgctgaggatggagcccgccccgggcctcgtggagcagcccaagtgcttggaggccgggagcccggagcctgagccggcgccgtggcaggccctccctgtcctgtccgagaagcagtcaggggacgtggagctggtgctggcctacgccgcgcccgtcctggacaagcgccagacctcacgcctcctgaaggaggtgtcggccctgcacccgctccccgcccagcctcacctcaagcgggtgcggcccagccgcgatgccggcagcccccacgccctggagatgctgctttgcctggctgggccggcctcgggcccgcgctcgctggctgagctcctgccacggcctcccctacctgtgcactggctacgacctgtacgtgacccgcgagccctgcgccatgtgcgccatggccctggtgcacgcacgcatcctgcgcgtcttctacggtgcgccctcgcccgacggcgccctgggcacccgcttccgcatccacgcacggcccgacctcaaccaccgcttccaggtgttccgcggggtgctggaggagcagtgccgctggctggaccccgacacgtaggcgccgccctcctgcctccggacccttcccgctcccggccgtggggcgcccctcctggacttccgggcctcgatttcttccgcacaagcctgaccgtggatttcagggacacataccgcctccagcggggagcacgggtgctgccttccgtgcggatcgagctttcctggactcggtcattggggccaccccgtgccagcggtgcccttctgcggccgcccttgctgcgtttgtgtcccctctgtctcgcgggccgggaaactgctctgatgggaaaataaacagcccaaaacca

SEQ ID NO: 61002 - DNA, 403 bp, Homo sapiens
tggccagctgagactgtggtttgggggtgttcaggtggggtggatgccagagatgtgggagccagaggcgtggaggagcagtgccgctggctggaccccgacacgtaggcgccgccctcctgcctccggacccttcccgctcccggccgtggggcgcccctcctggacttccgggcctcgatttcttccgcacaagcctgaccgtggatttcagggacacataccgcctccagcggggagcacgggtgctgccttccgtgcggatcgagctttcctggactcggtcattggggccaccccgtgccagcggtgcccttctgcggccgcccttgctgcgtttgtgtcccctctgtctcgcgggccgggaaactgctctgatgggaaaataaacagcccaaaacca

SEQ ID NO: 61003 - DNA, 564 bp, Homo sapiens
aatgcttgacctaaccgttgcctgtgtataaaccactggatggaatctgaaagacttggcagaaccagaagcactgggaggaaagtgagctgccctatagcaccgtcaggagaaagatgacaagactgttactagatccatggaggatctgcaaaaggatgctgtaagataaagagaagtaagggagaaggaaagatattgactccaaatgtctagactatccagaacaagcacctaaagatttaatttataatattaaaaacccaaagtataggctgggcacaatgcctcacacctgtaatcccagtattttgggaagccaaggcaggtggatttcttgagtccaggagtttaagaccagcctgggcaacagagtgagaccccatctttacaaaaaatacaaaaaattagcctggcgtggtggctcatacctgtagtcacagctactggggagacggaggtgggatgatcactggtgcccaggaggtggagattgcagtgagacgagatcgagccactgcactccagcctgagcaaccaaacaaaactctgtctcaaaaaaga

SEQ ID NO: 61004 - DNA, 484 bp, Homo sapiens
cttcagccttttctaacttggcttaactgtcccctcctgaaggagcttctagctcaagaaggaggaacttgaaagaacagacacagcttcgccgtgggtggtcgacacctacatgtttgtatctgcacatgttcagtgtgttacttctagatgcttctttattgcttctatttggacctgtatctgctgataaaactgcagatacaccacaagaagaaaacagagtgaatgcattgtgagaaataactgcatgtctgttttagaatgactttttatttcaaaattaaatttaggatacaaaaagaaggatgccatgttagttctaaaagctatccgcagattatccaatttaggatgtcttagtggttatatccaccaatttaaactttttcctgtgacttgacagagtgatcaataagccaagccttagtatattgctatatgcagtccaattgtgttctataacattacctcacataaaaaa

SEQ ID NO: 61005 - DNA, 227 bp, Homo sapiens
actgtactggtttttagtatggaaactctgcccacaaaccatgtccttgtgacatttacgtacacatgatagaataaaacatgctcctcattcaaacaccagaagcaccatggccattttagggaagatgtctctgcccccttgttccaggaatattttattctatctcactcttggttttggttctccttggtgattctagaaggtgaatgcctgtgccaaccatg

SEQ ID NO: 61006 - DNA, 464 bp, Homo sapiens
tgaaatgaccctgtcaagagattcatattgtgggtacagtaggtgttgaaatatacatggtgacttcctggcagttacaatatcatcctcatcacagaattgccacacaaatccctacagaagccaaaatgtcaggaggtccttgttcctaatgctccactgactcagtgcatgacccagggcaagccacttaactaatcttggtcttaacgtccccattaatagtgtctgcattgttgatgggaatcctccctgtgtataattcttctatcatggaatgtcaatgaatggatcttgcaaactcagctacagacaaactcagctcctgccaggagacagccgctctcagaacaaagctcatatttgcctccttccaagagtccttagcaaaccacgttttgatggaatggctcctgcttcacactgactgagagagaattccctcggcatagcctgagtgactt

SEQ ID NO: 61007 - DNA, 492 bp, Homo sapiens
ttactgaacacacactatgtgccagaaactgctagcattggaagtagagctgtgaacaaaatcaagcatcaacatttctgatatttgagaagataggcaacaagcaaatatgtgatgtaaagtagtgataagtgctgtaaaatcacaagagggtatagaatgaggattgttcttcaagttgatagaacagatctttaaagaagtgatttgaggctgggcgtggtggcttacacctgtaatcccaacactttgggaggccgaggctggtggatcatgaggtcaagagactgagaccatcctggccaacgtgctgaaactctatctctactaaaaatacaaaaattagccaggcgtggtggtgcgtgcctgtagtcccagctactcgggaggctgaggcagaagtgcttgaacccgggaggcggaggttgcagtgagttgagatcatgccactgcatgccagcctgggcgacagagcaagactccatctcaaaa

SEQ ID NO: 61008 - DNA, 450 bp, Homo sapiens
gacttactgctcctccattgcccatcctggacacacacgggcaaagggttcccaggcttaccactggggtggcgagggaggacccaggaagacgccgtgtgctccattcacccgctgcaaagtatttttggaggatttgctgatatgcaggcagcctggggtggtggattgagtgtgggccaccccaagaggcagctggaaagtggggtacggcctgggaatggaccggaaggcatgcctgcagggtcctcgtgcctgctgtgagcactcagcacctgcaccagaggaaggacagagtgaaggagggaagagggagaaggaaaggcatcttgacctcctcctctcctctccttatgcctttaagcattggcatgctaagccctgggccgccatcactgcacttagtccttctagcactagtactaccccttcttatagacaaccaaggct

SEQ ID NO: 61009 - DNA, 1287 bp, Homo sapiens
gcaagatgagcaacaaaagaagaatcccaagataatcacgtaattatgttaggagagattctcagttcaatctaatcctgtctaaacaggctgaaagaaattagtcactcagaattatataaaaggctctattgaggacacagaaagaagaggcccatctgtaaaccaggaaaaggaccctcatcaaactgagctctgccaacacactgatcttggacttcccagcctccagaattcttctgatagttgcttttggggatcgatgaatcgcttgagaatctctgattgggcaaaaggcctaagtgtctataagaagctgaggagctggagtgggagcagaaacgtctggcagggtgaatggaggtgaggaagaggcagaggactgaaggaggatatagcaaaggatgccaaaagccaaatggaagatcaaaggtggtaaaaagaaaaggtggaaaagcagagctggaagaagtgggattaatccatatggtaaagaagaaaatatagatatttggaccgaagaggttaaaaaagtcaatggatgacaccattctctgaagaaaattaaagaggaatccaaactcattgtatgaggccagcattacgctgatacctgatccacagaaggacactagaagaaaagaaaatcacaggctaatttccttgatgaacatagatgcaaggatcctcaacaaaataccagcaaaccaaattcaacagcacattaacagtgtcacacatgagcaactggaatttatccctgggacggaaggatggttcaacactggcctattgtttttaaggctttctggctctggaaactgtaaactcttgcctccaaaatgacctcaggagtctcccaggaattacaggagactattccaaggtgcaataatttatctctcaaagagataaaagtttaattttaatttttctttcttctgctttactgaattaatttatgaaaattctatctggactttatagcctcttttacagactgcttacaatatgcagtgtactttagatatgcttattcagtagttaaactccttttactgtgtcttatggagagggctccctctatcattttttgttttctcaacactatatagtcaatatctattaagagaagttctgaaagaaaaacactgaaagaggaggaaaataataaaaggaacaattagagcaatacaacataaatgcctatagccaaacaactgaaggagttttcatatttaaggggccccatgagtatctcattaaatgagtgaaaaaccacttata

SEQ ID NO: 61010 - DNA, 520 bp, Homo sapiens
cacagtttcagtcactgcttgcagagtccaattaacaagagcgaggtatggtaggggaaaattgactttatttccaaagttggctaaggggaagtggctggattcctatccaaagcaaccagtttgaattttgaggtggaaaggcaagcgtttaaaaagggaagacctgatatggaagggatgcaggaattgcactgagttttattccagtggctatcttgggtcccggtccacctggagtgtgggctggcgttcatctcaacaatggccaggttgttgattagccaccttgaggtaatctctggaattctgcagctgggtctccaggcttgatctgtctctctcaggatttgtccctggaacttctaagtaggcacctagttagatactaacatatagttagataaatgtgaagggcgtgtatacggtgagaaagggagggatggggagtctattttaaggctaagggaaaaggcttctgcagtttgcttcaaggttacatcttgaaacccaagagaaa

SEQ ID NO: 61011 - DNA, 197 bp, Homo sapiens
tattccaagttcactgagactcgaaagatgtttgagagaagtgtgcatgaatcaggacagaacaaccgctattccccaaagaaagagaaagctggagggagtgaacctcaggatgaatggggaggttccaagtccaacagaggcagtactgattccttggacagccttagctcccgaactgaggctgtctccccaac

SEQ ID NO: 61012 - DNA, 564 bp, Homo sapiens
ctgtaaaatcaatttatttcaactttacttttgaaaatagtccaaagtattaatatattagtttatttttttggtggtatgccaaacattataaaactgctagttttagatgtagacagtgagtaaagattgagctaaatctttatagattgtggccttttggggcatttggtaaaagataatcctatttctgtaaaacaaatactgaaaagagaaaaaaaaaagcacatatgtatgtgtatgtccatctaagattgtttaagcctggaaaaacatggaaggatatatatgaagttgttatcatgggtttgcctgacagtgctgatgcgggtggaagaggagggatgggagaagctgtgcaaatgtatgagaaagggactaaaaagggatgtctattatgatatttatataaatttatttctaggtgtggctgtatattgaaaaaatgagtaaaatactttaaaaagtgatctggaaaatgagaaaagaaaaatgagtgtaattctcatgtgcgtttaaaattataatgtgtcaaatgtttgtctaaattggatgatcactaag

SEQ ID NO: 61013 - DNA, 205 bp, Homo sapiens
catataatgcttcgttgaggatcagttgttgagtcgtcagtcattgacaggggcaaaaatatagttgtgttagttgatagcctagcttaattcttaggaaggcacttcatttcccaacctttttctattatttagccttgcactaacttccaccattgaaactatttctcttagttttcctagtgtcccaatgaaattataactt

SEQ ID NO: 61014 - DNA, 522 bp, Homo sapiens
tcccaggataccctaaaatagaagtgcttaaactttgtcaggcagaaggtaaagtacatgagccatgagattcttccttgtgctgcagccacgctggggagtgcaatctggaaagaacatacctaatgtgtttttcaccatccattatctctgaactttgaaatattacttttgaataataggctggacacttagtttgacttgaaagagctcaatgctcatcggaaaacagggagaaacctaatctgaagatggaagcatactaaggacaattttctccactcacatccacatttgaaaagagggacagaaaaacataggtaactctactttcacaaatgaggatagtttaacggatagaagaaacaagcacattattcacctgtgttgtaaaacatctactcttttttgtcactgaataagtgttcccaaagtacagttaatcctaatatgaaaacttagaattgtaaaagattaatgataacgtaaaagtatattgattaaaattccccttacaaagta

SEQ ID NO: 61015 - DNA, 837 bp, Homo sapiens
tcccaggataccctaaaatagaagtgcttaaactttgtcaggcagaaggtaaagtacatgagccatgagattcttccttgtgctgcagccacgctggggagtgcaatctggaaagaacatacctaatgtgtttttcaccatccattatctctgaactttgaaatattacttttgaataataggctggacacttagtttgacttgaaagagctcaatgctcatcggaaaacagggagaaacctaatctgaagatggaagcatactaaggacaattttctccactcacatccacatttgaaaagagggacagaaaaacataggtaactctactttcacaaatgaggatagtttaacggatagaagaaacaagcacattattcacctgtgttgtaaaacatctactcttttttgtcactgaataagtgttcccaaagtacagttaatcctaatatgaaaacttagaattgtaaaagattaatgataacgtaaaagtatattgattaaaattccccttacaaagtatattttgatgtttgtttattctacctcaaacagaggcttaagttttgaagtgtaaccagtttatacttcattttatacaaaacttattgctgagaagtctgaatattgtgctttttgttgtttgtaaatagaattgaatttaaatacaccaggataaatcttatttaaaggaagcctgtttgaaaatcaccaactttaacttattgcttatataaatccaagctctgtacctgatctttatgtaaagcaagattcatatgtgtagtatctaatgccctttggtgttacatttgactaaaatacaaatgtctgtat

SEQ ID NO: 61016 - DNA, 1085 bp, Homo sapiens
ggagagagtgccaggtagtaggtcctgaaggaacttgtccaggaggaggaaagacggcctcacagtttcccatctgctagatgggctagtggcaaactagagggctgagtggcaaacataattttagtttgagaggtaaataaacaaataaacaaaaatctcctttcttctcccaaaatttatgccaagaggagagccaccatccacctaggcaacttaagaagaaagtttgatgtaatcttcattaattacctagagatctcatgctatgcatataagatatggaacataatagtaatatcagacacttccatggtgtttaccatgtgcaaggcattgtcccaagggctctatacacaggtgcatttgtagaactcatttaattctcacaaccatcctatggttgtgtaactcatctatttctctttgtagttaagcgacttgcccaaatgtcatgtagcttataagtgacagaaacaggcatggaacctaggcaggctgcctctaaaggacatatatctatttctaccatgtcacaatcctcaccaaaggctttggaaggcagatagcaaacctccagcaaccagagactgtgctgctgtgtctgtataaaactatctctctggcgttgttgagagtaaaaattaaaagtgccaatcaccagagaccccaccttaattcaaagggcaatgggagctgcacattaactgtggctgccctctgcatactgctggctgtgatgtcaacactgtgtttatatgaaatccttcagccaatggcagcatctttaaggcatcagccgtttgcttgcagaatgggcttctcagttttttacgcattttttttttctttctagaactgggttcaggtggataggctctaaatagaataccatgccaatgccaattatattcagaaagtattgcaatttctctttgatgcttatttacattaattaagagcaaacttagataaagaagggtacaagtttaaatgctaaaatcctgaagtgagatactttatagtctggaaaaatatacagaactgactttccttctgaaaaaaaaaaaaaaaaaaaaaaaaaa

SEQ ID NO: 61017 - DNA, 745 bp, Homo sapiens
ttattgtttctagaagctttttacaaacatggttttatttgacccttataacagtttggttaggaataagaacagattcaccaatgtgtctaatttataggtggaaaacaggctcagaagctctttagaatatcatgagaagaagggatgtggggaattattcaattcaacttctgtattttgcacttcaagaaactgagtaccagagttaaaaatctggacatttggtggatgttcttagatttgtgttaatgcaagagggttggattagatgatctcacagggtatgggaatggatggtgtgttccctgtatctactgtgtagtgtaaagttaattgatactagctcaacatattagattaagtggcattttagcaaacatgaatgaaaggcaccaaaggtttaagggggaatttaaaacattaggtagcagcttgtagaggatatatttagggtcatgatgtccttcttgttggccttaaaaacacttcctgcgccaggttcaagggtcaattgggaacaggatcaacagaggatgagggtttttttttgtttgtttttgtatcattttaagacaaggtctcactctgttgctcaggctggagtgcggtggtacaatcccagctcactgcagcctccgcctccctgagctcagatgatccttccacctctgcctcctgggtagctgggactgcaggcacatgtcaccatgcctggctaatttttgtatttttcgtagagatg

SEQ ID NO: 61018 - DNA, 340 bp, Homo sapiens
  misc_feature (323)..(323): n is a, c, g, or t
atgggcggagggaagctcatcagtggggccacgagctgagtgcgtcctgtcactccactcccatgtcccttgggaaggtctgagactagggccagaggcggccctaacagggctctccctgagcttcggggaggtgagttcccagagaacggggctccgcgcgaggtcagactgggcaggagatgccgtggaccccgcccttcggggaggggcccggcggatgcctcctttgccggagcttggaacagactcacggccagcgaagtgagttcaatggctgaggtgaggtaccccgcaggggacctcataacccaattcagacnactctcctccgcccatt

SEQ ID NO: 61019 - DNA, 221 bp, Homo sapiens
  misc_feature (1)..(5): n is a, c, g, or t
  misc_feature (221)..(221): n is a, c, g, or t
nnnnnattcacattaacacgtgcacatcttctcctcacctaacaaagcatagaaggatacggcatttctcactctgtgattcttagttcaaaatgtcccaaaatatgaaaatagaagcaacttccaactgagaaactgtttttcccccactaaacaagcaaagcctatatcttccctgtggacccctgacacagctagctgcagggagtgttgctgggtgn

SEQ ID NO: 61020 - DNA, 513 bp, Homo sapiens
tgcatagaatacatcctcccttcagttggcttgggtcaacttaggtcatgggccacctggctgatagcagtttccacagaaatgcttcaagatggaatctctggacactccaagggttgatcctctcatggaagaccagtggggaggaggctgcgggaaaggtcaggcactgtgcacttccctgacagctgcaaatggttgtttccaagcccactggtcactacaaataagaatttctggtttttcctgttggagcccaaggagcaagggcagaatgaagaacatgatgtttcctaccgacagttactcatgacgtctccatccaggactgaggggggcatccttctccatctaggactgggggcatccttctccatccagtattgggggtcatcctcctccatccaggacctgaggggtgtccttttctgcgcttccttggatggcagtctttcccttcatgtttatagtgacttaccattaaatcactgtgccgttttttcctaaaatata

SEQ ID NO: 61021 - DNA, 769 bp, Homo sapiens
aaatcaatttttcagagtaatgattctcactgtggagtcatttgattattaagacccgttggcataagattacatcctctgactataaaaatcctggaagaaaacctaggaaatattcgtctggacattgcacttggcaatgaatttatgggcgctttggaatcctgcagatataataatgataattaaacaaaacactcagagaaactgccaaccctaggatgaagtatattgttactgtgctttgggattaaaataagtaactacagtttatagaacttttatactgatacacagacactaaaaagggaaagggtttagatgagaagctctgctatgcaatcaagaatctcagccactcatttctgtaggggctgcaggagctccctgtaaagagaggttatggagtctgtagcttcaggtaaccactgatccacttccagtcactatccatgagtttttatttccaaatacatgaaatcatatgaatttctggtttttcctgttggagcccaaggagcaagggcagaatgaagaacatgatgtttcctaccgacagttactcatgacgtctccatccaggactgaggggggcatccttctccatctaggactgggggcatccttctccatccagtattgggggtcatcctcctccatccaggacctgaggggtgtccttttctgcgcttccttggatggcagtctttcccttcatgtttatagtgacttaccattaaatcactgtgccgttttttcctaaaatata

SEQ ID NO: 61022 - DNA, 740 bp, Homo sapiens
aaatcaatttttcagagtaatgattctcactgtggagtcatttgattattaagacccgttggcataagattacatcctctgactataaaaatcctggaagaaaacctaggaaatattcgtctggacattgcacttggcaatgaatttatgggcgctttggaatcctgcagatataataatgataattaaacaaaacactcagagaaactgccaaccctaggatgaagtatattgttactgtgctttgggattaaaataagtaactacagtttatagaacttttatactgatacacagacactaaaaagggaaagggtttagatgagaagctctgctatgcaatcaagaatctcagccactcatttctgtaggggctgcaggagctccctgtaaagagaggttatggagtctgtagcttcaggtaaccactgatccacttccagtcactatccatgagtttttatttccaaatacatgaaatcatatgaatttctggtttttcctgttggagcccaaggagcaagggcagaatgaagaacatgatgtttcctaccgacagttactcatgacgtctccatctaggactgggggcatccttctccatccagtattgggggtcatcctcctccatccaggacctgaggggtgtccttttctgcgcttccttggatggcagtctttcccttcatgtttatagtgacttaccattaaatcactgtgccgttttttcctaaaatata

SEQ ID NO: 61023 - DNA, 515 bp, Homo sapiens
aatccgctgaagggcgggttgcagctctcctgcagctgtgggccgactgcctgactttggccactaggtggcctctggctctagggtttcggggccgctggtgtcggcgggcagagtccgggtttgccaccgctgcccacaggctcaccatggcctgactaaatgctcgcactgctcatacatccacttttaaaaattgggttgaacatgagaacataatcattcatattttatccatttgcatgtattcaataccatcctttcgctgttcttgtctctgcagcctttttctttaaagaatgaatgtttccatgttttatatccacagaatttctggtttttcctgttggagcccaaggagcaagggcagaatgaagaacatgatgtttcctaccgacagttactcatgacgtctccatccaggactgaggggggcatccttctccatctaggactgggggcatccttctccatccagtattgggggtcatcctcctccatccaggacctgaggg

SEQ ID NO: 61024 - DNA, 830 bp, Homo sapiens
attttaggcagaaggaatggcaatttctgaacgggggcacaggaagggaaaacctaaacagaacccagtagtctctctgagctgagaagacacaggatgtgactgttatttgcaaggcacacttcttgagaggaaaaaaaacagctccagaagtttgcttcaggccctcttaagtctggctgaaaattaatctgtgctgtgtagggagaaagtctctatgaccagacagagaaaactggcaaggaaagaacatcttactggggagctgtgagatgagcctttctcagcactacctcagagccatgaatcattcgggtcctttaccacctggaatgtagagacctcactgaatacagggaaaatcacgtagagccccgaggagggtcatgtcttagtagtgcggctaaactagcctcagtaaaggctaccctagatccacccataataattttaaaaccagttgttgaaataatcaagccattcctcaagtggtttagctggcaaacaaagttcaactttttttttttttttaacaagactacaacaaaatccagcaagcaataatataaaatttacaatgtctgtcatccaatcaaaattactaaacattcaaagaatccagagcatatgactcataaccaagataatactggttagtaaaaacagattcattaatgatgcaaatgagagaattagcaagcaatgatctattaaaaggctattacaaatattataattatattgtttgccctttaaattcaaggatttaagaaaagacatcaccataatggggcaagaaatggatgatttttaaaaaagaacttcttgat

SEQ ID NO: 61025 - DNA, 362 bp, Homo sapiens
caggaccagaggtgtcgagatcgtgtccaggacctgagctggctcagggtggagcccaccgggctaggtgtccaggcctgggcctctgtggaggaccagcccttgcagctcagcacagaggctgtggagcaggtggcacacggcagccagctggactctgagccccgctcagcccctgctgcccggtggagttcccagggccaccatccagaaagcctgggcctcactttgaacagccagcaggaagggggggtctctgcaagtgccccagaatgccgctgcagcctcctggcccgtgagggcctcctctgtggccagccagaagtgggggcctctgggccagccatggctgagccccatct

SEQ ID NO: 61026 - DNA, 231 bp, Homo sapiens
cgcctcagcccaaaagctcttggaggcgtgtgtgtttgtgtgtgtgtgtgttcacaaccctgtcctccacaatcctcctagcctctccagcctgcctgctggctgcctgctgctgctctctctgaactgagagagttaaccaagcgggccaggcagtctgggctgggggccgccccctggcccccctccagccccagctccagtttcagctgctggttggggagggcatgg

SEQ ID NO: 61027 - DNA, 460 bp, Homo sapiens
agaaactgggtggacgtattgtaacgcagtatagtgtacacaaaaccatactttaatatagagatttttttaaagggtaattttgactacacacaattttcatctttgctgattttaatataagccttttgtaagatgcaacccaagggtaatttcaaatagcagactgccctgttgaccagaatttgttagattgctattacaatgctgattatattttatagcaattactgacataaggttatactttgggcaatggctcatgcctgtaatcccagcactgaggccaaggtgggaggatcacttgaggtcaggagatcaggacatagtgagacctccatctctacaaaaaatttaaaaatcgaaacatatcgcttgagccccaggagttcaaggctgtagtaatctatgatcatgccactgcactccagcctggacaacaggacaagacctatctctt

SEQ ID NO: 61028 - DNA, 511 bp, Homo sapiens
cattcttacactttaacaagcattcatttttctaagcctaaaacttaggaacacaacttggtgtaaaataaagtatctgaagacagaagacatcctccagtattagagatttgggaattgtttctatagctgattgcgattgtgcctttattaacttcaggttcagagaggtttgcattttccttgtctttttccattccagccatagaacttctgagcttcagcagagtctgagttcccttgcaggggtgagtcatttcacctcccatcttttcttttgagagttcttgccaaccacctattaacgtcttcagccagttggatgtctagtcaaaatttaccctgtgctacacattgtttactcatttgtcatcattttactctagttttgtaaaattttatctccaagtttttaaaagtgaattcattgtctaacgggtgaaaaaagcagtcctaggtaatggtatgccattaacgtgttccacatggtgagcctctcaggtctgctgaa

SEQ ID NO: 61029 - DNA, 349 bp, Homo sapiens
gatctacagcaagcctatttattgctttcctctacagcatatttatgtaaaagagatgtataatcatctccagttactctcctatcattttatcttaaatcccatgtaatcagctcctgtactcaatactccatggaaattagtcatggcagagtaacaaatgctttccagattgctaaatccagtgcttagttctcgttcattttgtatcatgtgattttgagaccctactacagttatcttctagacactaggatctagcagtgaatgtaataggtaaaaatctagtgtagtttgtattctgatgcagggagatagatactaattagatacataaatagaatataag

SEQ ID NO: 61030 - DNA, 821 bp, Homo sapiens
aggcctgcttctggaatttcattagttagcactagaaacaaaatgcaagcctttagacttccatgttactggcagaaatggagaacggggcgaataggatattcagtgaagtggggtacataagaagttattcttccacagtacccccttttgctgctattagcaatattttagctctagattttcatctgcattcaattccttctgattttcagattttctttcacagtcttcacctaaatacacaatgtacaatatctgatattgtgataatcttttaagattacatccatacaacattttataagtattgccacaacatatatgcatttttcccagcaagcccacccctagcatctgtggggcctagggcaggactacaaatctctgtatgtctaaatatttaaaagcttacgaactgttacataaaatatttatatccacttacctggacaaatacaccttcataaaacagaattcaaaattatgtgtaaaactatggttttaatatagctgaaaattggcaaaatattaaagatagctaatttttattgtgtatctctaggtattatgttgatgggccactaatgcttggatgggtaataaagacatacataatcacataatccataaattatgttatttcttctataaatgtttctcttgtcttcatttcagaagaatgactaatgaagattttcacgcaattgcattcttttgacagtagtgccaaattagacaaactttcctgagtcagtatactttcagatagtttttagttatttcaattgggagaaacttgactctgctgagtggtaacg

SEQ ID NO: 61031 - DNA, 423 bp, Homo sapiens
atgaagatgaaaacctccacaccaaataagtggaaagaaaagttggaaagaggtggagagaatgactcaatctttgatgtatcagtgctgcattgcctccctcaaaatgtctcaactgttttatgcagctgagcaaattcgtgatctcaaacagcaactcaagcaactccaggaaagaaaaaaaattgaccactggaggagatacctaagataatcctggtgatactttcggtgctacaagaaaaaaataatcctcgcacccaagaagaaacaatgaaaccttatttttcatgtaaatttctactcctgtttggttcaagcatttgaactgttgcataagatttttttgagtgccgctgagaaaagtattatcaatctagaatgcaccagaaagaaagcagcagaaatattacaaacagcttt

SEQ ID NO: 61032 - DNA, 930 bp, Homo sapiens
atggaaccagagaatgacacagggatttcagaatttgttcttctgggactttctgaggaaccagaattgcagcccttcctctttgggctgtttctgtccatgtacctggtcactgtgctcgggaatctgctcatcatcctggccacaatctcagactcccacctccacacccccatgtacttcttcctctccaacctgtcctttgcagacatctgtttcatctccactacaatcccaaagatgctcattaacatccagacacagagcagagtcatcacctatgcaggctgcatcacccagatgtgcttttttgtactttttggagggttagacagcttactcctggctgtgatggcctatgatcggtttgtggccatctgtcatcctctgcactacacagtcatcatgaaccctcggctctgtggactcctggttctggcatcctggatgattgctgccctgaattccttgtcacaaagcttaatggtattgtggctgtccttctgcacagacttggaaatcccccactttttctgtgaacttaatcaggtcatccaccttgcctgttctgacacctttcttaatgacatggggatgtattttgcagcagggctgctggctggtggtccccttgtggggatcctttgctcttactctaagatagtttcctccatacgtgcaatctcatcagctcaggggaagtacaaggcattttccacctgtgcatcacacctctcagttgtctctttattttgttgtacgggcctaggtgtgtaccttacttctgctgcaacccacaactcacacacaagtgcaacagcctcagtgatgtacactgtggccacccccatgctgaacccctttatctacagtctgaggaataaagacataaagagggctctgaaaatgtccttcagaggaaagcaataa

SEQ ID NO: 61033 - DNA, 555 bp, Homo sapiens
caaatacattagcatatttgatatgtgcaggactagataccttgggacctgccacactccactttcaagatatgtattagcttcattagaattaaagggacttgaactcaggacctgcagcctattctttatccacatgtctctggtagggctacatccagatcacaccatgacttcttatagagcaagagaaaataatattattatatcttcctttgcctaaaatctctccacttattcttttttatgattctgcaccagttcactgggttattctatgattccatatttttttttaaaaaaatcatatttaaaatgaacttacaatgtctgaattttcctggccttgagtcacagaagtaatatgtttcagatggctgcccaatatgtattatcatgtaatacatatctgtgtccttttctgggatgaggaaggcttcaacttctggcactgagaactttgtattacagacacaggtttagtttctagcttagtcatgcctttagagtttagtagcacaaatccatgcaacccaacagaatacatggtgaggg

SEQ ID NO: 61034 - DNA, 1272 bp, Homo sapiens
  misc_feature (1267)..(1267): n is a, c, g, or t
  misc_feature (1269)..(1272): n is a, c, g, or t
ggtggtttcaaggctccaggcgccagcaaaagctctctactccctagaatgtctgtctcccaagacccaagaaagctgtgtctcatggaggaggctgttagtgaatttgagcctggaaaggccacgaagtcagagacccagcctcaagtttctgccactgttgtgctccttccagatgggcaagcatctgttgtgccccatgcttcagagaatttggcttctcaagtgccccagggccatctccagagcatgcctactgggaacatgcaggcttcccaggagctatgtgacctcatgtcagccagaaggagtaacatggggcacaaggagcccaggaacccaaactgtcaaggctcatgcaagagccaaagcccaatgtttccccctactcacaagagggagaactctaggaagcccaacttagaaaaacatgaagaaatgtttcaaggattgaggactcctcaacttaccccaggcaggaaaacagaagacacccgtcagaatgaaggcgtccagctactgccatcaaagaaacagcctccttcaataagccactttggagaaaacatcaagcaattttttcagacgattttttcaaagaaagaaaggaagccagcaccagtcactgctgagagccaaaaaacagtaaaaaacagatcatgcgtgtacggcagcagtgctgaagctgagaggctcatgacagcagttggacagatactggaggagaacatgtcactttgccatgcgcgccatgcctcgaaggtaaatcagcaaagacagcagtttcaagccccagtctgtgggtttccctgcaaccacagacacccgttctactcagaacacagcagaatgctgagctatgcagccagcagtcaacaagccactctcaagaaccagagtcgtcccaacagagacagacaaatcagagatcagtagcccttgaaaagtgtccggtgcaacaatgagcaatggggcctgcgacatccccaactcttgctccccaagaaagctgtatccccagtcagtccccctcagcaccggccgaagacacccagtgcctccagccaccatcaccactgaccaaggcactgtctttttcagggaggtatctaatttggtcagtcacaaattcctttttagccttccctagagaaaaacaagtcaccaagaaaaaattcactctatgtagaggaaaagtattttctctcatgttagtacacgcagaacatttaatattccacaatatatacggttttttattcaaaanannnn

SEQ ID NO: 61035 - DNA, 2244 bp, Homo sapiens
  misc_feature (411)..(411): n is a, c, g, or t
  misc_feature (627)..(627): n is a, c, g, or t
  misc_feature (793)..(793): n is a, c, g, or t
atgctcatactgggttttggggtgcccatgatatgtgtatatgtatatttcttttcttcatttttcaaagattatttcactttgccatagaaagaaatacaaagaacacaattgttggaaagtaataacaaagactggcaaagcgcattgtgatttttaaagcaactttgacatgaatttatgtgtttaatctttccaggagccatatggcacaaagggtattatttctcttgttttgcagttgaacaagggaaggtcagctcatttccccaacatcacacagctaatgagtaactgagccagaacttgaattcaggacctctcacatccagactctaccacatcaaattccctttccccagtggctctaactttgactctgttacatcctagaacatcacctctttaccngatatgaaagacaaccttttcacatagtttaggagttgactttctctgttcttaaagctgatctaacttgactagctgccttgtattacatattttctcccaaacacccctttctctaggacgaatccaaaatttggcaatcttgggagttagctatgtcatagtcagatctcttggaagacaaagagctccaggtctagagaagcaagtgggagngtgttttccaagtgtacttagaaaatgtttatgagctttgtcctcatctgaataatcagaagatatgatttgatttttacaccttggtatacacttggagattacacagtcctgaggtttatatattcctcagagccattagactgaccaaaagggttcgtccctntgtttcatagtatttttacagttctcacagcaatcacttatcagtatttaaattgaccttagctgggcacagtcactcacttctgtaatcccagtactttgggaagctgaggccagaagtttaagtccagcctggacaacatagcaagactgtttctacaaaaaaaaaataaaaaattagccaggtgtggtggcacacacctgtaattctagctacttgggaggctgaggagggagaattgcttgaggctaggaattcaaggttacagtggactatgattataacactccacttcagcttgggtgacagagcaagaccctgtctcttaaaaaagtaaaataaaataaattaatctttacaacaaccctccaaggtagaccagaaagaggtggtatccttattttattgatggtctgtgtgaggtcatacagacagtaggtggccaagcccagatgccaagcctaagcctcgttccttttgtttacccaaggttcctattcataccattatatgaccatttagccttaaataatctgttttaattgcaaattttattttaagaaaggaaaaaaatcacatttattctgctgcatcttcttgctttattcataatgaattctgcaggtcaatttatcctcaacgatggcaagccagaatttaagtaaagcttctacttagctggtacatttgcatgtcaaatctttaattcagctgtcagtgttttagcatttactgtactttcattaataaatgttattttgatggtctcaggctaatcaagactatttgaaatgggggacggcaccaaatgaaatttacagagaaatcagagcttcttcatggactttaaaataattgttactttacacgtgtttgaaatcagaatacttgtaaaattaaagttagacatgttgttcttgcataaacaagcaaaagaagctaaggaatcaacttagatttatttgttcctttaagagcatgtactgagcacctgctgtgtgctagacatgttgtagatagaggaaatgcggatatcaacatggcaggcaaaaataacctgccctcaagaatttccattctagagcgagtagacagatgatatctcagatagtgccagggcctatggaaaaagctgaccaggcagggcactgaattctggggagtgggtggtcagggaaggccttgcttccttctcatccacattctggcatagaagtttgatttccatgtacatgtttttttttgtaacatatagctccagaatacgttatttttaactttgcactcaataaaaaatcaacttgtagtaattaaacttgttcagtacattcttcacagggacattaggtgctactacttctatcagcaacaagtatatgcttatctattttttatacattggagtctacacaaggcttcctgctttttataaaaggaactgcctctacaaa

SEQ ID NO: 61036 - DNA, 485 bp, Homo sapiens
tcagaaggtgtgacaggttttccctatttatcattaccaataataacaagtattgagagttttaaaatttctcccagaagataaactaacaaggatggaaggggagggcaaaggatatctaaacatgagaataaggacatgttagagggggggaaaaaaaaaaaaaaaaaaaaaaaaaaaaaaatttgggggcccccggggcccggagagaaagaattttaagaacacacaatgggggggggggggggcccaaggagggaaaggggaaaaggggcacaaagaaggggccccaagaggaaaaccggggacagaaacagggggggggattctcacccaatataaaaaaagaggcccgggggaaaccggggggtttggaaaaaactcccagggggagactcgggagagcaaaaagaggggaccataataagagagggaggcacaaaaggagaaccgaaaaaaaaaatttaagccccaacgggggtatc

SEQ ID NO: 61037 - DNA, 239 bp, Homo sapiens
tcagaaggtgtgacaggttttccctatttatcattaccaataataacaagtattgagagttttaaaatttctcccagaagataaactaacaaggatggaaggggagggcaaaggatatctaaacatgagaataaggacatgttagagggggggaaacagttgtaacaataaggaaagagaagagcaacagtggaagagacaggttgtgtgcccctaaagattctgcacccccagtttgg

SEQ ID NO: 61038 - DNA, 754 bp, Homo sapiens
aaaggataatcttttacaaagcagacagaatttttgtgtataaactgctctgtttgaatgcctcattgatataccatctaaaaactgaagtgttcagcaagattagcaaagccctgagctattgagatgggggaaaacatgagaaccaggctcttctctataggaggcaaaggtgacggaagatgcctttgctttcgcagtagtagcaaaaacagagccactgcccccaccgggccccgatagacctagttgcttggaaatgaaaggggcacaaagcaagctgcttgaagttgctgaggaaaaggtgaagagtgtggtcgtatgacttctttcctagaattttctttagaaaatggccctgactctacaaacactgaatttacatggtaggtcccccacttgagcctaacctcttttaaactttccatgaagtatcccacacgctgttgcctcagttgttccattgatgttacattacttgtgtcattcctagtctgccctatggaaaaggcagtactatagaaaccaagcaaagatccaaagaaggaggatggtctctttctgccatctgcattttctctttccaaggatcaggagctcccccaaacagctctcttttgcagagaggagatagagatcacttcattctacaatggacaaagaagggtactttgtggaattttgcatggcctggggtcccagatatgccaccgattaaaaaacttaacagatggactctgagaataggaatatg

SEQ ID NO: 61039 - DNA, 536 bp, Homo sapiens
gcctcggtaatgccgggcgaccctccacctaccaagctctatcatttcaggtcaacttcagactgctgtgctggcagtgagaatttcaagccaatggttcttaggtttctgggatgtgtgggagtgggacccactaagcgagaccacttggctccctggcttcagccccctttccaggggagtgaacggttccatctcactggggttccaggtgccactgggaggaagaaacttaaggcccaacaaatttatgcattgagccaaggacaagaaagaaatagcagaacaagatctaaaagacaaattccttcgacttcagaattcatgacttttctactagcccaggttacattttgtttaactgccaaatcacagtgcatttgatgtcacagatgttgtgctctcattttgcagccttctgtcctcaggaagactcaggcagcatgttcctctgttattgaacgtacacaatattgtaattaattgtttacctatctggcactcccaataaactgtacttcttatgcataagaaca

SEQ ID NO: 61040 - DNA, 182 bp, Homo sapiens
ttaacacaaaaaataccaaatactggtaagagctgtcattttggttttctttagacatgataaattacatttgcaaattagtgtctgatctgagatgacatggaacaaatggtaatatttacattctgcacattatccttgtcagattaagctgcagttggccagtgtggatataaagaggc

SEQ ID NO: 61041 - DNA, 761 bp, Homo sapiens
  misc_feature (641)..(641): n is a, c, g, or t
caactttctcacttagttctctaagatagtgaggatctgtctgctttcttcttgaccattagtggataggaaaaaaatgctctgattttctgtaaccatttgtcaccaaggccataaagacattgaactaatttccttattggagttcattattggaagtcttgaggagtttacacatttatctacaaagtaagtaggccagctcatttgtcttggctcatgtgtaatctttaaagcatattgaaaaattactattctcaagtaaggataatgtatatctcaggtcacttacagtctcaaagttttgtcagtatactttaaaacaatcctgcgaacagatctagattgaaggagactaaagaatcatgaactcgaggtggccccggggcaggcgcagagctggcaagcacgtggtggggcccctgaggcgtgcagagggtcacgcacctgggagcctgttgctggcacggtccgggcggaggttctgcggcgggaggcagcctgtcggttgcagggctgaaaaagcagttctacaaggcaagccagctggtcagtgagaaggtcggaggggctgaggggaccaagctggacgatgacttcaaagagatggagatgtcatcagcaaggcggtgacggaaatnctggcaaggaccatcaagtacctgcagcccaacccagcctcacaggctaagctgaccatgctcaacacagtgtgcaagatccagggccaggtgaagaaccccggctacccgcagttggag

SEQ ID NO: 61042 - DNA, 1975 bp, Homo sapiens
gacaggacctgggaatctttgtctctctaaaggtcctgttctttcaccattcttctttatagccatacatgtacctaacatttaatctagtttttgtggttggcactagaagcctaaccgtctgtaacatttacatgggaaatgtttttgccatgggaaatgcattgagtattccaacaaattcatttactgataaacttttgaacctccttccttgttaaagttggtgactaatatttgatgcttttttaggttgagattattttatatatttaattatattttgccatgcaaaacatccaaataaatgtttagattgtgttcttgttcttttggaagctatatttcttcaaaacaaattattaaatagttttggaatgtgggatgttataattgcttattagtgacatcatccatccatggcccagtaaacacaacattctctctctttttttttttccaaattattgtgtttcatagcaattctcgtaaactttaacaaaatatgcttctcataaaccttaacaaaatatacttccccaaattcaagctaaaatgattaattttataatttcagtatctaataccgaaaataaccttttcccaattggaagatagttgtatgtttgggctaagtcacagagcctcttagatctggcctaccagatctaaatttcatctgatccacagttctggtgatgaaatatcactcagccctacccgctgttgaatggctgtgttgcagggaacttgtgatcacagagccaccaggcaggcacacatgctgccagatgcctatgcagggagcaccgctccagccacctgctttggtccagaggctcgcagaaaaacagcatcatagcttttgtttctctgacggactaattttttggatttgagtgtctatgtcgactggtcagaggaagaagagtcagaaaaacagcctgagcttcggtttaaaaactgtacagttttcacaacagtgccagtctgatgtatgctcaccgcagaacatgcagcatggcctgtgcttccttcctctccggggcacacctgctattcctcaatgactctctactaagggccaccccccaacctgcccccgaccaccgacctctgtcctcccaagtggcctgtgcggcactttagtaggccaaacaagctgagaagtcacgtggctttggtgtcataattctgtgtgtgaacttcattttttgttgctgtttattatatgcttttatttgtatttgccagggcaatactgagaaaaagaaaagaaattccctgaaatatgttaacctatcataggtatagaaactatagctaacaaattattttgtggggagtggggaaaggagacctctttcagttcaaaaatctggtatttatttcccaacttgttaaaacaaccacagagtccaaaatatattattaatttataggtactattttctgtaggcctcttgaagggccgttttacagtagtgtactggagaagctcttactgaagagcattttgtcaatactcagtgtctacagagggtgctgtctgagtgttgagaatgacaaaggaagcaactgacatggtctttgaccttgaattgtgtccctttcaacccaaaacaggacaggcagaagtattagagtagttgatgattcaattaactagatcttagctgactgatctcagaaggtttcatgaaagaagtgagaacaaatgctttaaacatcttgatctagcagaaagaaaagtgtctctaaattggtgagatgttatctgtggagacaaatgtaggatttagagagagagatgcaaaaggggaagtaagagggtttattcaagagagattatgactgggtgcagtggctcttgcctgtaacctagcactttgggatgccaagacgggcagatcgcttgagctcaggagttcgagaccagccagggcaacatagtgagacctccacctcaaaaaaa

SEQ ID NO: 61043 - DNA, 2860 bp, Homo sapiens
catttgtattcagcatgctaatgatgtaactcctctctttatcattaccacggtgatagttaagttcattcgttaactcattttagtgacatgtgaggccatttaaatatttttaagataatgtatattgattagaaagggttagaaggagacaaatttatggtagaaattagccttgccattgtctaagttaatttatgtgacctgattgaacagttttagttgtaactttagagtagcttctttgttagaggatctctttcctttctcttttggttttctcccaatatttttatctgtcttgggattatcttaaaaggtatttattaatgagtatttggaagaaaattgacctagaaaatgtctcttttaaatttatctaggtacttgtatcaccagagaccttcatcaagtcctactgccacactggataaggccactacccccgacccttcttgtcagggacatggcttcctaataatggttttgctgttgtctctacataggggacctatggaaaaggagtttgaaatttctacctttgtagtacattgtatccaattttgttttgctcctccttttcatgtggtcaccaagcttttttccttagccattaaaaaagccacccctctttaaaacaaatttaaagatctatatacatttttgcaactttatttaataaaaaagagaagaaaaaaataaaatctaaatctcaattaccctaaagtggaaaaacctaagtatctaacctaggaacttgttgcctggtggtggttgttgttgttgttgttttttaatttatttagtgttgatccttgagttatttaatggtatccaaatgatatctgaaagtgattgattttaagatgtaatagttggcaaagtcatttcatttgtgtctcaaacaaataaagcccactgccatgggttaccatctgaaccctgattcattaggcactagtcatgccaaatggggatctcagaatagtttaatcttttcaaagatactcacaatggccaactgtgtgtgaatactggaaagtttgagattcttctatattcttcaaatttatggtcctgagactaggagggatctccagaggtcatatggctcatcgatctaccaccagggaagactgtcacttaggcatgcccaacaggagagatcgccatctattcttaacatctctagggaaggcagtttccttggcaacacaattcagctctcttaggttttctcacaataagaaaatatcttggccagtctttgagggttaggcacctggcaacagttgtggtgatttgggccattgtactaggggattcaagggaagttgggtttccccctacatttggtgattattacattaatatatgatcattccataagtctcctaagaaatcagatttttaaagaaagacacggattcagagacaatggtctgtaacatgaccaacttttgacaaatatggctgtactaggttttcatttttgctgttgttgttgtttgtttttgtgattgctcttatgtcggtaggtaatgtcaggaaaagtgactgtttcagatccccagtacaaacatcagaactaggatcaaatgacttgacttttaagctgttccattttctaagaagttacaattacaaaaagtaagcattttctacattcttacttctaagtaatgaccttctcattaatctttccttggcttaaaatgacaaataagaatccaaagtttttccactcctcctgtgggagataggaatagttgtgaagagtctgatggaataaaatgactccagagatttacacagccaccatttgatcccagcctttgtccttgtgttatttaaacaatggcttcctgctttctcaggggtcaggaaaatgatttaaaaatttgtcttcttgacaaggcctgaaaacgaagggaggtgtcgtggagaaatggtgatttttctggttacatcacttgattcaagcactccctggagctttcaaagccttttttatctgctcagagttgacacccaactcagagtcagaactcaccagaagatgaggaacacccccgaaatcaatgtttcctttctccatgggatttttttcaatcttggtacagctgcatatctcccaaactcggatgctcttgtgaaatgacagccacatcagtgtggttactccccacaaataacactagggggaaatgaccttttttatttaaaaaaaaaaaaaaggctaatgctatagaatgatcatgtaaagaatgttgaataaaatttggcccatgttttaattgactctaggcacctctattgaaataagtctgaggcatagtttgtgaaacatgtttcaaaagtgtttgatgtataataaatgctagaaatttacagtacagaaatagtaaaaaaataaaataaaaataaacctgtagattacagctctgttcctaagaacctcagcctttattgtgtcttagtaaagttgatctgctttatttttagtttattgaatttctggtgtactagcctcttaagatagaacttttaatacatatgtactggttaatgcctgtttacgcagaaaatggcactttgttctttcagtgtgtttccctcagtgtcacagggtatatcaatttgatagatcatttgacatttgtcaaaaatacgtttcccattttaaaaatatgtataattggttgcatagacatatgtcactttttgcagtgtcttcatcttgatcatagttttagacatcaactatgtctcactttccaactgccatagaaatttggtacatttgcaaattctggtggaatctagtgagctgaatgtattggtagatcaaatgatccaa

SEQ ID NO: 61044 - DNA, 1370 bp, Homo sapiens
cggccgccgccgttccctgttgtcccgatcgcttctcacccccgccgccgcccgcacgcggagctcccccggtgaggtgggaagacggagaatcagggataggatcaaatgacttgacttttaagctgttccattttctaagaagttacaattacaaaaagtaagcattttctacattcttacttctaagtaatgaccttctcattaatctttccttggcttaaaatgacaaataagaatccaaagtttttccactcctcctgtgggagataggaatagttgtgaagagtctgatggaataaaatgactccagagatttacacagccaccatttgatcccagcctttgtccttgtgttatttaaacaatggcttcctgctttctcaggggtcaggaaaatgatttaaaaatttgtcttcttgacaaggcctgaaaacgaagggaggtgtcgtggagaaatggtgatttttctggttacatcacttgattcaagcactccctggagctttcaaagccttttttatctgctcagagttgacacccaactcagagtcagaactcaccagaagatgaggaacacccccgaaatcaatgtttcctttctccatgggatttttttcaatcttggtacagctgcatatctcccaaactcggatgctcttgtgaaatgacagccacatcagtgtggttactccccacaaataacactagggggaaatgaccttttttatttaaaaaaaaaaaaaaggctaatgctatagaatgatcatgtaaagaatgttgaataaaatttggcccatgttttaattgactctaggcacctctattgaaataagtctgaggcatagtttgtgaaacatgtttcaaaagtgtttgatgtataataaatgctagaaatttacagtacagaaatagtaaaaaaataaaataaaaataaacctgtagattacagctctgttcctaagaacctcagcctttattgtgtcttagtaaagttgatctgctttatttttagtttattgaatttctggtgtactagcctcttaagatagaacttttaatacatatgtactggttaatgcctgtttacgcagaaaatggcactttgttctttcagtgtgtttccctcagtgtcacagggtatatcaatttgatagatcatttgacatttgtcaaaaatacgtttcccattttaaaaatatgtataattggttgcatagacatatgtcactttttgcagtgtcttcatcttgatcatagttttagacatcaactatgtctcactttccaactgccatagaaatttggtacatttgcaaattctggtggaatctagtgagctgaatgtattggtagatcaaatgatccaa

SEQ ID NO: 61045 - DNA, 442 bp, Homo sapiens
aaacgggccgcgaaccgcagtatcatgctggccaagaagatcatcattaaggacggaggcacgcctcaaggaataggttctcctagtgtctatcacgcagttatcgtcatctttttggagttttttgcttggggactattgacagcacccaccttggtggtattacatgaaacctttcctaaacatacagtgtgtaacagttctaatacagcaaatttaatacaattttttattagatcaaaattcaatagaatgtttcatatgttttaaggaaggttcattgaatttcttcttttcaatggaagtcttcatttggaaaaatgccttttatccttcttgccgtttactcaatgcttgtttatatatttgtgttgactatcagagacactttttgtttgtgaatttagtaaaccatattcaaaacagtcacgattgactctgc

SEQ ID NO: 61046 - DNA, 626 bp, Homo sapiens
  misc_feature (47)..(47): n is a, c, g, or t
aaagccaaatgggaagcatggaacctcaaaaaagggttgtcgacggnatatgcgacaaatcctattgtgaactgtgcatgcaagggatctaggttttgcctccttatgagaaactaatgcctgatgatcttctgaggtggaacagtttcatccagaaaccacccctgcctcctccccatcccctcgtccatggaaaaattatctcccattaaactggtccctagtgccaaaaagtctggagaccactgccataaactacacaacaataagataaaatgtaattatgaattacatttgaattaaattttagaagagaagacacatactcttagaaagtgcttcaagtaatctagggtagacttaaatttcaagaacaacccatcaggacagtgactaactagattatatctacaacagcttcaggtgaactcagccctaagcaaaactgtgacataaaaaaatatattataattcatgccactccctttctttagcaagtaccttggcctttttttccaattttatttatttattttattttaaattgatagacaaaattatatatatttattgtttcttaaatttatttttaattgacaaataaaattgtatgtatttatggtgta

SEQ ID NO: 61047 - DNA, 452 bp, Homo sapiens
cagagaagaaaaatcacaccagtagaaaaacccacggatgaacgtcatcatactcagtgtttatttattttagataatagtttgtgcactaagaaaaaaattaagatgttttatttctctttctagaaagaaaaaagcagacataaacattttttgaagggactgaaagtatctcactaaataaaatatggcaagcctgtgaccaaatctatgatgaaagagcaaaaagagtatcaaaatcatacagggttttcttctataggaaatccagactgcgagtcattaagccctacacatttaccccaaaaattcagttctgtggcacagaatttggaataattatacaaaattataggtagatttggggcaagaataatctcatcaattttcaatgtcactgccacagcacaaagcaaaagtagagaaaaacttgagaattgcacatactttgt

SEQ ID NO: 61048 - DNA, 327 bp, Homo sapiens
ctacaatggcaggaactagggcttccacaagtgccagagattacaggagactgggttttataggtttgaagagcagaaagccaaaacgggagggaaggggggtagtgaggtgcacagtcctttgtggctcagatgacagatgcggccttcgtggcctgacactttccaccaccgtctgattttgtgaagtgatgaacacgggtaacgtaaatactggtgttagatttatactgacagccgctctgctcatcaagagtgcagtgatttcctgggaacttagggggtgtcagggaataaggtgaaacaaaattcccccaagttctgtcc

SEQ ID NO: 61049 - DNA, 492 bp, Homo sapiens
tcagcccatgaagtagaggcacccaggtcctgtgcctgtggctatagcacactttctgcccacccctcggttctgaccaagggcatttgtccccactaaagattatatcacaggtctcagttgggagcttctctcaacctgtgaccactgcctcagttaaccagcagacttcaggtgaggtcccctgtgaggtaggatcaggaatggcttccctctgtccctgcttggttctgggagtaaacacggttcgatgctgctccttttcataaaacctcactgctcactaagtagcaccagcgctaggtagggttaaggtgttcccctgtggcctggattgctcggctccccagtgggagagtgtatcatggaggcagtctctcctccccactcatgctctggcaactcccagttttcctcctggtttatcatgtagactactgcccactgcttctttcaaagggtttgtggtttctttcagtgttttttaagttc

SEQ ID NO: 61050 - DNA, 441 bp, Homo sapiens
taacttatcttgctgttcttctgtttcactagaagaagctttttccagcattctgactggaaaacttcttagccaaaaccataagttcctgaagtgccctttatatagcccatgttattgcagacaatgctggttgttttgccaaaataacttgttttctttttttttccagcctgtaataatatttcttcactgtactttaagctttcactaagagtctgtgcttgtgtcttgtcccaaaactcaacagttgatgtcttaggttttagttgtccagcaacccacctctaggcccaacatcaatggttaaaaaagaggatagaagcatgaaagcaaaaaaagaaattactgtgaaaaaatatatacacaattcactatataaattttaaagccttataatatcaacctctctcactgtaagtaaagctaaagtcagtaagc

SEQ ID NO: 61051 - DNA, 892 bp, Homo sapiens
attgtgataggagggatttactctttggcagatatccaagcgtggaaggcctgtttgatggactgtccttgataatcacaggcaggtatagcctcaaggctttgaggatggctctaaagtacatttcaaacaccacctcctccacaaagcctttctactacaactccatcccctgagtagagtgaatctcttcatattcttagtacctacagaattttggaatagtcatgtttagtatattttgttttagcaaatagggaagcaaatactatattttagaaatagttaatgtaaaatggctaggttttttttttttttttttctttttagtgtgatgcttcaaggggagcctttgtcattgtattagtccaggacctcttagaagcagatgccaagatgggattaagcacataagaaatttgttaggtgaaatgcttgtgaggggggaaaaggaaggagacagggagagttgtcagactgatgaaagtctgactccaagttaaaagagaggtaaggaaggaaggaactttgagtgaaagtgtcttagactgtagtgcaatactaaggaaagtttgcaaggcctcagaaagtctttgagtgaaaggtgcctgttggaaaaatgatgtgtctcccgggaacaggcctgccatgctcagtcagtgactgggaggagctagtgagaaactggcctcgacacaaacacagtgatggatttgagtgcagctgctgcagcactcagtctattatccttcctgtagtcagagatctgagaggctcgttctcatgatcaattagggtcatctctggctatgaattgcctaattcgggataaagtacagtttttccccatttcaggtgggtaatttgttcccaaaaaacccctgtatttaaa

SEQ ID NO: 61052 - DNA, 1115 bp, Homo sapiens
gtcagcctgggcaatctcagcgacaacaaaaggtacagtctctagagtccaactgggttcaaatcctggctctgtcacatactagctgtgtgaccttggccaagtttcttaacctctctgtgtgtatagtccttatctgaaaatggggataaccaaccaagagagctgagagaatatgagtaaagtgctaaaaacactaccaagaacacaataaatgctcagttaattttgggggtgagggtcatataacctagcccaaactgtcgatagcaaaataaaacaagttaggagcagtggctcacacctgtaatcccagcacttgcgggaggattgcttgagcccaggagtttgagaccagcctaggcaacatagcaaaaccgctatctctacaaaaacaatttaaaaattagccaggtgtggtgaggaacacttgtagtcacagccactcagaaggctaaggagggaggattccttgggttcaggaggtcaaggctgcagcaagccatgatcataccactacactccaatctggacagctgagtgaaaccctgtctcctcaaaaaagaaaaagaaaaaaaaagaaagaataagaaaactcacaaaatcagagaacttctccccttctagccaggcatggtggcatctacctgtagtccaactatgcaggaggatcacttgagcctaggagttcaagtctagcctgggcaacatagtaagaccctgtctccctaacaatttaaagattttaaaatgtttaatctttttttaaaaaattgctttggaacttttcccagttacctttacttgtagaaaaagtcttcagttgaggaatatatgcaaatactcttttataagaatttttattaaagacaatgttgatccaaagacccctccccaatcaagtcatcatagacctgtcttaatatgcagttgtagtagcaaataattcctggttctaaggagattgatgttgctaatctctaacaaccataaagtgaatgtacttctacctgatctttaaaatgattattcaattttagatttaaaacatcatttcaatcattgtaaatgaaatattttgatttaaaatccattatttgataatacaagtaaca

SEQ ID NO: 61053 - DNA, 557 bp, Homo sapiens
tgctcttttggggtctttgctcttttggggtctttgctcttttggggtctttgcttaaaacagaagcctggccatgtttgtgtaaagcagctatgctgtgcccagacttttttttaagtcagtgcctgtttttgttcctcctgactagataagacttctcaacttgtctccagtcacatcttataggtgtgttcatactggcaacaagttcgtacctcagtggcacagagctcccagaggaaggggcaggctatcatcttccctggaaaatacaaggcaattagggactggaggggacccccagcataccacagcagcctgacagaaaagtggccagacagtctacttgatgggcaggtcctactgacctgggtctccagccagtccaccatcagagctatccagccagtagcaactcagcaattccctggacagagcttccaggagcaaacgaaattctctctgccattgcctctgcagtgaaactgccctttctaccctcagaatatcaagggagcaaagaccctaagtgccatattgacacctccaataagctg

SEQ ID NO: 61054 - DNA, 191 bp, Homo sapiens
caactatctaggtctggtcaactaagacctatttttgccagatcttcaagtctgggcacagtgtaacaccagcactttgagaggccaaggcaggaggatcacttgagctcaggagttcgaaaccagcctggataacttagtgagaccctgtctctacaaaaaattaaaaattttttgcactccagcctggg

SEQ ID NO: 61055 - DNA, 392 bp, Homo sapiens
tcattcaaagatgcagaataccacacttgttttaatctgatattctttccatttctatccgtctaggacgtaattgcacacgggcgcctcccatcatttggttgctaaggagacagaaggctggtgtttccgatttgccactattacacagcggcccgcgagaagcatctcttggctcgaagcgcgctgtaggtgaaccgcccttgacttaaacgccaacacatctaaaagggggcgagggacgctttattttcatttccctgaccactactgaggtgagcatttctttcactcgcgtacttgtttgtattttttctgttgttcacgtccaatagaacactggttttctattggaggcttttgggtttttttcccccatttccctttcgtta

SEQ ID NO: 61056 - DNA, 354 bp, Homo sapiens
atggatgagtgggcaccccgcacagggctgcagggtggaaaacgctcgacggccaggtggtgacttgggggcagagagcgcagtgtgtaggggaggagaggtggtgtccctgctgcctgggagccagcctgcctgtgctgtgggcagagccaaggcactttctgctgccggtgcttccagggcctaagcagccgctgcacactcaccagcgcaaggctcctctgcagggaacgagggctgctacccatttcacagatgagggcaagcaaggacttgcccagggttgcccagagcaagtgcgtaacaggccctgagaagagggccagtgagctcatcctgagttaattatgggct

SEQ ID NO: 61057 - DNA, 395 bp, Homo sapiens
acgtacttcagtgttcattattaaaactaccgcaatactatatcataaaaatctgggatggatgttccagccatcataaggtccaaaagaaaagagaaagtgttattttcctgttagtgacatgtagtccctttgttctagtaggaaaaaaggtgcctagaggtagtatatagagtaaatattgttcctttagcctacttcctgcagcttccaatttatccaaggaaatgtctacaacaattttgttcaaaagtctgttctagtcaatagcaggagaagtccacgttattgggctgattttgcttacatcagcaagagaaatgtcacgtgatactcaggccgcgctttctcttccatcacaccatcttcaaggaatgtcaataaactcactttgg

SEQ ID NO: 61058 - DNA, 395 bp, Homo sapiens
atacagaccaaataataccacagtgataaaaatgggaaaggagctgtcgctcagctcttcttggccgtgttgtttgcttttcgatgtctaatttatgaaagcatttcaaagtgacatatatactgaacagcttcgtcttgccaaatgtaaaataaactggagatgagtttagcactgagctttgtagattgttgtcctcttggtagagtcggggcctaaacaccacctgggcctctgtgccagtgggacaggtgacctgcctgtcctactgctggtctctgcagctctctgtcttggggcaaccctggctctgagttccagagtgttctccagtaggagagtctgcagggggcactgtggagcacctgggtatgtgcacatctgttgttggctgg

SEQ ID NO: 61059 - DNA, 218 bp, Homo sapiens
gagatacacataaaactatattatgaactgggatcacccaaattatcttctgcaggacattattctactagaaaatatggacaaaatcataaggaccaaaattttgtaaaattccttatattaaaaccactcttcactattagcaggagactacacatgttctaatggtctgagaaatactgcagtaaataaatctggttaattttgtttaaaccaaa

SEQ ID NO: 61060 - DNA, 238 bp, Homo sapiens
gagatacacataaaactatattatgaactgggatcacccaaattatcttctgcaggacattattctactagaaaatatggacaaaatcataaggacaattgtcagtttgatgctgacaaaattttgtaaaattccttatattaaaaccactcttcactattagcaggagactacacatgttctaatggtctgagaaatactgcagtaaataaatctggttaattttgtttaaaccaaa

SEQ ID NO: 61061 - DNA, 874 bp, Homo sapiens
tcctgcaggtgttctcaggagaagcaaggactgggtgagaaatccagctcagcacttatgagtctgccactcagcacacgcccgtatcaatcggccatgaccaaccatgaatcgctgcagagtccctgtccacatcttctgcctcagtttcctctctgcccagccagtcctcaccctactgcaccctggcttccaccttcactcctccacaaaatgcctctacttaatggattatttcctttgggatgcatctggaaggcaaagcctccttttgaaagctgtctccctctcacctgggtcacatggaggtagagctgaccccgagaagggtccaccacttctaagttgaagcatcatcaagctgaggagggcagcaggaagaggctggctcagacagggaggaagggtaaggtttgctcacaagcactaggaggagcagggaggaaacggctactcccggtggctgggagtagatcaaccacaacatcacaggagaggaaggcagaggccaatgggacttaacccccaagaggagtcacttcaagaatgccagtgaagacattacttgtagctcctttcaaagccattctcagaggtgttaaatcagcaaagtcaatgaaacaaagacagaggtgaccgacatgagatgcagttaatggagatgagctttttagaacacaggctcacgaactggtttgaaatggccagtgagatgcagaggcacaggagtcatgtgtatggccccagggtgtggcagggtcagcagagtgatcacaaggatgggaagagagaagcccggataaacacgaaggcaacgccagctttcatcttaccacttcgtcctcggaaggcttgaaaacacaaatttacactt

SEQ ID NO: 61062 - DNA, 685 bp, Homo sapiens
ctgggctccaggctgagggtccttggacagacgtcatctccctggcttcagcagaatcacccacaaacccaccctgtgcccaccctcccatcacagagagcagctgctggagaaggcagcatgagactttgaagacctcgaggagcaggagacacaggagacaatggccaggatggtcatggtggcgcggctatgccatcactgatttctgcctacctgccccctaagtctcacttgctactactctcaatttcctacttaatgcttcggagagcaccagtcctgagaagagaggcgggatgttcactctctgggagttgagatggaacccaggcagttagaaaaagtgccacagccacgtgccgagcctactacttgtcaggagctcagtgagtcatccaattcctaaaacaactgtgctgcatgtgctccaccgcgcctgggcgactcggggaaatgggctgcgggaggctcagtgacctgccctgggtgacatggatggcatggatgccctgtccatgcacggggctttgctaggagaggacaggatcatccccagaagctggtcctgtgtccactgctcacggtggcagctgcttgggctgacaacgccccccacctcctgatcagatagtgatatacttggtccaaacttcgaaagtaaaaaagttaaaacagaaaaaaa

SEQ ID NO: 61063 - DNA, 254 bp, Homo sapiens
atttttcttctgaattattttttttaacattctgtgacagagtcataggatcactaaaacaagactgttaaaaataaaaggttcatgaaagatcacctagttccattttctcatttatcatatgacaaaactgaggcccaacaggttacgtgacttatcctcctcagagcaaagccaagcggaggaggaaacaaaaaatcccagatcttgaatcagggtgcttgtcattgttgtcatttgtagaggtattgttt

SEQ ID NO: 61064 - DNA, 551 bp, Homo sapiens
caatcatatttgggaggttttagcatatctttctctgaaaatgatggaacaaattgggagggatgtagaagattcgaacaaactccttaacaaaattggcctgattgaggcccgtataggacagtacaccatggggccgggtgcggtggctcacacatgtaatcccagcactttgggaggccgaggcggatggatcacttgaggccaggagttccagaccagcctggccaacacagtgaaactctgtctctacaaaaaatacaaaaattagctgggcatggtagcatgcacctgtaatcccagctacttgggaggctgagacacgagaatcgcttgaacccgggaggcagaggttgcagtgagctgagatcatgcaactgcactgcagcctgtgtaaagagtgaaactccatctcaaacaagcaaacaaaaactgtgtgccatgggactgcttaatatacattctcttcaagcatacacaggacatttacaaaaattgaccatatattaagccctacagtaagtgtaaataaatttaaaatattgaaatta

SEQ ID NO: 61065 - DNA, 1025 bp, Homo sapiens
tcatccttcaccaaaaacgttccaaaattttcttcccagccctaatgtgagtcctgtccctggcttgatttccaactccagaagtgaaagagaaggctggttagcagttttcactgattcattcataattaatgcagcaaataccatttgagcacctacagtgtcagccactgagatgagttttctttggtaggtttagttaaaagggttagaaaacatacagcagataagatggttgtatgagttctgaatacattatttcccttatttaatacatgaaatatggataacacttagaaagcagctatacagtttgttaagataaagttatatttggttcctttctcctctcttccctccctcccctccaactgtggagccatgaattagaatcttataaatgaagctactttttgattgttagtcttttttccaaattgacaattttttccaaattgacatattataatgttttaaatggattttcttaattttgatagtctttctttatataaacacgtgttttgttattaaaattttaatttcccacaagcttttaaaaaatacttcaccattttcaattagaaaatttctaagtgtaattaattgcttctaaaccttccaaagaagaaaaatggtgtgtatttaataagtaaatcagctgaaaactaaaactgaaatttctataatttgaatgactgaagtagtcatttttgaaagaaaaaaatgcctaagttgaagattccaagtaaatgtataggtgggataagaatacataacaaatgtattgttattcattatttaaaatgagttcatatttgtatcattgaaagtttgatgcatttgggaggatgacgtcagcaagagaaagttcatttggtgtgacgttaacatttcagaaaatatgtcaagtaagagcaggttgatgttatactttcgtccttacagaccttctttctttctattgtgccatctgtctgtttttctgtattgtaaagttccaaataaagtattaatgtattatc

SEQ ID NO: 61066 - DNA, 486 bp, Homo sapiens
atggattaaagacttaaatgtaagatctgaaattataaaactctttggtatgggtcagatgtttgttcccttcaaatctcttgttgaaatgtgattcccagtgttggaggtgggtcttggtgggagataattggattatgggggcagatccctcatgaatgatgtagcaccatccctttagtgataagtgagttcttgcttggttcacgtgagaactggttgtttaaaattagtctgggagcccccccaccatgtgacatgctggctccacttctgccatgattacacctcaccagaagtacgtgccagcactgtgctttgtgtaaagcctgcagaaccaagagccgattaaacctcttttctttataaattacccagcctcaggtattccttcatacgatcataagaatggactgatacactcctagaagaaaacataggggaaaaagctccttgattctggtcttgacaatggtttttataaat

SEQ ID NO: 61067 - DNA, 233 bp, Homo sapiens
gttgatagtgggggaagctatgcctgtgtggggaaaacggggtatatgggaaatttctgaactttctgctcaattttgcttatgaatctaaaactgctctcaaaaaataaagtttattaattaaaaaaattaacttgagccatattggccagtgccactgtagctgatttatttctttttgcaattcaaacaaatccattaagggcataagttcaagatgaatgaatgccacc

SEQ ID NO: 61068 - DNA, 312 bp, Homo sapiens
agctcactacaacctctgcctcctaggttcaagcgattcttgtgcctcagcctcctgagtagctgggattacaggcgcccgccaccatgcccggctaatttttgtatttttagtagagatggggttttgccatgctggccaggctggcctccaactcctgacctcaagtgattagccaaccttggcctcccaaagtgctgggattacaggtgtgagccactgcgcctggccaggagtttaataaatatttgagtgaaagtaagtttcttgaccttgacgcatgggccctagagagctagaagacctgaattc

SEQ ID NO: 61069 - DNA, 305 bp, Homo sapiens
gtagagaggcagtctgggaatgagtagacctgattttaaacctccaattcaccatgctattgacgtaaatgttggtcttcactttactcattttctcaacagagatcatgtcatcctgaattataaaacatgcctggcccatctctccaggctgctgggagaataagaatagagagcccagtgtagtacaagcccagagagaacttcaagaatggtagctgtggtttgtgaattattagctactattcttaatagtgacacaaggacggaggcaggattcagttttcagaagcccacagttatag

SEQ ID NO: 61070 - DNA, 375 bp, Homo sapiens
cagcctggtgacagagtgagactccatctaaaaaaaaaaaaaaaagaaaaaaagaaaagaaaagaaagaaaagacctcctatgttagtttgtcacaaatctcctcagccttgatatctgatcaagttcctcatccctcactcttgatacctaagttcttggcctgctttcagcaagaattctgttaagttagtttacccttgagatctaatcaagctctttttagtaattttccccactgacccctcactctgcttgttggtataaaccctccaccatccctgctgagtttggaattggacccatctctttcccccgctgcaacagtctcagggaagccttcttgccatgtttagcaagtggccggtgcgtaatt

SEQ ID NO: 61071 - DNA, 481 bp, Homo sapiens
tgctttcctatccttctcttctgtttaaagaagtcggtgttagtacagcttgaaattcaatagggcttgaattacagaaggcacaactgaagttagagaagaaaggatttttgttctgaaaattagcggtgagacagaccactctgaataaatggtgatatctggaaataatttttgaaatgcccaaaatccttcgtaactttaagaaattgaaaaggggtggggagggtcgtctataagagtgtctgtcattagaataggacttcttaaagtaatgtttgttaacaattggtaacaaggtcatttccaaacatagttcctggagccagttggctttggattggtagaaaccattgttgttccttcagagtcctcatctttggtaatttattttagaacaaaagactgaagacagatgtccttgaacaaaaggtctgtcctctaatgggtgacagagcgagactccgtctcaagaaaaaaa

SEQ ID NO: 61072 - DNA, 337 bp, Homo sapiens
gtaattgctatttgatgttattttaagaaattaacccttaaaactttaattccttaaaacaatctcaaacagaagaagcaaaagcttgttctgtgctccaggaaataagattcagcaccaatgaaaataaattatagaaaatcagaagatgggtcaatatgagtggaaaaaacctaacattttaattgttttttctctcaataattgtgttgaaccatccaaaaaagtatgatacaaaaatagcactatactaagagccagatgacatgtccttaaagccttagctctgcaaattattggttgtgtaacactagaaacaacacttagcctctcctag

SEQ ID NO: 61073 - DNA, 428 bp, Homo sapiens
gattctgcttccctcagttttaaacacggctcttttcacagtttggacacagggtatatgagatctgtcacctggacccttgtgaagtgaccttttgtggtccataccacttcatttccagcatgcctatgtgttaatccgaggtcgactgcccaattcagtttgaattagattctagtcaggtaacacattggagaagctaatttaaaaaatttttaggagaatattttcttcctgttcccctgttgcattactacttatcctcaattcttgtggagatacaccttagtttacctctaagatgatccatgagatcacaatgacattatattctactctattgtgtaattctttaaactttcttaattcttacagtcaaagttacacttagaaagaatccgaagttctgtatatctaaaaactcaaat

SEQ ID NO: 61074 - DNA, 367 bp, Homo sapiens
gcattcaagacaatggcttggagaaagaggcttcagtggttcacaagtgactatggaacctctctgaagattcctaaagcttctgtgtgcatggacatgtttctgcccacagcaagattactgccccataggggcatctacttacttaagctgctcttgttattcaccgtgtaaaggaagttgtggccatcccctcttctttcttgcctatcattcagagcctagattttgttcaggacagtctaaccccaacaatggctcctgcttggccttaagcaattttgatgacccatttccctttgccaatgatagttcaaggatgtgcatgtgacccagttccagccaatgaggtgtgaggaaatgtctg

SEQ ID NO: 61075 - DNA, 102 bp, Homo sapiens
tccagctccacgaccctcacagaacaatcccttctcatgaaattcagcagtcaagaaatctgcagcggaagtaaatgaataaatgttttgttttcaaatcga

SEQ ID NO: 61076 - DNA, 322 bp, Homo sapiens
aaccagcttattagtttgaaaactggtaaataaagggaaaagaacatacattatatattatgcagaggaatgcaagatggtacaatcacgttggaaataatttttggcagtttctctcaaagttaaacgtactgttgacagacgaccagcaattccacttctaggttaccagaaaagattatccaagagaaataaaaacatctgggctgggcaggatagctcatgcctagaatcccagcactgaaggaggccgaggtaggcagatctcttcaggccaggagttcaagatcaacctgtgtgatatggtgaaaccccatctcta

SEQ ID NO: 61077 - DNA, 449 bp, Homo sapiens
gaggtagagactactccaggatccttgagaaatggtccaggggaagaatcaaacttcagaacttcatcacagcaggaaatcaactatagcacacatatcttctctcctggaggcagccccgagggaagcccagttctagatcccccaccgcatctggagcctaatagatcaacaagtaggaaacattcagctcagcacaaaaataacagagatgacagtttagattggtttgatttcatggcaactcatcagagtgaacctaaaaacactgttgttgtgtctcctcatcccaaaacatctggagaaaatatggcttcgaagatctctaacagcacatctcagggtaaggagaagagtgagccaggccaaaggagcaaagtggacattgggttgcttccatcaccaggagagacaggtgttccatggagggcagacaatgtggaaagtaa

SEQ ID NO: 61078 - DNA, 183 bp, Homo sapiens
aaaaaaagtaacgtgacttttttctccaacagtttgttttgtcctaaagctggtcaagtaacttgaatctcacctgtgatgagagctacattttaacatgggtttggttatgggaagaggcaagactttggtgggagaaacaggacaaagtgccattgaccttgagcggagttctctgtgaaa

SEQ ID NO: 61079 - DNA, 1090 bp, Homo sapiens
  misc_feature (167)..(167): n is a, c, g, or t
gattgcttgaggagagaagtatgtgatcagaaagcattctttgtctattaactcctgcccagcaaaagtgaaagaaaattcatgggagcatgcaagaacaaagagcacagcaaagctggacaaacacagcaatccaggcaggggatttccaactcaactctggtatntaagctgcatgcaaagtcctttttctgtctctggtttctggccccttgtctgcagagatggctcccaatgcttcctgcctctgtgtgcatgtccgttccgaggaatgggatttaatgacctttgatgccaacccatatgacagcgtgaaaaaaatcaaagaacatgtccggtctaagaccaaggttcctgtgcaggaccaggttcttttgctgggctccaagatcttaaagccacggagaagcctctcatcttatggcattgacaaagagaagaccatccaccttaccctgaaagtggtgaagcccagtgatgaggagctgcccttgtttcttgtggagtcaggtgatgaggcaaagaggcacctcctccaggtgcgaaggtccagctcagtggcacaagtgaaagcaatgatcgagactaagacgggtataatccctgagacccagattgtgacttgcaatggaaagagactggaagatgggaagatgatggcagattacggcatcagaaagggcaacttactcttcctggcatgttattgtattggagggtgaccaccctgggcatggggtgttggcaggggtcaaaaagcttatttcttttaatctcttactcaacgaacacatcttctgatgatttcccaaaattaatgagaatgagatgagtagagtaagatttgggtgggatgggtaggatgaagtatattgcccaactctatgtttctttgattctaacacaattaattaagtgacatgatttttactaatgtattactgagactagtaaataaatttttaaggcaaaatagagcaattccaaggccagcttggaatttaattctgtcttgataccttgttatttatgcaaaaactcctatctcctttcctttatgacaagagagtaagttttaggttgggatcca

SEQ ID NO: 61080 - DNA, 976 bp, Homo sapiens
  misc_feature (167)..(167): n is a, c, g, or t
gattgcttgaggagagaagtatgtgatcagaaagcattctttgtctattaactcctgcccagcaaaagtgaaagaaaattcatgggagcatgcaagaacaaagagcacagcaaagctggacaaacacagcaatccaggcaggggatttccaactcaactctggtatntaagctgcatgcaaagtcctttttctgtctctggtttctggccccttgtctgcagagatggctcccaatgcttcctgcctctgtgtgcatgtccgttccgaggaatgggatttaatgacctttgatgccaacccatatgacagcgtgaaaaaaatcaaagaacatgtccggtctaagaccaaggttcctgtgcaggaccaggttcttttgctgggctccaagatcttaaagccacggagaagcctctcatcttatggcattgacaaagagaagaccatccaccttaccctgaaagtggtgaagcccagtgatgaggagctgcccttgtttcttgtggagtcaggtgatgaggcaaagaggcacctcctccaggtgcgaaggtccagctcagtggcacaagtgaaagcaatgatcgagactaagacgggtataatccctgagacccagattgtgacttgcaatggaaagagactggaagatgggaagatgatggcagattacggcatcagaaagggcaacttactcttcctggcatgttattgtattggagggtgaccaccctgggcatggggtgttggcaggggtcaaaaagcttatttcttttaatctcttactcaacgaacacatcttctgatgatttcccaaaattaatgagaatgagatgagtagagtaagatttgggtgggatgggtaggatgaagtatattgcccaactctatgtttctttgattctaacacaattaattaagtgacatgatttttactaatgtattactgagactagtaaataaatttttaaggcaaaatag

SEQ ID NO: 61081 - DNA, 547 bp, Homo sapiens
cagataaatgttacttacatatatatgtacatatatgtatgtatgtatgtatgtatgtgtacagacagatgtatttatacatgtataagctatctctaaaataatttggaagaaaagtagatatgcttccaagtgagcagaaaaatctctagacagatatacaagaaactattaatagtggtaaccccctaagagacttgacagatggctggagatcaggagtaggaaagagatgtaattttcacaatcatctgtgcttttcaaattattactatgtgcggccgggcggggtggctcacacctgtaatcccagcactttgggaggccaaggcgggtggatcaccaggtcaggagattgacaccatcctggctaacatggtgaaaccccgtctctactaaaaaaatacaaaaaattagccgggcgaggtggcatgcgcctgtagtcccagctactcgggaagctgaggcaggagaatggtgtgaacccgggaggcggagcttgcagtgagccgagatcgcgccactgcactccagcctgggcaacaga

SEQ ID NO: 61082 - DNA, 2147 bp, Homo sapiens
ttaggaagaagtgaatagaagaaaagagggtgttgcaaatcaaaagcacatagagatatcatcttacaccagtcagaatggctattcttaaaatgtcagacaacaacagatattggattaccacatcatcaggaccacaccttcatcaggaatgaatattcctactacaattaaagaagaaacaaaattaatttgttggtgaaaaacgtaaaaagagaaattttctttggttttgtttaatttctttattgagggtcaccactaaaaaaaatgctcactggtcattcttttgaatactgtctgagagaaagatgtaagatggttgattatttcaaatgacagaagataaagatgggatatcatcatggcatgaacaaaaacaagatttgtagctggaggtattttatagtctaacatgatcaccaatcattctataaacctgttggatgagtttatcagacagacagagagagagattgattgattctgaatagaaaatttcactttagaaaaaaatattttgactatataataatgtatgtaaaaattctctttgataagaaacgagtgaactggattcaattttcctcacagcctgtgtaatacaccatcacttgcttcctcctacatgccattgattagccccagggagcagtgcagcactgcctgcccatgttttacataacccctgaatataaatgccagatgttgctgaaggaaacaggatctgcttagtgaaagaagtggcaagcaatggatcccaaatatcagcgtgtagagctaaatgatggtcacttcatgcccgtattgggatttggcacctatgcacctccagaggttccgaggaacagagctgtagaggtcaccaaattagcaatagaagctggcttccgccatattgattctgcttatttatacaataatgaggagcaggttggactggccatccgaagcaagattgcagatggcagtgtgaagagagaagacatattctacacttcaaagctttggtgcactttctttcaaccacagatggtccaaccagccttggaaagctcactgaaaaaacttcaactggactatgttgacctctatcttcttcatttcccaatggctctcaagccaggtgagacgccactaccaaaagatgaaaatggaaaagtaatattcgacacagtggatctctctgccacatgggaggtcatggagaagtgtaaggatgcaggattggccaagtccatcggggtgtcaaacttcaactgcaggcagctggagatgatcctcaacaagccaggactcaagtacaagcctgtctgcaaccaggtagaatgtcatccttacctcaaccagagcaaactgctggatttctgcaagtcaaaagacattgttctggttgcccacagtgctctgggaacccaacgacataaactatgggtggacccaaactccccagttcttttggaggacccagttctttgtgccttagcaaagaaacacaaacgaaccccagccctgattgccctgcgctaccagctgcagcgtggggttgtggtcctggccaagagctacaatgagcagcggatcagagagaacatccaggtttttgaattccagttgacatcagaggatatgaaagttctagatggtctaaacagaaattatcgatatgttgtcatggattttcttatggaccatcctgattatccattttcagatgaatattagcatagagggtgttgcacgacatctagcagaaggccctgtgtgtggatggtgatgcagaggatgtctctatgctggtgactggacacacggcctctggttaaatccctcccctcctgcttggcaacttcagctagctagatatatccatggtccagaaagcaaacataataaatttttatcttgaagtaattgaatgtttttccttaaagattcttttcctactcctttctctgttacttgtgtgtttcttttccttctagttctttaaggccaaaaactgatttgcctataagtttggggcagagagcagatgataaccaatattttatagacatttttgaggtgagagtaggtggagttttcagcctctagaggagaagcaagtgacatatttgttagtctgtctttagctcttccagaaa

SEQ ID NO: 61083 - DNA, 2093 bp, Homo sapiens
ttaggaagaagtgaatagaagaaaagagggtgttgcaaatcaaaagcacatagagatatcatcttacaccagtcagaatggctattcttaaaatgtcagacaacaacagatattggattaccacatcatcaggaccacaccttcatcaggaatgaatattcctactacaattaaagaagaaacaaaattaatttgttggtgaaaaacgtaaaaagagaaattttctttggttttgtttaatttctttattgagggtcaccactaaaaaaaatgctcactggtcattcttttgaatactgtctgagagaaagatgtaagatggttgattatttcaaatgacagaagataaagatgggatatcatcatggcatgaacaaaaacaagatttgtagctggaggtattttatagtctaacatgatcaccaatcattctataaacctgttggatgagtttatcagacagacagagagagagattgattgattctgaatagaaaatttcactttagaaaaaaatattttgactatataataatgtatgtaaaaattctctttgataagaaacgagtgaactggattcaattttcctcacagcctgtgtaatacaccatcacttgcttcctcctacatgccattgattagccccagggagcagtgcagcactgcctgcccatgttttacataacccctgaatataaatgccagatgttgctgaaggaaacaggatctgcttagtgaaagaagtggcaagcaatggatcccaaatatcagcgtgtagagctaaatgatggtcacttcatgcccgtattgggatttggcacctatgcacctccagaggttccgaggaacagagctgtagaggtcaccaaattagcaatagaagctggcttccgccatattgattctgcttatttatacaataatgaggagcaggttggactggccatccgaagcaagattgcagatggcagtgtgaagagagaagacatattctacacttcaaagctttggtgcactttctttcaaccacagatggtccaaccagccttggaaagctcactgaaaaaacttcaactggactatgttgacctctatcttcttcatttcccaatggctctcaagccaggtgagacgccactaccaaaagatgaaaatggaaaagtaatattcgacacagtggatctctctgccacatgggaggtcatggagaagtgtaaggatgcaggattggccaagtccatcggggtgtcaaacttcaactgcaggcagctggagatgatcctcaacaagccaggactcaagtacaagcctgtctgcaaccaggtagaatgtcatccttacctcaaccagagcaaactgctggatttctgcaagtcaaaggtggacccaaactccccagttcttttggaggacccagttctttgtgccttagcaaagaaacacaaacgaaccccagccctgattgccctgcgctaccagctgcagcgtggggttgtggtcctggccaagagctacaatgagcagcggatcagagagaacatccaggtttttgaattccagttgacatcagaggatatgaaagttctagatggtctaaacagaaattatcgatatgttgtcatggattttcttatggaccatcctgattatccattttcagatgaatattagcatagagggtgttgcacgacatctagcagaaggccctgtgtgtggatggtgatgcagaggatgtctctatgctggtgactggacacacggcctctggttaaatccctcccctcctgcttggcaacttcagctagctagatatatccatggtccagaaagcaaacataataaatttttatcttgaagtaattgaatgtttttccttaaagattcttttcctactcctttctctgttacttgtgtgtttcttttccttctagttctttaaggccaaaaactgatttgcctataagtttggggcagagagcagatgataaccaatattttatagacatttttgaggtgagagtaggtggagttttcagcctctagaggagaagcaagtgacatatttgttagtctgtctttagctcttccagaaa

SEQ ID NO: 61084 - DNA, 1649 bp, Homo sapiens
ttaggaagaagtgaatagaagaaaagagggtgttgcaaatcaaaagcacatagagatatcatcttacaccagtcagaatggctattcttaaaatgtcagacaacaacagatattggattaccacatcatcaggaccacaccttcatcaggaatgaatattcctactacaattaaagaagaaacaaaattaatttgttggtgaaaaacatgttgctgaaggaaacaggatctgcttagtgaaagaagtggcaagcaatggatcccaaatatcagcgtgtagagctaaatgatggtcacttcatgcccgtattgggatttggcacctatgcacctccagaggttccgaggaacagagctgtagaggtcaccaaattagcaatagaagctggcttccgccatattgattctgcttatttatacaataatgaggagcaggttggactggccatccgaagcaagattgcagatggcagtgtgaagagagaagacatattctacacttcaaagctttggtgcactttctttcaaccacagatggtccaaccagccttggaaagctcactgaaaaaacttcaactggactatgttgacctctatcttcttcatttcccaatggctctcaagccaggtgagacgccactaccaaaagatgaaaatggaaaagtaatattcgacacagtggatctctctgccacatgggaggtcatggagaagtgtaaggatgcaggattggccaagtccatcggggtgtcaaacttcaactgcaggcagctggagatgatcctcaacaagccaggactcaagtacaagcctgtctgcaaccaggtagaatgtcatccttacctcaaccagagcaaactgctggatttctgcaagtcaaaagacattgttctggttgcccacagtgctctgggaacccaacgacataaactatgggtggacccaaactccccagttcttttggaggacccagttctttgtgccttagcaaagaaacacaaacgaaccccagccctgattgccctgcgctaccagctgcagcgtggggttgtggtcctggccaagagctacaatgagcagcggatcagagagaacatccaggtttttgaattccagttgacatcagaggatatgaaagttctagatggtctaaacagaaattatcgatatgttgtcatggattttcttatggaccatcctgattatccattttcagatgaatattagcatagagggtgttgcacgacatctagcagaaggccctgtgtgtggatggtgatgcagaggatgtctctatgctggtgactggacacacggcctctggttaaatccctcccctcctgcttggcaacttcagctagctagatatatccatggtccagaaagcaaacataataaatttttatcttgaagtaattgaatgtttttccttaaagattcttttcctactcctttctctgttacttgtgtgtttcttttccttctagttctttaaggccaaaaactgatttgcctataagtttggggcagagagcagatgataaccaatattttatagacatttttgaggtgagagtaggtggagttttcagcctctagaggagaagcaagtgacatatttgttagtctgtctttagctcttccagaaa

SEQ ID NO: 61085 - DNA, 2098 bp, Homo sapiens
ttaggaagaagtgaatagaagaaaagagggtgttgcaaatcaaaagcacatagagatatcatcttacaccagtcagaatggctattcttaaaatgtcagacaacaacagatattggattaccacatcatcaggaccacaccttcatcaggaatgaatattcctactacaattaaagaagaaacaaaattaatttgttggtgaaaaacgtaaaaagagaaattttctttggttttgtttaatttctttattgagggtcaccactaaaaaaaatgctcactggtcattcttttgaatactgtctgagagaaagatgtaagatggttgattatttcaaatgacagaagataaagatgggatatcatcatggcatgaacaaaaacaagatttgtagctggaggtattttatagtctaacatgatcaccaatcattctataaacctgttggatgagtttatcagacagacagagagagagattgattgattctgaatagaaaatttcactttagaaaaaaatattttgactatataataatgtatgtaaaaattctctttgataagaaacgagtgaactggattcaattttcctcacagcctgtgtaatacaccatcacttgcttcctcctacatgccattgattagccccagggagcagtgcagcactgcctgcccatgttttacataacccctgaatataaatgccagatgttgctgaaggaaacaggatctgcttagtgaaagaagtggcaagcaatggatcccaaatatcagcgtgtagagctaaatgatggtcacttcatgcccgtattgggatttggcacctatgcacctccagaggttccgaggaacagagctgtagaggtcaccaaattagcaatagaagctggcttccgccatattgattctgcttatttatacaataatgaggagcaggttggactggccatccgaagcaagattgcagatggcagtgtgaagagagaagacatattctacacttcaaagctttggtgcactttctttcaaccacagatggtccaaccagccttggaaagctcactgaaaaaacttcaactggactatgttgacctctatcttcttcatttcccaatggctctcaagccaggtgagacgccactaccaaaagatgagtcatggagaagtgtaaggatgcaggattggccaagtccatcggggtgtcaaacttcaactgcaggcagctggagatgatcctcaacaagccaggactcaagtacaagcctgtctgcaaccaggtagaatgtcatccttacctcaaccagagcaaactgctggatttctgcaagtcaaaagacattgttctggttgcccacagtgctctgggaacccaacgacataaactatgggtggacccaaactccccagttcttttggaggacccagttctttgtgccttagcaaagaaacacaaacgaaccccagccctgattgccctgcgctaccagctgcagcgtggggttgtggtcctggccaagagctacaatgagcagcggatcagagagaacatccaggtttttgaattccagttgacatcagaggatatgaaagttctagatggtctaaacagaaattatcgatatgttgtcatggattttcttatggaccatcctgattatccattttcagatgaatattagcatagagggtgttgcacgacatctagcagaaggccctgtgtgtggatggtgatgcagaggatgtctctatgctggtgactggacacacggcctctggttaaatccctcccctcctgcttggcaacttcagctagctagatatatccatggtccagaaagcaaacataataaatttttatcttgaagtaattgaatgtttttccttaaagattcttttcctactcctttctctgttacttgtgtgtttcttttccttctagttctttaaggccaaaaactgatttgcctataagtttggggcagagagcagatgataaccaatattttatagacatttttgaggtgagagtaggtggagttttcagcctctagaggagaagcaagtgacatatttgttagtctgtctttagctcttccagaaa

SEQ ID NO: 61086 - DNA, 364 bp, Homo sapiens
ggatcaaccaacaagtgcttcctcccaaaaccccattaaaattataaggagaaaatggtacaaattcccttattcaaaaggaataaaggatggtggctgaaaaaaaagtgtaaggaacagttgaacatgcactgtacagtcacgagaacaaaggactggacacaccttcatatgaaatggaagtttatcccctgcagaattttaatcagagctcaggggcattcagcaaatgagatgacaggaatgagctgctatacggaaatcagagattaaacccacatatatggtaagacctgcagcaccattctgcagctgaagacaaaagatgctggctggccgggggggggggggggggggggaattc

SEQ ID NO: 61087 - DNA, 316 bp, Homo sapiens
atgggcatgtgggtactacgtttaaatatttaattattttaaaaataaaataggaaagataaaatagcttaaagtgtattgatgctctgaataactttatgagtgaatagatactgaaatttgaagtcagtgttttgcacaacaaatcaagatttgggactggacttactgggttggggacttcttagggataacggtggtgctatgagcatgctggaaagatgagaagcaaaagcctggaattgggagtcctgtactgtctttagggtatgcaaagaggctccttctttctaggtgttcatcagtacaatatgac

SEQ ID NO: 61088 - DNA, 857 bp, Homo sapiens
tgatgttcaagttgattgttgttcagtatggcatatatgacaaaagtatatttgagtcaaatgtggctttctaaaatggatgcaacattagcgttgcaaacaaaatcagcactatatttcttaatgatctaaagattaatttgagagaacacagttttcttaaatattataatgtctagagtttttttaggacagtcttagcaagtatgattgttctagtcttacttgctctaatgtttaaaggtgcaattttatgccattattgaaattgatttttaaaatctatataccatatgattaacatgcattttcaatatgaggcagtgtttatgcagtatttaacagagcaatctgctgccaatagagtttggaggtggatatttagtttacagtgtataaacttaaaatatgcatccctttaacaacgctttgtgttagcatgctgcaaatcaaaatggcacttaatattaaaagctggtttagggaaattttatgaaaatcctgttcataaatgtaatgcatatgatatgtacttttaagttttagttgcttcatgtttacattcagctgttcaacataattaaaatgtaattttacttcatgctatattgtggctttgtgtttcaaataatgttcacctttctgtttttgcaccagataagaatcagttccttgagaataaattttttatctttcttaacttcagaatattaaatttggaatatctactaaaattgtgtgttatgtggctgtaaatgatgtacacgctgtaaaataagatcgctactgttatgtgggattattatttctaaatgttactcattgaaatgagcatacaataaaaagcatttattgca

SEQ ID NO: 61089 - DNA, 898 bp, Homo sapiens
tgatgttcaagttgattgttgttcagtatggcatatatgacaaaagtatatttgagtcaaatgtggctttctaaaatggatgcaacattagcgttgcaaacaaaatcagcactatatttcttaatgatctaaagattaatttgagagaacacagttttcttaaatattataatgtctagagtttttttaggacagtcttagcaagtatgattgttctagtcttacttgctctaatgtttaaaggtgcaattttatgccattattgaaattgatttttaaaatctatataccatatgattaacatgcattttcaatatgaggcagtgtttatgcagtatttaacagagcaatctgctgccaatagagtttggaggtggatatttagtttacagtgtataaacttaaaatatgcatccctttaacaacgctttgtgttagcatgctgcaaatcaaaatggcacttaatattaaaagctggtttagggaaattttatgaaaatcctgttcataaatgtaatgcatatgatatgtacttttaagttttagttgcttcatgtttacattcagctgttcaacataattaaaatgtaattttacttcatgctatattgtggctttgtgtttcaaataatgttcacctttctgtttttgcaccagataagaatcagttccttgagaataaattttttatctttcttaacttcagaatattaaatttggaatatctactaaaattgtgtgttatgtggctgtaaatgatgtacacgctgtaaaataagatcgctactgttatgtgggattattatttctaaatgttactcattgaaatgagcatacaataaaaagcatttattgcacttaatggttttataagtttatttaaagtttccatattttt

SEQ ID NO: 61090 - DNA, 501 bp, Homo sapiens
  misc_feature (439)..(439): n is a, c, g, or t
  misc_feature (468)..(468): n is a, c, g, or t
  misc_feature (478)..(478): n is a, c, g, or t
ttttgatggttgcattttgtctacactatcaaacacatcaccgttatatattgtcctggcacccctaccccatcattttgtcctagttctaaatatactcagtatttaccattatccctttgccaaaactggaacctgcctaatcatttcttagtattctgaagtttgttctccagtagatgccttcattaaaggctcatggcaacaatagttcctgaatcttttttgtttactttaacatctgggaatacagacgtgagccacctcgcctggcagagcgatcattttaaaactgaaatctggagggaacctcttccctgctgctgcctttgaatgaagtctaagctcagtagcacagaacccaagtctcgtggtcagggcctactctctcagatccttcccatgtgcaccattcaccaagctttggtttgtccttganccagctttgacaaatctccacaatgcttntttctttccntttactggttttttttgaaacag

SEQ ID NO: 61091 - DNA, 164 bp, Homo sapiens
attctgtacctgttctgaacctcggccataagggacttgcagcttcgatttgctaacctgaaattctgctgctgccatggaacaagcctgggctagcttgggggaggaggagagaccatgtggagtagagccaagctctggacatttgagagagcccggtaata

SEQ ID NO: 61092 - DNA, 1345 bp, Homo sapiens
tggtggtagtggaccttgtaaataggctatgtaagggggcaagtcttctctagctcaaatggcttcctaaataaataagcggtatcttcagaaggggccattcagtccttcccagccctgctcacctgcagattctctgtacaaataactccaggtagagcagttggactccaggtcaccttagtataagttagacaaagggtccgtgagggagtagccatcaattcctgaaattccaactttgtgactagcagatggggaggatgaaaaccatccctttgcttcctctccaatacggacccatcttactgtgtcctttcctctctggggccaatgtgagtaaacacagacacagagttctttcccccagctcttcctccctcacctgcatgctgagatagcttccatccatgcagttcccaaggatctggattagaagttcaaaggggaaccagcagtcacctactcccttaggtgaagcatctcacggctgagttctccctgaggcatactggtccagctgagcgtcctagagaaagctagcaaaagggaggcacatggatttcacagtatgaattggttcaacaactgtcttagggagaatcagaaagaagagatgcagcaggggaatgagcagaacaaagatttttctttctcccccttctctctggggtctacctaaccctgacctaaaataccagggcagcgatctcccagctggtgcaggtgggcttgccaagatggtcgtccaggagcccgccttcacttctaaatctgctggccacaagccctgctaaagatacacatctcaccccctccgccaagtctgaaatgcccctccccatctcaccttagactgaaaagttttaaatcatgtcaactggataatacttgctttatgtgagaatacttcagcagaatggatacgaattttcaaaacaatcttttcatatctatgtattctatattaaaagtgataaagtcatgtttctggggcgtattcaagtagctgacaagtaattatttaataatagtacatgagtgcattgtaatgattctcgccgtagtcaggtaatagtatccaaccgaaatttcctaccaacctgctgtatccaaagttttgtaaaaagttgtagaagttgttgatctttttgattttatattcaaaaagtctctttttataaatattatttattatacaatgtatatacctttgagttaactaagattatatattatataaatatatatatatttggagaaaatatatttcatcatgcagtttttttctgttaagtcattaaagagaaggtaaacaaacctaaaatggaaacattgtacactg

SEQ ID NO: 61093 - DNA, 486 bp, Homo sapiens
ctactactactaattaaccgccgctcgacagatatttctgtaactcattctcttggtgctcacgattgccatggccatagggccacagtgccgtatctgctgcagacatgattgtttcttgttctagaggttttcttgttttcgaatcttgcctgatgaatccagccagaccaaggggcctagatttgacctctgtcctgggctcctgggccaggtgcaggaacatctgaggccactctgctggccacctccagtgggtgctgaccacaggatgggctttgtttacactcattttcaccctgattcttgcccccactttcataaaagaaacttcaaaatgctgacgctttggagagtaagaaaatcaatcttggctgggcacggtggctcctgcctgtgatcctagcactttgggaggctgaagctgaaggatcacttgagctcaggagttggtctccaactcctgaggtcgacgcggccgcgaat

SEQ ID NO: 61094 - DNA, 7271 bp, Homo sapiens
tgcagcgctagaaaggaattgtctgaccccagcattgcttcctggctcctttcttcctttttcaggagagcatcctgccgaccacagccctccccactgtgagccttcctgacagcctcatcgcgccccctaccgccccatccctggctcacatggatgagcagggctgtgaacacacctcccggactgaggacccgtttatccagcccacggacttcggtccctcagagccgccactgagtgtcccgcagcccttcctccctgtcttcaccatgcccctgctgtctcccagccccgccccaccgcccatctcccccgtgttaccattagttcctcctcctgccactgccctgaaccccccggctccacccaccttccatcagccacagaagtttgctggagtcaacaaagcgccgtctgtcatcacccacacggcctctgccaccctcacccacgatgcccccgccaccacctttagccagagtcagggccttgtgatcaccacccatcaccctgccccgtcagcggccccttgtgggctggcactgtctcctgtcacccggcctccccagccacggttaacttttgtgcaccccaaacctgtatccttgactgggggcaggcctaagcagccccacaaaatagtgcctgctcccaaaccagagcccgtgtccttggtgttgaagaatgcccgtatcgccccagctgccttttcaggccaaccacaagcggtgatcatgacgtcagggcctctgaagagagaagggatgttggcctccaccgtgtcccagtccaacgtggtcattgcgcctgctgccatcgccagggctcctggggtcccggagttccacagcagcatcctggtgacagatctcggccatggcacgagcagcccgcctgcccccgtctcccggctcttcccaagcacagcgcaagaccccctggggaagggcgagcaggtcccgctgcatgggggcagcccccaggtcactgtcacagggcccagtcgggactgcccaaactcagggcaggcctctccgtgtgcatcggagcagagccccagtcctcaatctccccagaacaactgctcagggaaatccgaccccaaaaatgtggctgcactaaagaaccggcagatgaagcacatctcagctgagcagaaaaggcgcttcaacatcaagatgtgcttcgacatgctcaacagcctcatctccaacaattccaagctgaccagtcacgccatcacactgcagaagactgtggagtacatcaccaagctgcagcaggagagaggccagatgcaggaggaggcccggcggctgcgggaggagatcgaggagctcaatgccaccatcatctcctgccagcagctgctccctgccacgggagtccccgttacccggcgccagtttgatcacatgaaagacatgtttgacgaatacgtgaaaacccggaccttgcagaattggaagttctggattttcagcatcatcatcaagccgctgtttgagtcgttcaagggcatggtgtccaccagcagcctggaggagctgcaccggacggcgctctcctggctggaccagcactgctccctgcccatcctcaggccgatggtattgagcacgctgcggcagctgagcacctccacctccatcctcacagacccggcacagctgccagagcaggcgtccaaggctgtcaccaggattggcaagagattgggagagtcctagctgcttagctggcatgtggccgcatgagatgccaggagacccttccctgcccatggagagtaggctgcgccccccagcccttcctgacgctcagcctcggggcctctctccaactctgccggcccaccgtggcatcgggaggccatgctcaggtctgaagcaggtttggggcctgctgacagcaatagcccgcctttgggaaccccttgctgtgaactctctcactcagtgacctcagtcaccaacctcctctgccctcggggcagcccacacaaaagggaagtgctggccgtgctggtcctgccctgctggtggcctgccgggcctggcgccggtgagcggaatcgatgggatgagggtgacagggcctgctcctgtcctgaggcccagccttgtccctcctgccacgtcctgtccacatgcatgcctctgcctgatgccctgctccactctctggtctgcccgtggggcagttggaaggcgtctttctttctcccctcaactctgacagcacccagcccttgtggatggacttgggcttctattcaggcttatgcatggcaggctgccagggggaagtgccttcttcagaggtcctccaggacacatgtgtgcagaaacggtggatgtggaacacacaggaccagaatggaagcgtgtgatgcacggtggctgctctggctgagaggccctgctgggcatgtttcatctgtccccttttagctccacctgacattgcaggatccatggggactcagcccagggccttctcggatgtcacctcaccgctgtggcccttctgccgttcttctccacttggctccagctgcagctgttgacagatcaagcatgtcctgtgggagcttagaaccctgaagttctagtgtctgaaagatcagactccacgtcctgctgtcagccttgtcatcttgtctgatgtctttcagctgggagccccaaaccaggacagttctcggaccaaagatgcccccacactcaaaagtctgtcccgtcttgtgtttggagaaggaaacaatgttggcaggcagcactctgtggtggtcagccctcagagctgtttctaggcatctctcagatcagacagcaaagaatctacccagatctgggctgggtggaggtgtggctgggctgggggccattctgagcctgcagtgagagtttggcccagcctcagtccttgctcttctctggctacctctgcagggagctgcaggggcaagcactctctccagcactcaggaagcccggccgagggtacctcctcgtggaaagaatgcactttaaagctctgctgaggagttcggagcccaggctttcaggcgacctctgccctccctgcctctcctcaccctccctctcttcctgcagggcctgggaagggctttgagggagcctgggagccatgtgaagaggggcacgcctgggctgtcccacagtttagatccagttggaggttctccctggctcctgcaggcctgcggggatctctccccacttcaggcctccggccagctgcctgccctcttgtctgtgcttcagccctgcacaaaagcagcttggtgacaccactcagccacccagagtacgtgtttacaggctttccagatcaccttcctgtggggtgaacgtaatgaggcggggctggtccttggaatttcccctggaaaatggtaacagactccatccttgacccggggatgagcatgaaggcattgtcccaaaggcagaggccaccgtggtaggaattccaccaaggccagaagggaaaaaggaagaacccaccgtgtctggctgtgcgggccctggggagggtcgtgagtgcagcccctctctacttctgtgcctttgtaaaacgtgtagataaccgcagtggttggctgagccaagaactctcctaaatcagtggctttctccccaccccttgctggggagtcatttttaaaaaaatctgtgggatataaaattggcctcctgctgcttcagcctacctctccctctgctgacttaatgtcgtgattctgtttcttcagatatttaaggctgttaggttgtgtgagccttgaagtgtgtgtgtgtgtcccagcgactgtccactgtccaggagatgcatgtctttgtattggagatatttctgtaactcattctcttggtgctcacgattgccatggccatagggccacagtgccgtatctgctgcagacatgattgtttcttgttctagaggttttcttgttttcgaatcttgcctgatgaatccagccagaccaaggggcctagatttgacctctgtcctgggctcctgggccaggtgcaggaacatctgaggccactctgctggccacctccagtgggtgctgaccacaggatgggctttgtttacactcattttcaccctgattcttgcccccactttcataaaagaaacttcaaaatgctgacgctttggagagtaagaaaatcaatcttggctgggcacggtggctcctgcctgtgatcctagcactttgggaggctgaagctgaaggatcacttgagctcaggagttggagaccaaccctggcaacataacaagaccctgtctctacaaaaaaaaaaaagaaaaaaaaaatttagccgtgtgtagcagtgagtcgcctgtaatcccagctactcgggaggctgagtcaggagaatcacttgagcctagaagttgcagtgagctatgatcatgccacactgtactccagcctggatgacagagtgaaaccctgcctctaaataaaagaaaatagaggcagactgtggtggctcacgcctgtaatcccagcactttggtaggccaaggcgggtggatcacctgcagtcaggagttcacaaccagcctgaccaacatggtgaaaccctgtctatactaaaaatacaaaacattagccacgtgtggtggtacacgcctgtaatcccagctactcgggaggctgagtcaggagaatcacttgaacctgggaggcggaggttgcagtgagctgagattgtaccactgcactccagcctgggtgacagagcaaaaccctatctcaaaaaaaaaaagaagaaaaaaatagaaaatccaaaaagaaaaaccagaaggcctgctggcgtataaatccctgggcgggtttctgataaattgccctgtgctgtcagcccctgcactgcactgctgccttccatggtgggtgggagaccccagagcggggcaggcgccactgagggcttttcttggagtcggccagcaggccacgcagcatccggcaccctgggcgggctggctagctgccttcttaggacatctctactttgaaggattttaccgcaggaagcaatagcagcgctggccattggtgctgatgacagcattgggtctggttgaggggaaggggctggaaagcagcagacccccccagtgctgcgcatggtcccggagctgtcagccaggggagtggggtcagccgtcagccagccctcccgtttcccgcccatgggccctgaccacactcccttttctagaagtcaatcctaaggtttctctgctctggctaagaggatgtaaatttggattcttagagggcatggcacccccagtccctgcccagataaagtagcacagtggcatgcagcacctctgtctgttgctgacgttggggggcttacacacccacctcatctccgtgcacagccatgactggccctgccggcagctggggtgcaggtaagggtctctctcatagaggggagctgcagctgagaactggcgaggccccttcctccaaggccctagctggcccccgggtgaacctgaggtggcaggttcaggttttcaagatggtgaggtctcgctgtctgctggacagtacgttaggctctcagaactcatgggtgtggagctgggcctgtcccgggccagtggacccctgtgtgtgggggatttggggtgctgtgggcctggttatgcactggcagatggaccttgctttggtccagctcttttccttaccctggctctgacgtgggaaggcttggagggcccgtctcatcacccccgttcgccctcagctgtccctttcccttgtcgcctggccgctgcctcgcccgcctgaggcctcctagcaggcagcctgggtgtgagttgagcctctctcttttccctctggtgggaaagtggcctttccctcaacacctgctccccggccccagaggaacccacctgttttggagctcagcttggcccagcgtttccttggggaagggaaaggagggctggacagcactgatccgggcaggcagcgtgtgcagcagtggccagccagagtgccaaagatgcacggggatgtggtgtgtggctccgggccctcgacatctctgctttgggggatttttaccttgtctgcacacttgtcaggggagaggggacagcaaggtgggaggttgaagagctttgaggctcagcagcatgtttgtggcattcggtggacaccatggccttgggcggctggacaggtttttgtgatgtgaaggacatgcatggggcacatggtaagcttggcaagggctccaggaacgctgacgaagggttttaggacccccacccccatgcctgtaccagggctggcctccagagcgggtgaggacagagcagctgtgggcttttcattctgaggtcttggcccccctggccaccgcaagggactctttgcttgtcagggcttgcaaaaaccaaccttcgagaaagaaaagggaactcttcacgttgaatgttgactttgtgtgtatgcgtgtgtgtgtgtgtgtgcacgcgcgcgtgtgcgtgtttacttcatggaattttgttttgtgaaattcccctccaatcgtgtcagaatttacctccatgccccagtcacactgttggttctgcgctctgaacctgggtgtagctcatttgaaggactctcttctgcgtttcctaacagttatttggtggtctcaagagttgaggttgtggagggttgggagaaactgaagttctatacatttccatagagtttacatcctgcagttaaaaggcagggagggctcagcccgggccccacagctccaggccatcccctacgggctgcccacagtgcccccttttctctagccgaatctttttcgaacagcccgggaaaggaaaacggattcacttgctgattttgttcacggcggaagcaccatgttccgttcctttttcaggttcagtttgttgtgtaaatggcggttttttctggtgtgagctttggtgatggtggcagggctcctttgaagagatggttccacctcgtggtctgaagaacaaaccagagaagagtctggtttggccagaggccccctccggtccacgtcaccctgagtacacccctctgattgctctgctgtcaagaagcacgtttccaccagctgtattcaacactacaatgcattttttaaactatatttgcatccaagacaataaagacgatcggccggactctcacaccatcc

SEQ ID NO: 61095 - DNA, 7719 bp, Homo sapiens
tgcagcgctagaaaggaattgtctgaccccagcattgcttcctggctcctttcttcctttttcaggagagcatcctgccgaccacagccctccccactgtgagccttcctgacagcctcatcgcgccccctaccgccccatccctggctcacatggatgagcagggctgtgaacacacctcccggactgaggacccgtttatccagcccacggacttcggtccctcagagccgccactgagtgtcccgcagcccttcctccctgtcttcaccatgcccctgctgtctcccagccccgccccaccgcccatctcccccgtgttaccattagttcctcctcctgccactgccctgaaccccccggctccacccaccttccatcagccacagaagtttgctggagtcaacaaagcgccgtctgtcatcacccacacggcctctgccaccctcacccacgatgcccccgccaccacctttagccagagtcagggccttgtgatcaccacccatcaccctgccccgtcagcggccccttgtgggctggcactgtctcctgtcacccggcctccccagccacggttaacttttgtgcaccccaaacctgtatccttgactgggggcaggcctaagcagccccacaaaatagtgcctgctcccaaaccagagcccgtgtccttggtgttgaagaatgcccgtatcgccccagctgccttttcaggccaaccacaagcggtgatcatgacgtcagggcctctgaagagagaagggatgttggcctccaccgtgtcccagtccaacgtggtcattgcgcctgctgccatcgccagggctcctggggtcccggagttccacagcagcatcctggtgacagatctcggccatggcacgagcagcccgcctgcccccgtctcccggctcttcccaagcacagcgcaagaccccctggggaagggcgagcaggtcccgctgcatgggggcagcccccaggtcactgtcacagggcccagtcgggactgcccaaactcagggcaggcctctccgtgtgcatcggagcagagccccagtcctcaatctccccagaacaactgctcagggaaatccgaccccaaaaatgtggctgcactaaagaaccggcagatgaagcacatctcagctgagcagaaaaggcgcttcaacatcaagatgtgcttcgacatgctcaacagcctcatctccaacaattccaagctgaccagtcacgccatcacactgcagaagactgtggagtacatcaccaagctgcagcaggagagaggccagatgcaggaggaggcccggcggctgcgggaggagatcgaggagctcaatgccaccatcatctcctgccagcagctgctccctgccacgggagtccccgttacccggcgccagtttgatcacatgaaagacatgtttgacgaatacgtgaaaacccggaccttgcagaattggaagttctggattttcagcatcatcatcaagccgctgtttgagtcgttcaagggcatggtgtccaccagcagcctggaggagctgcaccggacggcgctctcctggctggaccagcactgctccctgcccatcctcaggccgatggtattgagcacgctgcggcagctgagcacctccacctccatcctcacagacccggcacagctgccagagcaggcgtccaaggctgtcaccaggattggcaagagattgggagagtcctagctgcttagctggcatgtggccgcatgagatgccaggagacccttccctgcccatggagagtaggctgcgccccccagcccttcctgacgctcagcctcggggcctctctccaactctgccggcccaccgtggcatcgggaggccatgctcaggtctgaagcaggtttggggcctgctgacagcaatagcccgcctttgggaaccccttgctgtgaactctctcactcagtgacctcagtcaccaacctcctctgccctcggggcagcccacacaaaagggaagtgctggccgtgctggtcctgccctgctggtggcctgccgggcctggcgccggtgagcggaatcgatgggatgagggtgacagggcctgctcctgtcctgaggcccagccttgtccctcctgccacgtcctgtccacatgcatgcctctgcctgatgccctgctccactctctggtctgcccgtggggcagttggaaggcgtctttctttctcccctcaactctgacagcacccagcccttgtggatggacttgggcttctattcaggcttatgcatggcaggctgccagggggaagtgccttcttcagaggtcctccaggacacatgtgtgcagaaacggtggatgtggaacacacaggaccagaatggaagcgtgtgatgcacggtggctgctctggctgagaggccctgctgggcatgtttcatctgtccccttttagctccacctgacattgcaggatccatggggactcagcccagggccttctcggatgtcacctcaccgctgtggcccttctgccgttcttctccacttggctccagctgcagctgttgacagatcaagcatgtcctgtgggagcttagaaccctgaagttctagtgtctgaaagatcagactccacgtcctgctgtcagccttgtcatcttgtctgatgtctttcagctgggagccccaaaccaggacagttctcggaccaaagatgcccccacactcaaaagtctgtcccgtcttgtgtttggagaaggaaacaatgttggcaggcagcactctgtggtggtcagccctcagagctgtttctaggcatctctcagatcagacagcaaagaatctacccagatctgggctgggtggaggtgtggctgggctgggggccattctgagcctgcagtgagagtttggcccagcctcagtccttgctcttctctggctacctctgcagggagctgcaggggcaagcactctctccagcactcaggaagcccggccgagggtacctcctcgtggaaagaatgcactttaaagctctgctgaggagttcggagcccaggctttcaggcgacctctgccctccctgcctctcctcaccctccctctcttcctgcagggcctgggaagggctttgagggagcctgggagccatgtgaagaggggcacgcctgggctgtcccacagtttagatccagttggaggttctccctggctcctgcaggcctgcggggatctctccccacttcaggcctccggccagctgcctgccctcttgtctgtgcttcagccctgcacaaaagcagcttggtgacaccactcagccacccagagtacgtgtttacaggctttccagatcaccttcctgtggggtgaacgtaatgaggcggggctggtccttggaatttcccctggaaaatggtaacagactccatccttgacccggggatgagcatgaaggcattgtcccaaaggcagaggccaccgtggtaggaattccaccaaggccagaagggaaaaaggaagaacccaccgtgtctggctgtgcgggccctggggagggtcgtgagtgcagcccctctctacttctgtgcctttgtaaaacgtgtagataaccgcagtggttggctgagccaagaactctcctaaatcagtggctttctccccaccccttgctggggagtcatttttaaaaaaatctgtgggatataaaattggcctcctgctgcttcagcctacctctccctctgctgacttaatgtcgtgattctgtttcttcagatatttaaggctgttaggttgtgtgagccttgaagtgtgtgtgtgtgtcccagcgactgtccactgtccaggagatgcatgtctttgtattggagatatttctgtaactcattctcttggtgctcacgattgccatggccatagggccacagtgccgtatctgctgcagacatgattgtttcttgttctagaggttttcttgttttcgaatcttgcctgatgaatccagccagaccaaggggcctagatttgacctctgtcctgggctcctgggccaggtgcaggaacatctgaggccactctgctggccacctccagtgggtgctgaccacaggatgggctttgtttacactcattttcaccctgattcttgcccccactttcataaaagaaacttcaaaatgctgacgctttggagagtaagaaaatcaatcttggctgggcacggtggctcctgcctgtgatcctagcactttgggaggctgaagctgaaggatcacttgagctcaggagttggagaccaaccctggcaacataacaagaccctgtctctacaaaaaaaaaaaagaaaaaaaaaatttagccgtgtgtagcagtgagtcgcctgtaatcccagctactcgggaggctgagtcaggagaatcacttgagcctagaagttgcagtgagctatgatcatgccacactgtactccagcctggatgacagagtgaaaccctgcctctaaataaaagaaaatagaggcagactgtggtggctcacgcctgtaatcccagcactttggtaggccaaggcgggtggatcacctgcagtcaggagttcacaaccagcctgaccaacatggtgaaaccctgtctatactaaaaatacaaaacattagccacgtgtggtggtacacgcctgtaatcccagctactcgggaggctgagtcaggagaatcacttgaacctgggaggcggaggttgcagtgagctgagattgtaccactgcactccagcctgggtgacagagcaaaaccctatctcaaaaaaaaaaagaagaaaaaaatagaaaatccaaaaagaaaaaccagaaggcctgctggcgtataaatccctgggcgggtttctgataaattgccctgtgctgtcagcccctgcactgcactgctgccttccatggtgggtgggagaccccagagcggggcaggcgccactgagggcttttcttggagtcggccagcaggccacgcagcatccggcaccctgggcgggctggctagctgccttcttaggacatctctactttgaaggattttaccgcaggaagcaatagcagcgctggccattggtgctgatgacagcattgggtctggttgaggggaaggggctggaaagcagcagacccccccagtgctgcgcatggtcccggagctgtcagccaggggagtggggtcagccgtcagccagccctcccgtttcccgcccatgggccctgaccacactcccttttctagaagtcaatcctaaggtttctctgctctggctaagaggatgtaaatttggattcttagagggcatggcacccccagtccctgcccagataaagtagcacagtggcatgcagcacctctgtctgttgctgacgttggggggcttacacacccacctcatctccgtgcacagccatgactggccctgccggcagctggggtgcaggtaagggtctctctcatagaggggagctgcagctgagaactggcgaggccccttcctccaaggccctagctggcccccgggtgaacctgaggtggcaggttcaggttttcaagatggtgaggtctcgctgtctgctggacagtacgttaggctctcagaactcatgggtgtggagctgggcctgtcccgggccagtggacccctgtgtgtgggggatttggggtgctgtgggcctggttatgcactggcagatggaccttgctttggtccagctcttttccttaccctggctctgacgtgggaaggcttggagggcccgtctcatcacccccgttcgccctcagctgtccctttcccttgtcgcctggccgctgcctcgcccgcctgaggcctcctagcaggcagcctgggtgtgagttgagcctctctcttttccctctggtgggaaagtggcctttccctcaacacctgctccccggccccagaggaacccacctgttttggagctcagcttggcccagcgtttccttggggaagggaaaggagggctggacagcactgatccgggcaggcagcgtgtgcagcagtggccagccagagtgccaaagatgcacggggatgtggtgtgtggctccgggccctcgacatctctgctttgggggatttttaccttgtctgcacacttgtcaggggagaggggacagcaaggtgggaggttgaagagctttgaggctcagcagcatgtttgtggcattcggtggacaccatggccttgggcggctggacaggtttttgtgatgtgaaggacatgcatggggcacatggtaagcttggcaagggctccaggaacgctgacgaagggttttaggacccccacccccatgcctgtaccagggctggcctccagagcgggtgaggacagagcagctgtgggcttttcattctgaggtcttggcccccctggccaccgcaagggactctttgcttgtcagggcttgcaaaaaccaaccttcgagaaagaaaagggaactcttcacgttgaatgttgactttgtgtgtatgcgtgtgtgtgtgtgtgtgcacgcgcgcgtgtgcgtgtttacttcatggaattttgttttgtgaaattcccctccaatcgtgtcagaatttacctccatgccccagtcacactgttggttctgcgctctgaacctgggtgtagctcatttgaaggactctcttctgcgtttcctaacagttatttggtggtctcaagagttgaggttgtggagggttgggagaaactgaagttctatacatttccatagagtttacatcctgcagttaaaaggcagggagggctcagcccgggccccacagctccaggccatcccctacgggctgcccacagtgcccccttttctctagccgaatctttttcgaacagcccgggaaaggttttcaggttcagtttgttgtgtaaatggcggttttttctggtgtgagctttggtgatggtggcagggctcctttgaagagatggttccacctcgtggtctgaagaacaaaccagagaagagtctggtttggccagaggccccctccggtccacgtcaccctgagtacacccctctgattgctctgctgtcaagaagcacgtttccaccagctgtattcaacactacaatgcattttttaaactatatttgcatccaagacaataaagacaccttattttttttgaaaagccaaaaaaaaaaaaaaaaaaaaaaaaaacctttgcgggccccctcgggcccccaaagaagccccttcccacagccaacacaatcccgatgggggcagcgcgcggcgcccccacaataaggggatacgtcgcgacaacatggttggcacatcaaggctggtgttcccccaagagaggaaaaaccccggggcacacggatgaacaacagagcgccgggaggtaaacttaaccacccacaatataaagaaaaacggcccggggggaacaccggggagcggctcctggcacaacaaacccccagaaggtggatctctccaaagcaccaccaaacggggacctcatcacaaccagcggctcccaaggcagagaccgcgactacgacaaataagcgcccgcgacccgtggtcacacacaagagagcgacaggaaagacgcggcacgactacacccgaaagacgcacacggccgcaccgcgagcacaccacgctgcccaaacacacacacacgac

SEQ ID NO: 61096 - DNA, 7031 bp, Homo sapiens
tgcagcgctagaaaggaattgtctgaccccagcattgcttcctggctcctttcttcctttttcaggagagcatcctgccgaccacagccctccccactgtgagccttcctgacagcctcatcgcgccccctaccgccccatccctggctcacatggatgagcagggctgtgaacacacctcccggactgaggacccgtttatccagcccacggacttcggtccctcagagccgccactgagtgtcccgcagcccttcctccctgtcttcaccatgcccctgctgtctcccagccccgccccaccgcccatctcccccgtgttaccattagttcctcctcctgccactgccctgaaccccccggctccacccaccttccatcagccacagaagtttgctggagtcaacaaagcgccgtctgtcatcacccacacggcctctgccaccctcacccacgatgcccccgccaccacctttagccagagtcagggccttgtgatcaccacccatcaccctgccccgtcagcggccccttgtgggctggcactgtctcctgtcacccggcctccccagccacggttaacttttgtgcaccccaaacctgtatccttgactgggggcaggcctaagcagccccacaaaatagtgcctgctcccaaaccagagcccgtgtccttggtgttgaagaatgcccgtatcgccccagctgccttttcaggccaaccacaagcggtgatcatgacgtcagggcctctgaagagagaagggatgttggcctccaccgtgtcccagtccaacgtggtcattgcgcctgctgccatcgccagggctcctggggtcccggagttccacagcagcatcctggtgacagatctcggccatggcacgagcagcccgcctgcccccgtctcccggctcttcccaagcacagcgcaagaccccctggggaagggcgagcaggtcccgctgcatgggggcagcccccaggtcactgtcacagggcccagtcgggactgcccaaactcagggcaggcctctccgtgtgcatcggagcagagccccagtcctcaatctccccagaacaactgctcagggaaatccgaccccaaaaatgtggctgcactaaagaaccggcagatgaagcacatctcagctgagcagaaaaggcgcttcaacatcaagatgtgcttcgacatgctcaacagcctcatctccaacaattccaagctgaccagtcacgccatcacactgcagaagactgtggagtacatcaccaagctgcagcaggagagaggccagatgcaggaggaggcccggcggctgcgggaggagatcgaggagctcaatgccaccatcatctcctgccagcagctgctccctgccacgggagtccccgttacccggcgccagtttgatcacatgaaagacatgtttgacgaatacgtgaaaacccggaccttgcagaattggaagttctggattttcagcatcatcatcaagccgctgtttgagtcgttcaagggcatggtgtccaccagcagcctggaggagctgcaccggacggcgctctcctggctggaccagcactgctccctgcccatcctcaggccgatggtattgagcacgctgcggcagctgagcacctccacctccatcctcacagacccggcacagctgccagagcaggcgtccaaggctgtcaccaggattggcaagagattgggagagtcctagctgcttagctggcatgtggccgcatgagatgccaggagacccttccctgcccatggagagtaggctgcgccccccagcccttcctgacgctcagcctcggggcctctctccaactctgccggcccaccgtggcatcgggaggccatgctcaggtctgaagcaggtttggggcctgctgacagcaatagcccgcctttgggaaccccttgctgtgaactctctcactcagtgacctcagtcaccaacctcctctgccctcggggcagcccacacaaaagggaagtgctggccgtgctggtcctgccctgctggtggcctgccgggcctggcgccggtgagcggaatcgatgggatgagggtgacagggcctgctcctgtcctgaggcccagccttgtccctcctgccacgtcctgtccacatgcatgcctctgcctgatgccctgctccactctctggtctgcccgtggggcagttggaaggcgtctttctttctcccctcaactctgacagcacccagcccttgtggatggacttgggcttctattcaggcttatgcatggcaggctgccagggggaagtgccttcttcagaggtcctccaggacacatgtgtgcagaaacggtggatgtggaacacacaggaccagaatggaagcgtgtgatgcacggtggctgctctggctgagaggccctgctgggcatgtttcatctgtccccttttagctccacctgacattgcaggatccatggggactcagcccagggccttctcggatgtcacctcaccgctgtggcccttctgccgttcttctccacttggctccagctgcagctgttgacagatcaagcatgtcctgtgggagcttagaaccctgaagttctagtgtctgaaagatcagactccacgtcctgctgtcagccttgtcatcttgtctgatgtctttcagctgggagccccaaaccaggacagttctcggaccaaagatgcccccacactcaaaagtctgtcccgtcttgtgtttggagaaggaaacaatgttggcaggcagcactctgtggtggtcagccctcagagctgtttctaggcatctctcagatcagacagcaaagaatctacccagatctgggctgggtggaggtgtggctgggctgggggccattctgagcctgcagtgagagtttggcccagcctcagtccttgctcttctctggctacctctgcagggagctgcaggggcaagcactctctccagcactcaggaagcccggccgagggtacctcctcgtggaaagaatgcactttaaagctctgctgaggagttcggagcccaggctttcaggcgacctctgccctccctgcctctcctcaccctccctctcttcctgcagggcctgggaagggctttgagggagcctgggagccatgtgaagaggggcacgcctgggctgtcccacagtttagatccagttggaggttctccctggctcctgcaggcctgcggggatctctccccacttcaggcctccggccagctgcctgccctcttgtctgtgcttcagccctgcacaaaagcagcttggtgacaccactcagccacccagagtacgtgtttacaggctttccagatcaccttcctgtggggtgaacgtaatgaggcggggctggtccttggaatttcccctggaaaatggtaacagactccatccttgacccggggatgagcatgaaggcattgtcccaaaggcagaggccaccgtggtaggaattccaccaaggccagaagggaaaaaggaagaacccaccgtgtctggctgtgcgggccctggggagggtcgtgagtgcagcccctctctacttctgtgcctttgtaaaacgtgtagataaccgcagtggttggctgagccaagaactctcctaaatcagtggctttctccccaccccttgctggggagtcatttttaaaaaaatctgtgggatataaaattggcctcctgctgcttcagcctacctctccctctgctgacttaatgtcgtgattctgtttcttcagatatttaaggctgttaggttgtgtgagccttgaagtgtgtgtgtgtgtcccagcgactgtccactgtccaggagatgcatgtctttgtattggagatatttctgtaactcattctcttggtgctcacgattgccatggccatagggccacagtgccgtatctgctgcagacatgattgtttcttgttctagaggttttcttgttttcgaatcttgcctgatgaatccagccagaccaaggggcctagatttgacctctgtcctgggctcctgggccaggtgcaggaacatctgaggccactctgctggccacctccagtgggtgctgaccacaggatgggctttgtttacactcattttcaccctgattcttgcccccactttcataaaagaaacttcaaaatgctgacgctttggagagtaagaaaatcaatcttggctgggcacggtggctcctgcctgtgatcctagcactttgggaggctgaagctgaaggatcacttgagctcaggagttggagaccaaccctggcaacataacaagaccctgtctctacaaaaaaaaaaaagaaaaaaaaaatttagccgtgtgtagcagtgagtcgcctgtaatcccagctactcgggaggctgagtcaggagaatcacttgagcctagaagttgcagtgagctatgatcatgccacactgtactccagcctggatgacagagtgaaaccctgcctctaaataaaagaaaatagaggcagactgtggtggctcacgcctgtaatcccagcactttggtaggccaaggcgggtggatcacctgcagtcaggagttcacaaccagcctgaccaacatggtgaaaccctgtctatactaaaaatacaaaacattagccacgtgtggtggtacacgcctgtaatcccagctactcgggaggctgagtcaggagaatcacttgaacctgggaggcggaggttgcagtgagctgagattgtaccactgcactccagcctgggtgacagagcaaaaccctatctcaaaaaaaaaaagaagaaaaaaatagaaaatccaaaaagaaaaaccagaaggcctgctggcgtataaatccctgggcgggtttctgataaattgccctgtgctgtcagcccctgcactgcactgctgccttccatggtgggtgggagaccccagagcggggcaggcgccactgagggcttttcttggagtcggccagcaggccacgcagcatccggcaccctgggcgggctggctagctgccttcttaggacatctctactttgaaggattttaccgcaggaagcaatagcagcgctggccattggtgctgatgacagcattgggtctggttgaggggaaggggctggaaagcagcagacccccccagtgctgcgcatggtcccggagctgtcagccaggggagtggggtcagccgtcagccagccctcccgtttcccgcccatgggccctgaccacactcccttttctagaagtcaatcctaaggtttctctgctctggctaagaggatgtaaatttggattcttagagggcatggcacccccagtccctgcccagataaagtagcacagtggcatgcagcacctctgtctgttgctgacgttggggggcttacacacccacctcatctccgtgcacagccatgactggccctgccggcagctggggtgcaggtaagggtctctctcatagaggggagctgcagctgagaactggcgaggccccttcctccaaggccctagctggcccccgggtgaacctgaggtggcaggttcaggttttcaagatggtgaggtctcgctgtctgctggacagtacgttaggctctcagaactcatgggtgtggagctgggcctgtcccgggccagtggacccctgtgtgtgggggatttggggtgctgtgggcctggttatgcactggcagatggaccttgctttggtccagctcttttccttaccctggctctgacgtgggaaggcttggagggcccgtctcatcacccccgttcgccctcagctgtccctttcccttgtcgcctggccgctgcctcgcccgcctgaggcctcctagcaggcagcctgggtgtgagttgagcctctctcttttccctctggtgggaaagtggcctttccctcaacacctgctccccggccccagaggaacccacctgttttggagctcagcttggcccagcgtttccttggggaagggaaaggagggctggacagcactgatccgggcaggcagcgtgtgcagcagtggccagccagagtgccaaagatgcacggggatgtggtgtgtggctccgggccctcgacatctctgctttgggggatttttaccttgtctgcacacttgtcaggggagaggggacagcaaggtgggaggttgaagagctttgaggctcagcagcatgtttgtggcattcggtggacaccatggccttgggcggctggacaggtttttgtgatgtgaaggacatgcatggggcacatggtaagcttggcaagggctccaggaacgctgacgaagggttttaggacccccacccccatgcctgtaccagggctggcctccagagcgggtgaggacagagcagctgtgggcttttcattctgaggtcttggcccccctggccaccgcaagggactctttgcttgtcagggcttgcaaaaaccaaccttcgagaaagaaaagggaactcttcacgttgaatgttgactttgtgtgtatgcgtgtgtgtgtgtgtgtgcacgcgcgcgtgtgcgtgtttacttcatggaattttgttttgtgaaattcccctccaatcgtgtcagaatttacctccatgccccagtcacactgttggttctgcgctctgaacctgggtgtagctcatttgaaggactctcttctgcgtttcctaacagttatttggtggtctcaagagttgaggttgtggagggttgggagaaactgaagttctatacatttccatagagtttacatcctgcagttaaaaggcagggagggctcagcccgggccccacagctccaggccatcccctacgggctgcccacagtgcccccttttctctagccgaatctttttcgaacagcccgggaaaggaaaacggattcacttgctgattttgttcacggcggaagcaccatgttccgttcctgcacgaattcccttagcaccagcacgaattcccttagcaccacacgaattccctt

SEQ ID NO: 61097 - DNA, 6810 bp, Homo sapiens
tgcagcgctagaaaggaattgtctgaccccagcattgcttcctggctcctttcttcctttttcaggagagcatcctgccgaccacagccctccccactgtgagccttcctgacagcctcatcgcgccccctaccgccccatccctggctcacatggatgagcagggctgtgaacacacctcccggactgaggacccgtttatccagcccacggacttcggtccctcagagccgccactgagtgtcccgcagcccttcctccctgtcttcaccatgcccctgctgtctcccagccccgccccaccgcccatctcccccgtgttaccattagttcctcctcctgccactgccctgaaccccccggctccacccaccttccatcagccacagaagtttgctggagtcaacaaagcgccgtctgtcatcacccacacggcctctgccaccctcacccacgatgcccccgccaccacctttagccagagtcagggccttgtgatcaccacccatcaccctgccccgtcagcggccccttgtgggctggcactgtctcctgtcacccggcctccccagccacggttaacttttgtgcaccccaaacctgtatccttgactgggggcaggcctaagcagccccacaaaatagtgcctgctcccaaaccagagcccgtgtccttggtgttgaagaatgcccgtatcgccccagctgccttttcaggccaaccacaagcggtgatcatgacgtcagggcctctgaagagagaagggatgttggcctccaccgtgtcccagtccaacgtggtcattgcgcctgctgccatcgccagggctcctggggtcccggagttccacagcagcatcctggtgacagatctcggccatggcacgagcagcccgcctgcccccgtctcccggctcttcccaagcacagcgcaagaccccctggggaagggcgagcaggtcccgctgcatgggggcagcccccaggtcactgtcacagggcccagtcgggactgcccaaactcagggcaggcctctccgtgtgcatcggagcagagccccagtcctcaatctccccagaacaactgctcagggaaatccgaccccaaaaatgtggctgcactaaagaaccggcagatgaagcacatctcagctgagcagaaaaggcgcttcaacatcaagatgtgcttcgacatgctcaacagcctcatctccaacaattccaagctgaccagtcacgccatcacactgcagaagactgtggagtacatcaccaagctgcagcaggagagaggccagatgcaggaggaggcccggcggctgcgggaggagatcgaggagctcaatgccaccatcatctcctgccagcagctgctccctgccacgggagtccccgttacccggcgccagtttgatcacatgaaagacatgtttgacgaatacgtgaaaacccggaccttgcagaattggaagttctggattttcagcatcatcatcaagccgctgtttgagtcgttcaagggcatggtgtccaccagcagcctggaggagctgcaccggacggcgctctcctggctggaccagcactgctccctgcccatcctcaggccgatggtattgagcacgctgcggcagctgagcacctccacctccatcctcacagacccggcacagctgccagagcaggcgtccaaggctgtcaccaggattggcaagagattgggagagtcctagctgcttagctggcatgtggccgcatgagatgccaggagacccttccctgcccatggagagtaggctgcgccccccagcccttcctgacgctcagcctcggggcctctctccaactctgccggcccaccgtggcatcgggaggccatgctcaggtctgaagcaggtttggggcctgctgacagcaatagcccgcctttgggaaccccttgctgtgaactctctcactcagtgacctcagtcaccaacctcctctgccctcggggcagcccacacaaaagggaagtgctggccgtgctggtcctgccctgctggtggcctgccgggcctggcgccggtgagcggaatcgatgggatgagggtgacagggcctgctcctgtcctgaggcccagccttgtccctcctgccacgtcctgtccacatgcatgcctctgcctgatgccctgctccactctctggtctgcccgtggggcagttggaaggcgtctttctttctcccctcaactctgacagcacccagcccttgtggatggacttgggcttctattcaggcttatgcatggcaggctgccagggggaagtgccttcttcagaggtcctccaggacacatgtgtgcagaaacggtggatgtggaacacacaggaccagaatggaagcgtgtgatgcacggtggctgctctggctgagaggccctgctgggcatgtttcatctgtccccttttagctccacctgacattgcaggatccatggggactcagcccagggccttctcggatgtcacctcaccgctgtggcccttctgccgttcttctccacttggctccagctgcagctgttgacagatcaagcatgtcctgtgggagcttagaaccctgaagttctagtgtctgaaagatcagactccacgtcctgctgtcagccttgtcatcttgtctgatgtctttcagctgggagccccaaaccaggacagttctcggaccaaagatgcccccacactcaaaagtctgtcccgtcttgtgtttggagaaggaaacaatgttggcaggcagcactctgtggtggtcagccctcagagctgtttctaggcatctctcagatcagacagcaaagaatctacccagatctgggctgggtggaggtgtggctgggctgggggccattctgagcctgcagtgagagtttggcccagcctcagtccttgctcttctctggctacctctgcagggagctgcaggggcaagcactctctccagcactcaggaagcccggccgagggtacctcctcgtggaaagaatgcactttaaagctctgctgaggagttcggagcccaggctttcaggcgacctctgccctccctgcctctcctcaccctccctctcttcctgcagggcctgggaagggctttgagggagcctgggagccatgtgaagaggggcacgcctgggctgtcccacagtttagatccagttggaggttctccctggctcctgcaggcctgcggggatctctccccacttcaggcctccggccagctgcctgccctcttgtctgtgcttcagccctgcacaaaagcagcttggtgacaccactcagccacccagagtacgtgtttacaggctttccagatcaccttcctgtggggtgaacgtaatgaggcggggctggtccttggaatttcccctggaaaatggtaacagactccatccttgacccggggatgagcatgaaggcattgtcccaaaggcagaggccaccgtggtaggaattccaccaaggccagaagggaaaaaggaagaacccaccgtgtctggctgtgcgggccctggggagggtcgtgagtgcagcccctctctacttctgtgcctttgtaaaacgtgtagataaccgcagtggttggctgagccaagaactctcctaaatcagtggctttctccccaccccttgctggggagtcatttttaaaaaaatctgtgggatataaaattggcctcctgctgcttcagcctacctctccctctgctgacttaatgtcgtgattctgtttcttcagatatttaaggctgttaggttgtgtgagccttgaagtgtgtgtgtgtgtcccagcgactgtccactgtccaggagatgcatgtctttgtattggagatatttctgtaactcattctcttggtgctcacgattgccatggccatagggccacagtgccgtatctgctgcagacatgattgtttcttgttctagaggttttcttgttttcgaatcttgcctgatgaatccagccagaccaaggggcctagatttgacctctgtcctgggctcctgggccaggtgcaggaacatctgaggccactctgctggccacctccagtgggtgctgaccacaggatgggctttgtttacactcattttcaccctgattcttgcccccactttcataaaagaaacttcaaaatgctgacgctttggagagtaagaaaatcaatcttggctgggcacggtggctcctgcctgtgatcctagcactttgggaggctgaagctgaaggatcacttgagctcaggagttggagaccaaccctggcaacataacaagaccctgtctctacaaaaaaaaaaaagaaaaaaaaaatttagccgtgtgtagcagtgagtcgcctgtaatcccagctactcgggaggctgagtcaggagaatcacttgagcctagaagttgcagtgagctatgatcatgccacactgtactccagcctggatgacagagtgaaaccctgcctctaaataaaagaaaatagaggcagactgtggtggctcacgcctgtaatcccagcactttggtaggccaaggcgggtggatcacctgcagtcaggagttcacaaccagcctgaccaacatggtgaaaccctgtctatactaaaaatacaaaacattagccacgtgtggtggtacacgcctgtaatcccagctactcgggaggctgagtcaggagaatcacttgaacctgggaggcggaggttgcagtgagctgagattgtaccactgcactccagcctgggtgacagagcaaaaccctatctcaaaaaaaaaaagaagaaaaaaatagaaaatccaaaaagaaaaaccagaaggcctgctggcgtataaatccctgggcgggtttctgataaattgccctgtgctgtcagcccctgcactgcactgctgccttccatggtgggtgggagaccccagagcggggcaggcgccactgagggcttttcttggagtcggccagcaggccacgcagcatccggcaccctgggcgggctggctagctgccttcttaggacatctctactttgaaggattttaccgcaggaagcaatagcagcgctggccattggtgctgatgacagcattgggtctggttgaggggaaggggctggaaagcagcagacccccccagtgctgcgcatggtcccggagctgtcagccaggggagtggggtcagccgtcagccagccctcccgtttcccgcccatgggccctgaccacactcccttttctagaagtcaatcctaaggtttctctgctctggctaagaggatgtaaatttggattcttagagggcatggcacccccagtccctgcccagataaagtagcacagtggcatgcagcacctctgtctgttgctgacgttggggggcttacacacccacctcatctccgtgcacagccatgactggccctgccggcagctggggtgcaggtaagggtctctctcatagaggggagctgcagctgagaactggcgaggccccttcctccaaggccctagctggcccccgggtgaacctgaggtggcaggttcaggttttcaagatggtgaggtctcgctgtctgctggacagtacgttaggctctcagaactcatgggtgtggagctgggcctgtcccgggccagtggacccctgtgtgtgggggatttggggtgctgtgggcctggttatgcactggcagatggaccttgctttggtccagctcttttccttaccctggctctgacgtgggaaggcttggagggcccgtctcatcacccccgttcgccctcagctgtccctttcccttgtcgcctggccgctgcctcgcccgcctgaggcctcctagcaggcagcctgggtgtgagttgagcctctctcttttccctctggtgggaaagtggcctttccctcaacacctgctccccggccccagaggaacccacctgttttggagctcagcttggcccagcgtttccttggggaagggaaaggagggctggacagcactgatccgggcaggcagcgtgtgcagcagtggccagccagagtgccaaagatgcacggggatgtggtgtgtggctccgggccctcgacatctctgctttgggggatttttaccttgtctgcacacttgtcaggggagaggggacagcaaggtgggaggttgaagagctttgaggctcagcagcatgtttgtggcattcggtggacaccatggccttgggcggctggacaggtttttgtgatgtgaaggacatgcatggggcacatggtaagcttggcaagggctccaggaacgctgacgaagggttttaggacccccacccccatgcctgtaccagggctggcctccagagcgggtgaggacagagcagctgtgggcttttcattctgaggtcttggcccccctggccaccgcaagggactctttgcttgtcagggcttgcaaaaaccaaccttcgagaaagaaaagggaactcttcacgttgaatgttgactttgtgtgtatgcgtgtgtgtgtgtgtgtgcacgcgcgcgtgtgcgtgtttacttcatggaattttgttttgtgaaattcccctccaatcgtgtcagaatttacctccatgccccagtcacactgttggttctgcgctctgaacctgggtgtagctcatttgatcttagacagcgcctaggtaaagaaataatgggataagatttctaaacccccctatgtgcttaagagtcatcctccccatggcgctgtctctgtcatcctctccacgtgctgacag

SEQ ID NO: 61098 - DNA, 4533 bp, Homo sapiens
tacttatccagaaaaggctcggcagctgcctgccctcttgtctgtgcttcagccctgcacaaaagcagcttggtgacaccactcagccacccagagtacgtgtttacaggctttccagatcaccttcctgtggggtgaacgtaatgaggcggggctggtccttggaatttcccctggaaaatggtaacagactccatccttgacccggggatgagcatgaaggcattgtcccaaaggcagaggccaccgtggtaggaattccaccaaggccagaagggaaaaaggaagaacccaccgtgtctggctgtgcgggccctggggagggtcgtgagtgcagcccctctctacttctgtgcctttgtaaaacgtgtagataaccgcagtggttggctgagccaagaactctcctaaatcagtggctttctccccaccccttgctggggagtcatttttaaaaaaatctgtgggatataaaattggcctcctgctgcttcagcctacctctccctctgctgacttaatgtcgtgattctgtttcttcagatatttaaggctgttaggttgtgtgagccttgaagtgtgtgtgtgtgtcccagcgactgtccactgtccaggagatgcatgtctttgtattggagatatttctgtaactcattctcttggtgctcacgattgccatggccatagggccacagtgccgtatctgctgcagacatgattgtttcttgttctagaggttttcttgttttcgaatcttgcctgatgaatccagccagaccaaggggcctagatttgacctctgtcctgggctcctgggccaggtgcaggaacatctgaggccactctgctggccacctccagtgggtgctgaccacaggatgggctttgtttacactcattttcaccctgattcttgcccccactttcataaaagaaacttcaaaatgctgacgctttggagagtaagaaaatcaatcttggctgggcacggtggctcctgcctgtgatcctagcactttgggaggctgaagctgaaggatcacttgagctcaggagttggagaccaaccctggcaacataacaagaccctgtctctacaaaaaaaaaaaagaaaaaaaaaatttagccgtgtgtagcagtgagtcgcctgtaatcccagctactcgggaggctgagtcaggagaatcacttgagcctagaagttgcagtgagctatgatcatgccacactgtactccagcctggatgacagagtgaaaccctgcctctaaataaaagaaaatagaggcagactgtggtggctcacgcctgtaatcccagcactttggtaggccaaggcgggtggatcacctgcagtcaggagttcacaaccagcctgaccaacatggtgaaaccctgtctatactaaaaatacaaaacattagccacgtgtggtggtacacgcctgtaatcccagctactcgggaggctgagtcaggagaatcacttgaacctgggaggcggaggttgcagtgagctgagattgtaccactgcactccagcctgggtgacagagcaaaaccctatctcaaaaaaaaaaagaagaaaaaaatagaaaatccaaaaagaaaaaccagaaggcctgctggcgtataaatccctgggcgggtttctgataaattgccctgtgctgtcagcccctgcactgcactgctgccttccatggtgggtgggagaccccagagcggggcaggcgccactgagggcttttcttggagtcggccagcaggccacgcagcatccggcaccctgggcgggctggctagctgccttcttaggacatctctactttgaaggattttaccgcaggaagcaatagcagcgctggccattggtgctgatgacagcattgggtctggttgaggggaaggggctggaaagcagcagacccccccagtgctgcgcatggtcccggagctgtcagccaggggagtggggtcagccgtcagccagccctcccgtttcccgcccatgggccctgaccacactcccttttctagaagtcaatcctaaggtttctctgctctggctaagaggatgtaaatttggattcttagagggcatggcacccccagtccctgcccagataaagtagcacagtggcatgcagcacctctgtctgttgctgacgttggggggcttacacacccacctcatctccgtgcacagccatgactggccctgccggcagctggggtgcaggtaagggtctctctcatagaggggagctgcagctgagaactggcgaggccccttcctccaaggccctagctggcccccgggtgaacctgaggtggcaggttcaggttttcaagatggtgaggtctcgctgtctgctggacagtacgttaggctctcagaactcatgggtgtggagctgggcctgtcccgggccagtggacccctgtgtgtgggggatttggggtgctgtgggcctggttatgcactggcagatggaccttgctttggtccagctcttttccttaccctggctctgacgtgggaaggcttggagggcccgtctcatcacccccgttcgccctcagctgtccctttcccttgtcgcctggccgctgcctcgcccgcctgaggcctcctagcaggcagcctgggtgtgagttgagcctctctcttttccctctggtgggaaagtggcctttccctcaacacctgctccccggccccagaggaacccacctgttttggagctcagcttggcccagcgtttccttggggaagggaaaggagggctggacagcactgatccgggcaggcagcgtgtgcagcagtggccagccagagtgccaaagatgcacggggatgtggtgtgtggctccgggccctcgacatctctgctttgggggatttttaccttgtctgcacacttgtcaggggagaggggacagcaaggtgggaggttgaagagctttgaggctcagcagcatgtttgtggcattcggtggacaccatggccttgggcggctggacaggtttttgtgatgtgaaggacatgcatggggcacatggtaagcttggcaagggctccaggaacgctgacgaagggttttaggacccccacccccatgcctgtaccagggctggcctccagagcgggtgaggacagagcagctgtgggcttttcattctgaggtcttggcccccctggccaccgcaagggactctttgcttgtcagggcttgcaaaaaccaaccttcgagaaagaaaagggaactcttcacgttgaatgttgactttgtgtgtatgcgtgtgtgtgtgtgtgtgcacgcgcgcgtgtgcgtgtttacttcatggaattttgttttgtgaaattcccctccaatcgtgtcagaatttacctccatgccccagtcacactgttggttctgcgctctgaacctgggtgtagctcatttgaaggactctcttctgcgtttcctaacagttatttggtggtctcaagagttgaggttgtggagggttgggagaaactgaagttctatacatttccatagagtttacatcctgcagttaaaaggcagggagggctcagcccgggccccacagctccaggccatcccctacgggctgcccacagtgcccccttttctctagccgaatctttttcgaacagcccgggaaaggaaaacggattcacttgctgattttgttcacggcggaagcaccatgttccgttcctttttcaggttcagtttgttgtgtaaatggcggttttttctggtgtgagctttggtgatggtggcagggctcctttgaagagatggttccacctcgtggtctgaagaacaaaccagagaagagtctggtttggccagaggccccctccggtccacgtcaccctgagtacacccctctgattgctctgctgtcaagaagcacgtttccaccagctgtattcaacactacaatgcattttttaaactatatttgcatccaagacaataaagacaccttattttttttgaaaagccaaaaaaaaaaaaaaaaaaaaaaaaaacctttgcgggccccctcgggcccccaaagaagccccttcccacagccaacacaatcccgatgggggcagcgcgcggcgcccccacaataaggggatacgtcgcgacaacatggttggcacatcaaggctggtgttcccccaagagaggaaaaaccccggggcacacggatgaacaacagagcgccgggaggtaaacttaaccacccacaatataaagaaaaacggcccggggggaacaccggggagcggctcctggcacaacaaacccccagaaggtggatctctccaaagcaccaccaaacggggacctcatcacaaccagcggctcccaaggcagagaccgcgactacgacaaataagcgcccgcgacccgtggtcacacacaagagagcgacaggaaagacgcggcacgactacacccgaaagacgcacacggccgcaccgcgagcacaccacgctgcccaaacacacacacacgac

SEQ ID NO: 61099 - DNA, 3948 bp, Homo sapiens
tggagagacagggtcttgttatgttgccagggttggtctccaactcctgagctcaagtgatccttcagcttcagcctcccaaagtgctaggatcacaggcagggccacagtgccgtatctgctgcagacatgattgtttcttgttctagaggttttcttgttttcgaatcttgcctgatgaatccagccagaccaaggggcctagatttgacctctgtcctgggctcctgggccaggtgcaggaacatctgaggccactctgctggccacctccagtgggtgctgaccacaggatgggctttgtttacactcattttcaccctgattcttgcccccactttcataaaagaaacttcaaaatgctgacgctttggagagtaagaaaatcaatcttggctgggcacggtggctcctgcctgtgatcctagcactttgggaggctgaagctgaaggatcacttgagctcaggagttggagaccaaccctggcaacataacaagaccctgtctctacaaaaaaaaaaaagaaaaaaaaaatttagccgtgtgtagcagtgagtcgcctgtaatcccagctactcgggaggctgagtcaggagaatcacttgagcctagaagttgcagtgagctatgatcatgccacactgtactccagcctggatgacagagtgaaaccctgcctctaaataaaagaaaatagaggcagactgtggtggctcacgcctgtaatcccagcactttggtaggccaaggcgggtggatcacctgcagtcaggagttcacaaccagcctgaccaacatggtgaaaccctgtctatactaaaaatacaaaacattagccacgtgtggtggtacacgcctgtaatcccagctactcgggaggctgagtcaggagaatcacttgaacctgggaggcggaggttgcagtgagctgagattgtaccactgcactccagcctgggtgacagagcaaaaccctatctcaaaaaaaaaaagaagaaaaaaatagaaaatccaaaaagaaaaaccagaaggcctgctggcgtataaatccctgggcgggtttctgataaattgccctgtgctgtcagcccctgcactgcactgctgccttccatggtgggtgggagaccccagagcggggcaggcgccactgagggcttttcttggagtcggccagcaggccacgcagcatccggcaccctgggcgggctggctagctgccttcttaggacatctctactttgaaggattttaccgcaggaagcaatagcagcgctggccattggtgctgatgacagcattgggtctggttgaggggaaggggctggaaagcagcagacccccccagtgctgcgcatggtcccggagctgtcagccaggggagtggggtcagccgtcagccagccctcccgtttcccgcccatgggccctgaccacactcccttttctagaagtcaatcctaaggtttctctgctctggctaagaggatgtaaatttggattcttagagggcatggcacccccagtccctgcccagataaagtagcacagtggcatgcagcacctctgtctgttgctgacgttggggggcttacacacccacctcatctccgtgcacagccatgactggccctgccggcagctggggtgcaggtaagggtctctctcatagaggggagctgcagctgagaactggcgaggccccttcctccaaggccctagctggcccccgggtgaacctgaggtggcaggttcaggttttcaagatggtgaggtctcgctgtctgctggacagtacgttaggctctcagaactcatgggtgtggagctgggcctgtcccgggccagtggacccctgtgtgtgggggatttggggtgctgtgggcctggttatgcactggcagatggaccttgctttggtccagctcttttccttaccctggctctgacgtgggaaggcttggagggcccgtctcatcacccccgttcgccctcagctgtccctttcccttgtcgcctggccgctgcctcgcccgcctgaggcctcctagcaggcagcctgggtgtgagttgagcctctctcttttccctctggtgggaaagtggcctttccctcaacacctgctccccggccccagaggaacccacctgttttggagctcagcttggcccagcgtttccttggggaagggaaaggagggctggacagcactgatccgggcaggcagcgtgtgcagcagtggccagccagagtgccaaagatgcacggggatgtggtgtgtggctccgggccctcgacatctctgctttgggggatttttaccttgtctgcacacttgtcaggggagaggggacagcaaggtgggaggttgaagagctttgaggctcagcagcatgtttgtggcattcggtggacaccatggccttgggcggctggacaggtttttgtgatgtgaaggacatgcatggggcacatggtaagcttggcaagggctccaggaacgctgacgaagggttttaggacccccacccccatgcctgtaccagggctggcctccagagcgggtgaggacagagcagctgtgggcttttcattctgaggtcttggcccccctggccaccgcaagggactctttgcttgtcagggcttgcaaaaaccaaccttcgagaaagaaaagggaactcttcacgttgaatgttgactttgtgtgtatgcgtgtgtgtgtgtgtgtgcacgcgcgcgtgtgcgtgtttacttcatggaattttgttttgtgaaattcccctccaatcgtgtcagaatttacctccatgccccagtcacactgttggttctgcgctctgaacctgggtgtagctcatttgaaggactctcttctgcgtttcctaacagttatttggtggtctcaagagttgaggttgtggagggttgggagaaactgaagttctatacatttccatagagtttacatcctgcagttaaaaggcagggagggctcagcccgggccccacagctccaggccatcccctacgggctgcccacagtgcccccttttctctagccgaatctttttcgaacagcccgggaaaggaaaacggattcacttgctgattttgttcacggcggaagcaccatgttccgttcctttttcaggttcagtttgttgtgtaaatggcggttttttctggtgtgagctttggtgatggtggcagggctcctttgaagagatggttccacctcgtggtctgaagaacaaaccagagaagagtctggtttggccagaggccccctccggtccacgtcaccctgagtacacccctctgattgctctgctgtcaagaagcacgtttccaccagctgtattcaacactacaatgcattttttaaactatatttgcatccaagacaataaagacaccttattttttttgaaaagccaaaaaaaaaaaaaaaaaaaaaaaaaacctttgcgggccccctcgggcccccaaagaagccccttcccacagccaacacaatcccgatgggggcagcgcgcggcgcccccacaataaggggatacgtcgcgacaacatggttggcacatcaaggctggtgttcccccaagagaggaaaaaccccggggcacacggatgaacaacagagcgccgggaggtaaacttaaccacccacaatataaagaaaaacggcccggggggaacaccggggagcggctcctggcacaacaaacccccagaaggtggatctctccaaagcaccaccaaacggggacctcatcacaaccagcggctcccaaggcagagaccgcgactacgacaaataagcgcccgcgacccgtggtcacacacaagagagcgacaggaaagacgcggcacgactacacccgaaagacgcacacggccgcaccgcgagcacaccacgctgcccaaacacacacacacgac

SEQ ID NO: 61100 - DNA, 3057 bp, Homo sapiens
tgagatagggttttgctctgtcacccaggttgcagtgagctgagattgtaccactgcactccagcctgggtgacagagcaaaaccctatctcaaaaaaaaaaagaagaaaaaaatagaaaatccaaaaagaaaaaccagaaggcctgctggcgtataaatccctgggcgggtttctgataaattgccctgtgctgtcagcccctgcactgcactgctgccttccatggtgggtgggagaccccagagcggggcaggcgccactgagggcttttcttggagtcggccagcaggccacgcagcatccggcaccctgggcgggctggctagctgccttcttaggacatctctactttgaaggattttaccgcaggaagcaatagcagcgctggccattggtgctgatgacagcattgggtctggttgaggggaaggggctggaaagcagcagacccccccagtgctgcgcatggtcccggagctgtcagccaggggagtggggtcagccgtcagccagccctcccgtttcccgcccatgggccctgaccacactcccttttctagaagtcaatcctaaggtttctctgctctggctaagaggatgtaaatttggattcttagagggcatggcacccccagtccctgcccagataaagtagcacagtggcatgcagcacctctgtctgttgctgacgttggggggcttacacacccacctcatctccgtgcacagccatgactggccctgccggcagctggggtgcaggtaagggtctctctcatagaggggagctgcagctgagaactggcgaggccccttcctccaaggccctagctggcccccgggtgaacctgaggtggcaggttcaggttttcaagatggtgaggtctcgctgtctgctggacagtacgttaggctctcagaactcatgggtgtggagctgggcctgtcccgggccagtggacccctgtgtgtgggggatttggggtgctgtgggcctggttatgcactggcagatggaccttgctttggtccagctcttttccttaccctggctctgacgtgggaaggcttggagggcccgtctcatcacccccgttcgccctcagctgtccctttcccttgtcgcctggccgctgcctcgcccgcctgaggcctcctagcaggcagcctgggtgtgagttgagcctctctcttttccctctggtgggaaagtggcctttccctcaacacctgctccccggccccagaggaacccacctgttttggagctcagcttggcccagcgtttccttggggaagggaaaggagggctggacagcactgatccgggcaggcagcgtgtgcagcagtggccagccagagtgccaaagatgcacggggatgtggtgtgtggctccgggccctcgacatctctgctttgggggatttttaccttgtctgcacacttgtcaggggagaggggacagcaaggtgggaggttgaagagctttgaggctcagcagcatgtttgtggcattcggtggacaccatggccttgggcggctggacaggtttttgtgatgtgaaggacatgcatggggcacatggtaagcttggcaagggctccaggaacgctgacgaagggttttaggacccccacccccatgcctgtaccagggctggcctccagagcgggtgaggacagagcagctgtgggcttttcattctgaggtcttggcccccctggccaccgcaagggactctttgcttgtcagggcttgcaaaaaccaaccttcgagaaagaaaagggaactcttcacgttgaatgttgactttgtgtgtatgcgtgtgtgtgtgtgtgtgcacgcgcgcgtgtgcgtgtttacttcatggaattttgttttgtgaaattcccctccaatcgtgtcagaatttacctccatgccccagtcacactgttggttctgcgctctgaacctgggtgtagctcatttgaaggactctcttctgcgtttcctaacagttatttggtggtctcaagagttgaggttgtggagggttgggagaaactgaagttctatacatttccatagagtttacatcctgcagttaaaaggcagggagggctcagcccgggccccacagctccaggccatcccctacgggctgcccacagtgcccccttttctctagccgaatctttttcgaacagcccgggaaaggaaaacggattcacttgctgattttgttcacggcggaagcaccatgttccgttcctttttcaggttcagtttgttgtgtaaatggcggttttttctggtgtgagctttggtgatggtggcagggctcctttgaagagatggttccacctcgtggtctgaagaacaaaccagagaagagtctggtttggccagaggccccctccggtccacgtcaccctgagtacacccctctgattgctctgctgtcaagaagcacgtttccaccagctgtattcaacactacaatgcattttttaaactatatttgcatccaagacaataaagacaccttattttttttgaaaagccaaaaaaaaaaaaaaaaaaaaaaaaaacctttgcgggccccctcgggcccccaaagaagccccttcccacagccaacacaatcccgatgggggcagcgcgcggcgcccccacaataaggggatacgtcgcgacaacatggttggcacatcaaggctggtgttcccccaagagaggaaaaaccccggggcacacggatgaacaacagagcgccgggaggtaaacttaaccacccacaatataaagaaaaacggcccggggggaacaccggggagcggctcctggcacaacaaacccccagaaggtggatctctccaaagcaccaccaaacggggacctcatcacaaccagcggctcccaaggcagagaccgcgactacgacaaataagcgcccgcgacccgtggtcacacacaagagagcgacaggaaagacgcggcacgactacacccgaaagacgcacacggccgcaccgcgagcacaccacgctgcccaaacacacacacacgac

SEQ ID NO: 61101 - DNA, 1639 bp, Homo sapiens
taggctagtagaggctgcgcgggttatcggccgaggcggccgagggacagcaaggtgggaggttgaagagctttgaggctcagcagcatgtttgtggcattcggtggacaccatggccttgggcggctggacaggtttttgtgatgtgaaggacatgcatggggcacatggtaagcttggcaagggctccaggaacgctgacgaagggttttaggacccccacccccatgcctgtaccagggctggcctccagagcgggtgaggacagagcagctgtgggcttttcattctgaggtcttggcccccctggccaccgcaagggactctttgcttgtcagggcttgcaaaaaccaaccttcgagaaagaaaagggaactcttcacgttgaatgttgactttgtgtgtatgcgtgtgtgtgtgtgtgtgcacgcgcgcgtgtgcgtgtttacttcatggaattttgttttgtgaaattcccctccaatcgtgtcagaatttacctccatgccccagtcacactgttggttctgcgctctgaacctgggtgtagctcatttgaaggactctcttctgcgtttcctaacagttatttggtggtctcaagagttgaggttgtggagggttgggagaaactgaagttctatacatttccatagagtttacatcctgcagttaaaaggcagggagggctcagcccgggccccacagctccaggccatcccctacgggctgcccacagtgcccccttttctctagccgaatctttttcgaacagcccgggaaaggaaaacggattcacttgctgattttgttcacggcggaagcaccatgttccgttcctttttcaggttcagtttgttgtgtaaatggcggttttttctggtgtgagctttggtgatggtggcagggctcctttgaagagatggttccacctcgtggtctgaagaacaaaccagagaagagtctggtttggccagaggccccctccggtccacgtcaccctgagtacacccctctgattgctctgctgtcaagaagcacgtttccaccagctgtattcaacactacaatgcattttttaaactatatttgcatccaagacaataaagacaccttattttttttgaaaagccaaaaaaaaaaaaaaaaaaaaaaaaaacctttgcgggccccctcgggcccccaaagaagccccttcccacagccaacacaatcccgatgggggcagcgcgcggcgcccccacaataaggggatacgtcgcgacaacatggttggcacatcaaggctggtgttcccccaagagaggaaaaaccccggggcacacggatgaacaacagagcgccgggaggtaaacttaaccacccacaatataaagaaaaacggcccggggggaacaccggggagcggctcctggcacaacaaacccccagaaggtggatctctccaaagcaccaccaaacggggacctcatcacaaccagcggctcccaaggcagagaccgcgactacgacaaataagcgcccgcgacccgtggtcacacacaagagagcgacaggaaagacgcggcacgactacacccgaaagacgcacacggccgcaccgcgagcacaccacgctgcccaaacacacacacacgac

SEQ ID NO: 61102 - DNA, 4307 bp, Homo sapiens
tgcagcgctagaaaggaattgtctgaccccagcattgcttcctggctcctttcttcctttttcaggagagcatcctgccgaccacagccctccccactgtgagccttcctgacagcctcatcgcgccccctaccgccccatccctggctcacatggatgagcagggctgtgaacacacctcccggactgaggacccgtttatccagcccacggacttcggtccctcagagccgccactgagtgtcccgcagcccttcctccctgtcttcaccatgcccctgctgtctcccagccccgccccaccgcccatctcccccgtgttaccattagttcctcctcctgccactgccctgaaccccccggctccacccaccttccatcagccacagaagtttgctggagtcaacaaagcgccgtctgtcatcacccacacggcctctgccaccctcacccacgatgcccccgccaccacctttagccagagtcagggccttgtgatcaccacccatcaccctgccccgtcagcggccccttgtgggctggcactgtctcctgtcacccggcctccccagccacggttaacttttgtgcaccccaaacctgtatccttgactgggggcaggcctaagcagccccacaaaatagtgcctgctcccaaaccagagcccgtgtccttggtgttgaagaatgcccgtatcgccccagctgccttttcaggccaaccacaagcggtgatcatgacgtcagggcctctgaagagagaagggatgttggcctccaccgtgtcccagtccaacgtggtcattgcgcctgctgccatcgccagggctcctggggtcccggagttccacagcagcatcctggtgacagatctcggccatggcacgagcagcccgcctgcccccgtctcccggctcttcccaagcacagcgcaagaccccctggggaagggcgagcaggtcccgctgcatgggggcagcccccaggtcactgtcacagggcccagtcgggactgcccaaactcagggcaggcctctccgtgtgcatcggagcagagccccagtcctcaatctccccagaacaactgctcagggaaatccgaccccaaaaatgtggctgcactaaagaaccggcagatgaagcacatctcagctgagcagaaaaggcgcttcaacatcaagatgtgcttcgacatgctcaacagcctcatctccaacaattccaagctgaccagtcacgccatcacactgcagaagactgtggagtacatcaccaagctgcagcaggagagaggccagatgcaggaggaggcccggcggctgcgggaggagatcgaggagctcaatgccaccatcatctcctgccagcagctgctccctgccacgggagtccccgttacccggcgccagtttgatcacatgaaagacatgtttgacgaatacgtgaaaacccggaccttgcagaattggaagttctggattttcagcatcatcatcaagccgctgtttgagtcgttcaagggcatggtgtccaccagcagcctggaggagctgcaccggacggcgctctcctggctggaccagcactgctccctgcccatcctcaggccgatggtattgagcacgctgcggcagctgagcacctccacctccatcctcacagacccggcacagctgccagagcaggcgtccaaggctgtcaccaggattggcaagagattgggagagtcctagctgcttagctggcatgtggccgcatgagatgccaggagacccttccctgcccatggagagtaggctgcgccccccagcccttcctgacgctcagcctcggggcctctctccaactctgccggcccaccgtggcatcgggaggccatgctcaggtctgaagcaggtttggggcctgctgacagcaatagcccgcctttgggaaccccttgctgtgaactctctcactcagtgacctcagtcaccaacctcctctgccctcggggcagcccacacaaaagggaagtgctggccgtgctggtcctgccctgctggtggcctgccgggcctggcgccggtgagcggaatcgatgggatgagggtgacagggcctgctcctgtcctgaggcccagccttgtccctcctgccacgtcctgtccacatgcatgcctctgcctgatgccctgctccactctctggtctgcccgtggggcagttggaaggcgtctttctttctcccctcaactctgacagcacccagcccttgtggatggacttgggcttctattcaggcttatgcatggcaggctgccagggggaagtgccttcttcagaggtcctccaggacacatgtgtgcagaaacggtggatgtggaacacacaggaccagaatggaagcgtgtgatgcacggtggctgctctggctgagaggccctgctgggcatgtttcatctgtccccttttagctccacctgacattgcaggatccatggggactcagcccagggccttctcggatgtcacctcaccgctgtggcccttctgccgttcttctccacttggctccagctgcagctgttgacagatcaagcatgtcctgtgggagcttagaaccctgaagttctagtgtctgaaagatcagactccacgtcctgctgtcagccttgtcatcttgtctgatgtctttcagctgggagccccaaaccaggacagttctcggaccaaagatgcccccacactcaaaagtctgtcccgtcttgtgtttggagaaggaaacaatgttggcaggcagcactctgtggtggtcagccctcagagctgtttctaggcatctctcagatcagacagcaaagaatctacccagatctgggctgggtggaggtgtggctgggctgggggccattctgagcctgcagtgagagtttggcccagcctcagtccttgctcttctctggctacctctgcagggagctgcaggggcaagcactctctccagcactcaggaagcccggccgagggtacctcctcgtggaaagaatgcactttaaagctctgctgaggagttcggagcccaggctttcaggcgacctctgccctccctgcctctcctcaccctccctctcttcctgcagggcctgggaagggctttgagggagcctgggagccatgtgaagaggggcacgcctgggctgtcccacagtttagatccagttggaggttctccctggctcctgcaggcctgcggggatctctccccacttcaggcctccggccagctgcctgccctcttgtctgtgcttcagccctgcacaaaagcagcttggtgacaccactcagccacccagagtacgtgtttacaggctttccagatcaccttcctgtggggtgaacgtaatgaggcggggctggtccttggaatttcccctggaaaatggtaacagactccatccttgacccggggatgagcatgaaggcattgtcccaaaggcagaggccaccgtggtaggaattccaccaaggccagaagggaaaaaggaagaacccaccgtgtctggctgtgcgggccctggggagggtcgtgagtgcagcccctctctacttctgtgcctttgtaaaacgtgtagataaccgcagtggttggctgagccaagaactctcctaaatcagtggctttctccccaccccttgctggggagtcatttttaaaaaaatctgtgggatataaaattggcctcctgctgcttcagcctacctctccctctgctgacttaatgtcgtgattctgtttcttcagatatttaaggctgttaggttgtgtgagccttgaagtgtgtgtgtgtgtcccagcgactgtccactgtccaggagatgcatgtctttgtattggagatatttctgtaactcattctcttggtgctcacgattgccatggccatagggccacagtgccgtatctgctgcagacatgattgtttcttgttctagaggttttcttgttttcgaatcttgcctgatgaatccagccagaccaaggggcctagatttgacctctgtcctgggctcctgggccaggtgcaggaacatctgaggccactctgctggccacctccagtgggtgctgaccacaggatgggctttgtttacactcattttcaccctgattcttgcccccactttcataaaagaaacttcaaaatgctgacgctttggagagtaagaaaatcaatcttggctgggcacggtggctcctgcctgtgatcctagcactttgggaggctgaagttacacaccggatttggaggcttttgagggtcctt

SEQ ID NO: 61103 - DNA, 1365 bp, Homo sapiens
tacgaaaatgttgagcatagggtggttgataccttgtttgcactcttgacataatgctatttaaaggcttgaatttttccctttatataattttcacctttacttcatggaattttgttttgtgaaattcccctccaatcgtgtcagaatttacctccatgccccagtcacactgttggttctgcgctctgaacctgggtgtagctcatttgaaggactctcttctgcgtttcctaacagttatttggtggtctcaagagttgaggttgtggagggttgggagaaactgaagttctatacatttccatagagtttacatcctgcctctcctcaccctccctctcttcctgcagggcctgggaagggctttgagggagcctgggagccatgtgaagaggggcacgcctgggctgtcccacagtttagatccagttggaggttctccctggctcctgcaggcctgcggggatctctccccacttcaggcctccggccagctgcctgccctcttgtctgtgcttcagccctgcacaaaagcagcttggtgacaccactcagccacccagattttcaggttcagtttgttgtgtaaatggcggttttttctggtgtgagctttggtgatggtggcagggctcctttgaagagatggttccacctcgtggtctgaagaacaaaccagagaagagtctggtttggccagaggccccctccggtccacgtcaccctgagtacacccctctgattgctctgctgtcaagaagcacgtttccaccagctgtattcaacactacaatgcattttttaaactatatttgcatccaagacaataaagacaccttattttttttgaaaagccaaaaaaaaaaaaaaaaaaaaaaaaaacctttgcgggccccctcgggcccccaaagaagccccttcccacagccaacacaatcccgatgggggcagcgcgcggcgcccccacaataaggggatacgtcgcgacaacatggttggcacatcaaggctggtgttcccccaagagaggaaaaaccccggggcacacggatgaacaacagagcgccgggaggtaaacttaaccacccacaatataaagaaaaacggcccggggggaacaccggggagcggctcctggcacaacaaacccccagaaggtggatctctccaaagcaccaccaaacggggacctcatcacaaccagcggctcccaaggcagagaccgcgactacgacaaataagcgcccgcgacccgtggtcacacacaagagagcgacaggaaagacgcggcacgactacacccgaaagacgcacacggccgcaccgcgagcacaccacgctgcccaaacacacacacacgac

SEQ ID NO: 61104 - DNA, 837 bp, Homo sapiens
gcctagcgggacgactctcttaatctaccaccgctacacttttcaggttcagtttgttgtgtaaatggcggttttttctggtgtgagctttggtgatggtggcagggctcctttgaagagatggttccacctcgtggtctgaagaacaaaccagagaagagtctggtttggccagaggccccctccggtccacgtcaccctgagtacacccctctgattgctctgctgtcaagaagcacgtttccaccagctgtattcaacactacaatgcattttttaaactatatttgcatccaagacaataaagacaccttattttttttgaaaagccaaaaaaaaaaaaaaaaaaaaaaaaaacctttgcgggccccctcgggcccccaaagaagccccttcccacagccaacacaatcccgatgggggcagcgcgcggcgcccccacaataaggggatacgtcgcgacaacatggttggcacatcaaggctggtgttcccccaagagaggaaaaaccccggggcacacggatgaacaacagagcgccgggaggtaaacttaaccacccacaatataaagaaaaacggcccggggggaacaccggggagcggctcctggcacaacaaacccccagaaggtggatctctccaaagcaccaccaaacggggacctcatcacaaccagcggctcccaaggcagagaccgcgactacgacaaataagcgcccgcgacccgtggtcacacacaagagagcgacaggaaagacgcggcacgactacacccgaaagacgcacacggccgcaccgcgagcacaccacgctgcccaaacacacacacacgac

SEQ ID NO: 61105 - DNA, 7313 bp, Homo sapiens
tgcagcgctagaaaggaattgtctgaccccagcattgcttcctggctcctttcttcctttttcaggagagcatcctgccgaccacagccctccccactgtgagccttcctgacagcctcatcgcgccccctaccgccccatccctggctcacatggatgagcagggctgtgaacacacctcccggactgaggacccgtttatccagcccacggacttcggtccctcagagccgccactgagtgtcccgcagcccttcctccctgtcttcaccatgcccctgctgtctcccagccccgccccaccgcccatctcccccgtgttaccattagttcctcctcctgccactgccctgaaccccccggctccacccaccttccatcagccacagaagtttgctggagtcaacaaagcgccgtctgtcatcacccacacggcctctgccaccctcacccacgatgcccccgccaccacctttagccagagtcagggccttgtgatcaccacccatcaccctgccccgtcagcggccccttgtgggctggcactgtctcctgtcacccggcctccccagccacggttaacttttgtgcaccccaaacctgtatccttgactgggggcaggcctaagcagccccacaaaatagtgcctgctcccaaaccagagcccgtgtccttggtgttgaagaatgcccgtatcgccccagctgccttttcaggccaaccacaagcggtgatcatgacgtcagggcctctgaagagagaagggatgttggcctccaccgtgtcccagtccaacgtggtcattgcgcctgctgccatcgccagggctcctggggtcccggagttccacagcagcatcctggtgacagatctcggccatggcacgagcagcccgcctgcccccgtctcccggctcttcccaagcacagcgcaagaccccctggggaagggcgagcaggtcccgctgcatgggggcagcccccaggtcactgtcacagggcccagtcgggactgcccaaactcagggcaggcctctccgtgtgcatcggagcagagccccagtcctcaatctccccagaacaactgctcagggaaatccgaccccaaaaatgtggctgcactaaagaaccggcagatgaagcacatctcagctgagcagaaaaggcgcttcaacatcaagatgtgcttcgacatgctcaacagcctcatctccaacaattccaagctgaccagtcacgccatcacactgcagaagactgtggagtacatcaccaagctgcagcaggagagaggccagatgcaggaggaggcccggcggctgcgggaggagatcgaggagctcaatgccaccatcatctcctgccagcagctgctccctgccacgggagtccccgttacccggcgccagtttgatcacatgaaagacatgtttgacgaatacgtgaaaacccggaccttgcagaattggaagttctggattttcagcatcatcatcaagccgctgtttgagtcgttcaagggcatggtgtccaccagcagcctggaggagctgcaccggacggcgctctcctggctggaccagcactgctccctgcccatcctcaggccgatggtattgagcacgctgcggcagctgagcacctccacctccatcctcacagacccggcacagctgccagagcaggcgtccaaggctgtcaccaggattggcaagagattgggagagtcctagctgcttagctggcatgtggccgcatgagatgccaggagacccttccctgcccatggagagtaggctgcgccccccagcccttcctgacgctcagcctcggggcctctctccaactctgccggcccaccgtggcatcgggaggccatgctcaggtctgaagcaggtttggggcctgctgacagcaatagcccgcctttgggaaccccttgctgtgaactctctcactcagtgacctcagtcaccaacctcctctgccctcggggcagcccacacaaaagggaagtgctggccgtgctggtcctgccctgctggtggcctgccgggcctggcgccggtgagcggaatcgatgggatgagggtgacagggcctgctcctgtcctgaggcccagccttgtccctcctgccacgtcctgtccacatgcatgcctctgcctgatgccctgctccactctctggtctgcccgtggggcagttggaaggcgtctttctttctcccctcaactctgacagcacccagcccttgtggatggacttgggcttctattcaggcttatgcatggcaggctgccagggggaagtgccttcttcagaggtcctccaggacacatgtgtgcagaaacggtggatgtggaacacacaggaccagaatggaagcgtgtgatgcacggtggctgctctggctgagaggccctgctgggcatgtttcatctgtccccttttagctccacctgacattgcaggatccatggggactcagcccagggccttctcggatgtcacctcaccgctgtggcccttctgccgttcttctccacttggctccagctgcagctgttgacagatcaagcatgtcctgtgggagcttagaaccctgaagttctagtgtctgaaagatcagactccacgtcctgctgtcagccttgtcatcttgtctgatgtctttcagctgggagccccaaaccaggacagttctcggaccaaagatgcccccacactcaaaagtctgtcccgtcttgtgtttggagaaggaaacaatgttggcaggcagcactctgtggtggtcagccctcagagctgtttctaggcatctctcagatcagacagcaaagaatctacccagatctgggctgggtggaggtgtggctgggctgggggccattctgagcctgcagtgagagtttggcccagcctcagtccttgctcttctctggctacctctgcagggagctgcaggggcaagcactctctccagcactcaggaagcccggccgagggtacctcctcgtggaaagaatgcactttaaagctctgctgaggagttcggagcccaggctttcaggcgacctctgccctccctgcctctcctcaccctccctctcttcctgcagggcctgggaagggctttgagggagcctgggagccatgtgaagaggggcacgcctgggctgtcccacagtttagatccagttggaggttctccctggctcctgcaggcctgcggggatctctccccacttcaggcctccggccagctgcctgccctcttgtctgtgcttcagccctgcacaaaagcagcttggtgacaccactcagccacccagagtacgtgtttacaggctttccagatcaccttcctgtggggtgaacgtaatgaggcggggctggtccttggaatttcccctggaaaatggtaacagactccatccttgacccggggatgagcatgaaggcattgtcccaaaggcagaggccaccgtggtaggaattccaccaaggccagaagggaaaaaggaagaacccaccgtgtctggctgtgcgggccctggggagggtcgtgagtgcagcccctctctacttctgtgcctttgtaaaacgtgtagataaccgcagtggttggctgagccaagaactctcctaaatcagtggctttctccccaccccttgctggggagtcatttttaaaaaaatctgtgggatataaaattggcctcctgctgcttcagcctacctctccctctgctgacttaatgtcgtgattctgtttcttcagatatttaaggctgttaggttgtgtgagccttgaagtgtgtgtgtgtgtcccagcgactgtccactgtccaggagatgcatgtctttgtattggagatatttctgtaactcattctcttggtgctcacgattgccatggccatagggccacagtgccgtatctgctgcagacatgattgtttcttgttctagaggttttcttgttttcgaatcttgcctgatgaatccagccagaccaaggggcctagatttgacctctgtcctgggctcctgggccaggtgcaggaacatctgaggccactctgctggccacctccagtgggtgctgaccacaggatgggctttgtttacactcattttcaccctgattcttgcccccactttcataaaagaaacttcaaaatgctgacgctttggagagtaagaaaatcaatcttggctgggcacggtggctcctgcctgtgatcctagcactttgggaggctgaagctgaaggatcacttgagctcaggagttggagaccaaccctggcaacataacaagaccctgtctctacaaaaaaaaaaaagaaaaaaaaaatttagccgtgtgtagcagtgagtcgcctgtaatcccagctactcgggaggctgagtcaggagaatcacttgagcctagaagttgcagtgagctatgatcatgccacactgtactccagcctggatgacagagtgaaaccctgcctctaaataaaagaaaatagaggcagactgtggtggctcacgcctgtaatcccagcactttggtaggccaaggcgggtggatcacctgcagtcaggagttcacaaccagcctgaccaacatggtgaaaccctgtctatactaaaaatacaaaacattagccacgtgtggtggtacacgcctgtaatcccagctactcgggaggctgagtcaggagaatcacttgaacctgggaggcggaggttgcagtgagctgagattgtaccactgcactccagcctgggtgacagagcaaaaccctatctcaaaaaaaaaaagaagaaaaaaatagaaaatccaaaaagaaaaaccagaaggcctgctggcgtataaatccctgggcgggtttctgataaattgccctgtgctgtcagcccctgcactgcactgctgccttccatggtgggtgggagaccccagagcggggcaggcgccactgagggcttttcttggagtcggccagcaggccacgcagcatccggcaccctgggcgggctggctagctgccttcttaggacatctctactttgaaggattttaccgcaggaagcaatagcagcgctggccattggtgctgatgacagcattgggtctggttgaggggaaggggctggaaagcagcagacccccccagtgctgcgcatggtcccggagctgtcagccaggggagtggggtcagccgtcagccagccctcccgtttcccgcccatgggccctgaccacactcccttttctagaagtcaatcctaaggtttctctgctctggctaagaggatgtaaatttggattcttagagggcatggcacccccagtccctgcccagataaagtagcacagtggcatgcagcacctctgtctgttgctgacgttggggggcttacacacccacctcatctccgtgcacagccatgactggccctgccggcagctggggtgcaggtaagggtctctctcatagaggggagctgcagctgagaactggcgaggccccttcctccaaggccctagctggcccccgggtgaacctgaggtggcaggttcaggttttcaagatggtgaggtctcgctgtctgctggacagtacgttaggctctcagaactcatgggtgtggagctgggcctgtcccgggccagtggacccctgtgtgtgggggatttggggtgctgtgggcctggttatgcactggcagatggaccttgctttggtccagctcttttccttaccctggctctgacgtgggaaggcttggagggcccgtctcatcacccccgttcgccctcagctgtccctttcccttgtcgcctggccgctgcctcgcccgcctgaggcctcctagcaggcagcctgggtgtgagttgagcctctctcttttccctctggtgggaaagtggcctttccctcaacacctgctccccggccccagaggaacccacctgttttggagctcagcttggcccagcgtttccttggggaagggaaaggagggctggacagcactgatccgggcaggcagcgtgtgcagcagtggccagccagagtgccaaagatgcacggggatgtggtgtgtggctccgggccctcgacatctctgctttgggggatttttaccttgtctgcacacttgtcaggggagaggggacagcaaggtgggaggttgaagagctttgaggctcagcagcatgtttgtggcattcggtggacaccatggccttgggcggctggacaggtttttgtgatgtgaaggacatgcatggggcacatggtaagcttggcaagggctccaggaacgctgacgaagggttttaggacccccacccccatgcctgtaccagggctggcctccagagcgggtgaggacagagcagctgtgggcttttcattctgaggtcttggcccccctggccaccgcaagggactctttgcttgtcagggcttgcaaaaaccaaccttcgagaaagaaaagggaactcttcacgttgaatgttgactttgtgtgtatgcgtgtgtgtgtgtgtgtgcacgcgcgcgtgtgcgtgtttacttcatggaattttgttttgtgaaattcccctccaatcgtgtcagaatttacctccatgccccagtcacactgttggttctgcgctctgaacctgggtgtagctcatttgaaggactctcttctgcgtttcctaacagttatttggtggtctcaagagttgaggttgtggagggttgggagaaactgaagttctatacatttccatagagtttacatcctgcagttaaaaggcagggagggctcagcccgggccccacagctccaggccatcccctacgggctgcccacagtgcccccttttctctagccgaatctttttcgaacagcccgggaaaggaaaacggattcacttgctgattttgttcacggcggaagcaccatgttccgttcctttttcaggttcagtttgttgtgtaaatggcggttttttctggtgtgagctttggtgatggtggcagggctcctttgaagagatggttccacctcgtggtctgaagaacaaaccagagaagagtctggtttggccagaggccccctccggtccacgtcaccctgagtacacccctctgattgctctgctgtcaagaagcacgtttccaccagctgtattcaacactacaatgcattttttaaactatatttgcatccaagacaataaagacatcggaatgcgtgccagatttttttttttttgtcaaccaaggatatgtaggtgaacgacacacaatc

SEQ ID NO: 61106 - DNA, 7148 bp, Homo sapiens
tgcagcgctagaaaggaattgtctgaccccagcattgcttcctggctcctttcttcctttttcaggagagcatcctgccgaccacagccctccccactgtgagccttcctgacagcctcatcgcgccccctaccgccccatccctggctcacatggatgagcagggctgtgaacacacctcccggactgaggacccgtttatccagcccacggacttcggtccctcagagccgccactgagtgtcccgcagcccttcctccctgtcttcaccatgcccctgctgtctcccagccccgccccaccgcccatctcccccgtgttaccattagttcctcctcctgccactgccctgaaccccccggctccacccaccttccatcagccacagaagtttgctggagtcaacaaagcgccgtctgtcatcacccacacggcctctgccaccctcacccacgatgcccccgccaccacctttagccagagtcagggccttgtgatcaccacccatcaccctgccccgtcagcggccccttgtgggctggcactgtctcctgtcacccggcctccccagccacggttaacttttgtgcaccccaaacctgtatccttgactgggggcaggcctaagcagccccacaaaatagtgcctgctcccaaaccagagcccgtgtccttggtgttgaagaatgcccgtatcgccccagctgccttttcaggccaaccacaagcggtgatcatgacgtcagggcctctgaagagagaagggatgttggcctccaccgtgtcccagtccaacgtggtcattgcgcctgctgccatcgccagggctcctggggtcccggagttccacagcagcatcctggtgacagatctcggccatggcacgagcagcccgcctgcccccgtctcccggctcttcccaagcacagcgcaagaccccctggggaagggcgagcaggtcccgctgcatgggggcagcccccaggtcactgtcacagggcccagtcgggactgcccaaactcagggcaggcctctccgtgtgcatcggagcagagccccagtcctcaatctccccagaacaactgctcagggaaatccgaccccaaaaatgtggctgcactaaagaaccggcagatgaagcacatctcagctgagcagaaaaggcgcttcaacatcaagatgtgcttcgacatgctcaacagcctcatctccaacaattccaagctgaccagtcacgccatcacactgcagaagactgtggagtacatcaccaagctgcagcaggagagaggccagatgcaggaggaggcccggcggctgcgggaggagatcgaggagctcaatgccaccatcatctcctgccagcagctgctccctgccacgggagtccccgttacccggcgccagtttgatcacatgaaagacatgtttgacgaatacgtgaaaacccggaccttgcagaattggaagttctggattttcagcatcatcatcaagccgctgtttgagtcgttcaagggcatggtgtccaccagcagcctggaggagctgcaccggacggcgctctcctggctggaccagcactgctccctgcccatcctcaggccgatggtattgagcacgctgcggcagctgagcacctccacctccatcctcacagacccggcacagctgccagagcaggcgtccaaggctgtcaccaggattggcaagagattgggagagtcctagctgcttagctggcatgtggccgcatgagatgccaggagacccttccctgcccatggagagtaggctgcgccccccagcccttcctgacgctcagcctcggggcctctctccaactctgccggcccaccgtggcatcgggaggccatgctcaggtctgaagcaggtttggggcctgctgacagcaatagcccgcctttgggaaccccttgctgtgaactctctcactcagtgacctcagtcaccaacctcctctgccctcggggcagcccacacaaaagggaagtgctggccgtgctggtcctgccctgctggtggcctgccgggcctggcgccggtgagcggaatcgatgggatgagggtgacagggcctgctcctgtcctgaggcccagccttgtccctcctgccacgtcctgtccacatgcatgcctctgcctgatgccctgctccactctctggtctgcccgtggggcagttggaaggcgtctttctttctcccctcaactctgacagcacccagcccttgtggatggacttgggcttctattcaggcttatgcatggcaggctgccagggggaagtgccttcttcagaggtcctccaggacacatgtgtgcagaaacggtggatgtggaacacacaggaccagaatggaagcgtgtgatgcacggtggctgctctggctgagaggccctgctgggcatgtttcatctgtccccttttagctccacctgacattgcaggatccatggggactcagcccagggccttctcggatgtcacctcaccgctgtggcccttctgccgttcttctccacttggctccagctgcagctgttgacagatcaagcatgtcctgtgggagcttagaaccctgaagttctagtgtctgaaagatcagactccacgtcctgctgtcagccttgtcatcttgtctgatgtctttcagctgggagccccaaaccaggacagttctcggaccaaagatgcccccacactcaaaagtctgtcccgtcttgtgtttggagaaggaaacaatgttggcaggcagcactctgtggtggtcagccctcagagctgtttctaggcatctctcagatcagacagcaaagaatctacccagatctgggctgggtggaggtgtggctgggctgggggccattctgagcctgcagtgagagtttggcccagcctcagtccttgctcttctctggctacctctgcagggagctgcaggggcaagcactctctccagcactcaggaagcccggccgagggtacctcctcgtggaaagaatgcactttaaagctctgctgaggagttcggagcccaggctttcaggcgacctctgccctccctgcctctcctcaccctccctctcttcctgcagggcctgggaagggctttgagggagcctgggagccatgtgaagaggggcacgcctgggctgtcccacagtttagatccagttggaggttctccctggctcctgcaggcctgcggggatctctccccacttcaggcctccggccagctgcctgccctcttgtctgtgcttcagccctgcacaaaagcagcttggtgacaccactcagccacccagagtacgtgtttacaggctttccagatcaccttcctgtggggtgaacgtaatgaggcggggctggtccttggaatttcccctggaaaatggtaacagactccatccttgacccggggatgagcatgaaggcattgtcccaaaggcagaggccaccgtggtaggaattccaccaaggccagaagggaaaaaggaagaacccaccgtgtctggctgtgcgggccctggggagggtcgtgagtgcagcccctctctacttctgtgcctttgtaaaacgtgtagataaccgcagtggttggctgagccaagaactctcctaaatcagtggctttctccccaccccttgctggggagtcatttttaaaaaaatctgtgggatataaaattggcctcctgctgcttcagcctacctctccctctgctgacttaatgtcgtgattctgtttcttcagatatttaaggctgttaggttgtgtgagccttgaagtgtgtgtgtgtgtcccagcgactgtccactgtccaggagatgcatgtctttgtattggagatatttctgtaactcattctcttggtgctcacgattgccatggccatagggccacagtgccgtatctgctgcagacatgattgtttcttgttctagaggttttcttgttttcgaatcttgcctgatgaatccagccagaccaaggggcctagatttgacctctgtcctgggctcctgggccaggtgcaggaacatctgaggccactctgctggccacctccagtgggtgctgaccacaggatgggctttgtttacactcattttcaccctgattcttgcccccactttcataaaagaaacttcaaaatgctgacgctttggagagtaagaaaatcaatcttggctgggcacggtggctcctgcctgtgatcctagcactttgggaggctgaagctgaaggatcacttgagctcaggagttggagaccaaccctggcaacataacaagaccctgtctctacaaaaaaaaaaaagaaaaaaaaaatttagccgtgtgtagcagtgagtcgcctgtaatcccagctactcgggaggctgagtcaggagaatcacttgagcctagaagttgcagtgagctatgatcatgccacactgtactccagcctggatgacagagtgaaaccctgcctctaaataaaagaaaatagaggcagactgtggtggctcacgcctgtaatcccagcactttggtaggccaaggcgggtggatcacctgcagtcaggagttcacaaccagcctgaccaacatggtgaaaccctgtctatactaaaaatacaaaacattagccacgtgtggtggtacacgcctgtaatcccagctactcgggaggctgagtcaggagaatcacttgaacctgggaggcggaggttgcagtgagctgagattgtaccactgcactccagcctgggtgacagagcaaaaccctatctcaaaaaaaaaaagaagaaaaaaatagaaaatccaaaaagaaaaaccagaaggcctgctggcgtataaatccctgggcgggtttctgataaattgccctgtgctgtcagcccctgcactgcactgctgccttccatggtgggtgggagaccccagagcggggcaggcgccactgagggcttttcttggagtcggccagcaggccacgcagcatccggcaccctgggcgggctggctagctgccttcttaggacatctctactttgaaggattttaccgcaggaagcaatagcagcgctggccattggtgctgatgacagcattgggtctggttgaggggaaggggctggaaagcagcagacccccccagtgctgcgcatggtcccggagctgtcagccaggggagtggggtcagccgtcagccagccctcccgtttcccgcccatgggccctgaccacactcccttttctagaagtcaatcctaaggtttctctgctctggctaagaggatgtaaatttggattcttagagggcatggcacccccagtccctgcccagataaagtagcacagtggcatgcagcacctctgtctgttgctgacgttggggggcttacacacccacctcatctccgtgcacagccatgactggccctgccggcagctggggtgcaggtaagggtctctctcatagaggggagctgcagctgagaactggcgaggccccttcctccaaggccctagctggcccccgggtgaacctgaggtggcaggttcaggttttcaagatggtgaggtctcgctgtctgctggacagtacgttaggctctcagaactcatgggtgtggagctgggcctgtcccgggccagtggacccctgtgtgtgggggatttggggtgctgtgggcctggttatgcactggcagatggaccttgctttggtccagctcttttccttaccctggctctgacgtgggaaggcttggagggcccgtctcatcacccccgttcgccctcagctgtccctttcccttgtcgcctggccgctgcctcgcccgcctgaggcctcctagcaggcagcctgggtgtgagttgagcctctctcttttccctctggtgggaaagtggcctttccctcaacacctgctccccggccccagaggaacccacctgttttggagctcagcttggcccagcgtttccttggggaagggaaaggagggctggacagcactgatccgggcaggcagcgtgtgcagcagtggccagccagagtgccaaagatgcacggggatgtggtgtgtggctccgggccctcgacatctctgctttgggggatttttaccttgtctgcacacttgtcaggggagaggggacagcaaggtgggaggttgaagagctttgaggctcagcagcatgtttgtggcattcggtggacaccatggccttgggcggctggacaggtttttgtgatgtgaaggacatgcatggggcacatggtaagcttggcaagggctccaggaacgctgacgaagggttttaggacccccacccccaccctgggcgggctggctagctgccttcttaggacatctctactttgaaggattttaccgcaggaagagatggttccacctcgtggtctgaagaacaaaccagagaagagtctggtttggccagaggccccctccggtccacgtcaccctgagtacacccctctgattgctctgctgtcaagaagcacgtttccaccagctgtattcaacactacaatgcattttttaaactatatttgcatccaagacaataaagacaccttattttttttgaaaagccaaaaaaaaaaaaaaaaaaaaaaaaaacctttgcgggccccctcgggcccccaaagaagccccttcccacagccaacacaatcccgatgggggcagcgcgcggcgcccccacaataaggggatacgtcgcgacaacatggttggcacatcaaggctggtgttcccccaagagaggaaaaaccccggggcacacggatgaacaacagagcgccgggaggtaaacttaaccacccacaatataaagaaaaacggcccggggggaacaccggggagcggctcctggcacaacaaacccccagaaggtggatctctccaaagcaccaccaaacggggacctcatcacaaccagcggctcccaaggcagagaccgcgactacgacaaataagcgcccgcgacccgtggtcacacacaagagagcgacaggaaagacgcggcacgactacacccgaaagacgcacacggccgcaccgcgagcacaccacgctgcccaaacacacacacacgac

SEQ ID NO: 61107 - DNA, 2147 bp, Homo sapiens
acctaggtacgaggctgggtgttaatcggccgaggctgtcccgggccagtggacccctgtgtgtgggggatttggggtgctgtgggcctggttatgcactggcagatggaccttgctttggtccagctcttttccttaccctggctctgacgtgggaaggcttggagggcccgtctcatcacccccgttcgccctcagctgtccctttcccttgtcgcctggccgctgcctcgcccgcctgaggcctcctagcaggcagcctgggtgtgagttgagcctctctcttttccctctggtgggaaagtggcctttccctcaacacctgctccccggccccagaggaacccacctgttttggagctcagcttggcccagcgtttccttggggaagggaaaggagggctggacagcactgatccgggcaggcagcgtgtgcagcagtggccagccagagtgccaaagatgcacggggatgtggtgtgtggctccgggccctcgacatctctgctttgggggatttttaccttgtctgcacacttgtcaggggagaggggacagcaaggtgggaggttgaagagctttgaggctcagcagcatgtttgtggcattcggtggacaccatggccttgggcggctggacaggtttttgtgatgtgaaggacatgcatggggcacatggtaagcttggcaagggctccaggaacgctgacgaagggttttaggacccccacccccatgcctgtaccagggctggcctccagagcgggtgaggacagagcagctgtgggcttttcattctgaggtcttggcccccctggccaccgcaagggactctttgcttgtcagggcttgcaaaaaccaaccttcgagaaagaaaagggaactcttcacgttgaatgttgactttgtgtgtatgcgtgtgtgtgtgtgtgtgcacgcgcgcgtgtgcgtgtttacttcatggaattttgttttgtgaaattcccctccaatcgtgtcagaatttacctccatgccccagtcacactgttggttctgcgctctgaacctgggtgtagctcatttgaaggactctcttctgcgtttcctaacagttatttggtggtctcaagagttgaggttgtggagggttgggagaaactgaagttctatacatttccatagagtttacatcctgcagttaaaaggcagggagggctcagcccgggccccacagctccaggccatcccctacgggctgcccacagtgcccccttttctctagccgaatctttttcgaacagcccgggaaaggaaaacggattcacttgctgattttgttcacggcggaagcaccatgttccgttcctttttcaggttcagtttgttgtgtaaatggcggttttttctggtgtgagctttggtgatggtggcagggctcctttgaagagatggttccacctcgtggtctgaagaacaaaccagagaagagtctggtttggccagaggccccctccggtccacgtcaccctgagtacacccctctgattgctctgctgtcaagaagcacgtttccaccagctgtattcaacactacaatgcattttttaaactatatttgcatccaagacaataaagacaccttattttttttgaaaagccaaaaaaaaaaaaaaaaaaaaaaaaaacctttgcgggccccctcgggcccccaaagaagccccttcccacagccaacacaatcccgatgggggcagcgcgcggcgcccccacaataaggggatacgtcgcgacaacatggttggcacatcaaggctggtgttcccccaagagaggaaaaaccccggggcacacggatgaacaacagagcgccgggaggtaaacttaaccacccacaatataaagaaaaacggcccggggggaacaccggggagcggctcctggcacaacaaacccccagaaggtggatctctccaaagcaccaccaaacggggacctcatcacaaccagcggctcccaaggcagagaccgcgactacgacaaataagcgcccgcgacccgtggtcacacacaagagagcgacaggaaagacgcggcacgactacacccgaaagacgcacacggccgcaccgcgagcacaccacgctgcccaaacacacacacacgac

SEQ ID NO: 61108 - DNA, 4334 bp, Homo sapiens
tgcagcgctagaaaggaattgtctgaccccagcattgcttcctggctcctttcttcctttttcaggagagcatcctgccgaccacagccctccccactgtgagccttcctgacagcctcatcgcgccccctaccgccccatccctggctcacatggatgagcagggctgtgaacacacctcccggactgaggacccgtttatccagcccacggacttcggtccctcagagccgccactgagtgtcccgcagcccttcctccctgtcttcaccatgcccctgctgtctcccagccccgccccaccgcccatctcccccgtgttaccattagttcctcctcctgccactgccctgaaccccccggctccacccaccttccatcagccacagaagtttgctggagtcaacaaagcgccgtctgtcatcacccacacggcctctgccaccctcacccacgatgcccccgccaccacctttagccagagtcagggccttgtgatcaccacccatcaccctgccccgtcagcggccccttgtgggctggcactgtctcctgtcacccggcctccccagccacggttaacttttgtgcaccccaaacctgtatccttgactgggggcaggcctaagcagccccacaaaatagtgcctgctcccaaaccagagcccgtgtccttggtgttgaagaatgcccgtatcgccccagctgccttttcaggccaaccacaagcggtgatcatgacgtcagggcctctgaagagagaagggatgttggcctccaccgtgtcccagtccaacgtggtcattgcgcctgctgccatcgccagggctcctggggtcccggagttccacagcagcatcctggtgacagatctcggccatggcacgagcagcccgcctgcccccgtctcccggctcttcccaagcacagcgcaagaccccctggggaagggcgagcaggtcccgctgcatgggggcagcccccaggtcactgtcacagggcccagtcgggactgcccaaactcagggcaggcctctccgtgtgcatcggagcagagccccagtcctcaatctccccagaacaactgctcagggaaatccgaccccaaaaatgtggctgcactaaagaaccggcagatgaagcacatctcagctgagcagaaaaggcgcttcaacatcaagatgtgcttcgacatgctcaacagcctcatctccaacaattccaagctgaccagtcacgccatcacactgcagaagactgtggagtacatcaccaagctgcagcaggagagaggccagatgcaggaggaggcccggcggctgcgggaggagatcgaggagctcaatgccaccatcatctcctgccagcagctgctccctgccacgggagtccccgttacccggcgccagtttgatcacatgaaagacatgtttgacgaatacgtgaaaacccggaccttgcagaattggaagttctggattttcagcatcatcatcaagccgctgtttgagtcgttcaagggcatggtgtccaccagcagcctggaggagctgcaccggacggcgctctcctggctggaccagcactgctccctgcccatcctcaggccgatggtattgagcacgctgcggcagctgagcacctccacctccatcctcacagacccggcacagctgccagagcaggcgtccaaggctgtcaccaggattggcaagagattgggagagtcctagctgcttagctggcatgtggccgcatgagatgccaggagacccttccctgcccatggagagtaggctgcgccccccagcccttcctgacgctcagcctcggggcctctctccaactctgccggcccaccgtggcatcgggaggccatgctcaggtctgaagcaggtttggggcctgctgacagcaatagcccgcctttgggaaccccttgctgtgaactctctcactcagtgacctcagtcaccaacctcctctgccctcggggcagcccacacaaaagggaagtgctggccgtgctggtcctgccctgctggtggcctgccgggcctggcgccggtgagcggaatcgatgggatgagggtgacagggcctgctcctgtcctgaggcccagccttgtccctcctgccacgtcctgtccacatgcatgcctctgcctgatgccctgctccactctctggtctgcccgtggggcagttggaaggcgtctttctttctcccctcaactctgacagcacccagcccttgtggatggacttgggcttctattcaggcttatgcatggcaggctgccagggggaagtgccttcttcagaggtcctccaggacacatgtgtgcagaaacggtggatgtggaacacacaggaccagaatggaagcgtgtgatgcacggtggctgctctggctgagaggccctgctgggcatgtttcatctgtccccttttagctccacctgacattgcaggatccatggggactcagcccagggccttctcggatgtcacctcaccgctgtggcccttctgccgttcttctccacttggctccagctgcagctgttgacagatcaagcatgtcctgtgggagcttagaaccctgaagttctagtgtctgaaagatcagactccacgtcctgctgtcagccttgtcatcttgtctgatgtctttcagctgggagccccaaaccaggacagttctcggaccaaagatgcccccacactcaaaagtctgtcccgtcttgtgtttggagaaggaaacaatgttggcaggcagcactctgtggtggtcagccctcagagctgtttctaggcatctctcagatcagacagcaaagaatctacccagatctgggctgggtggaggtgtggctgggctgggggccattctgagcctgcagtgagagtttggcccagcctcagtccttgctcttctctggctacctctgcagggagctgcaggggcaagcactctctccagcactcaggaagcccggccgagggtacctcctcgtggaaagaatgcactttaaagctctgctgaggagttcggagcccaggctttcaggcgacctctgccctccctgcctctcctcaccctccctctcttcctgcagggcctgggaagggctttgagggagcctgggagccatgtgaagaggggcacgcctgggctgtcccacagtttagatccagttggaggttctccctggctcctgcaggcctgcggggatctctccccacttcaggcctccggccagctgcctgccctcttgtctgtgcttcagccctgcacaaaagcagcttggtgacaccactcagccacccagagtacgtgtttacaggctttccagatcaccttcctgtggggtgaacgtaatgaggcggggctggtccttggaatttcccctggaaaatggtaacagactccatccttgacccggggatgagcatgaaggcattgtcccaaaggcagaggccaccgtggtaggaattccaccaaggccagaagggaaaaaggaagaacccaccgtgtctggctgtgcgggccctggggagggtcgtgagtgcagcccctctctacttctgtgcctttgtaaaacgtgtagataaccgcagtggttggctgagccaagaactctcctaaatcagtggctttctccccaccccttgctggggagtcatttttaaaaaaatctgtgggatataaaattggcctcctgctgcttcagcctacctctccctctgctgacttaatgtcgtgattctgtttcttcagatatttaaggctgttaggttgtgtgagccttgaagtgtgtgtgtgtgtcccagcgactgtccactgtccaggagatgcatgtctttgtattggagatatttctgtaactcattctcttggtgctcacgattgccatggccatagggccacagtgccgtatctgctgcagacatgattgtttcttgttctagaggttttcttgttttcgaatcttgcctgatgaatccagccagaccaaggggcctagatttgacctctgtcctgggctcctgggccaggtgcaggaacatctgaggccactctgctggccacctccagtgggtgctgaccacaggatgggctttgtttacactcattttcaccctgattcttgcccccactttcataaaagaaacttcaaaatgctgacgctttggagagtaagaaaatcaatcttggctgggcacggtggctcctgcctgtgatcctagcactttgggaggctgaagctgaaggatcacttgagctcaggagttggtctccaactcctgaggtcgacgcggccgcgaat

SEQ ID NO: 61109 - DNA, 1397 bp, Homo sapiens
  misc_feature (74)..(74): n is a, c, g, or t
  misc_feature (99)..(99): n is a, c, g, or t
  misc_feature (113)..(113): n is a, c, g, or t
  misc_feature (177)..(177): n is a, c, g, or t
aaaaataaggtgtctttattgtcttggatgccaatatagtttaaaaaatgcattgtagtgttgaatacagctgngtggaaacgtgcttccttgacagcnagagcaaatcaganggggtgtacatcagggtgacagtgggcacggagaggggccatctggccaaaccacgactcttcntctggtttgttcttcacgaccacagaggtggaaccatctctgtcaagaggagccctgccaccatcaccacaagcgtcacaccccagaaaaagaccgccactttacacaacacaatctgaacctgggtgtagctcatttgaaggactctcttctgcgtttcctaacagttatttggtggtctcaagagttgaggttgtggagggttgggagaaactgaagttctatacatttccatagagtttacatcctgcagttaaaaggcagggagggctcagcccgggccccacagctccaggccatcccctacgggctgcccacagtgcccccttttctctagccgaatctttttcgaacagcccgggaaaggaaaacggattcacttgctgattttgttcacggcggaagcaccatgttccgttcctttttcaggttcagtttgttgtgtaaatggcggttttttctggtgtgagctttggtgatggtggcagggctcctttgaagagatggttccacctcgtggtctgaagaacaaaccagagaagagtctggtttggccagaggccccctccggtccacgtcaccctgagtacacccctctgattgctctgctgtcaagaagcacgtttccaccagctgtattcaacactacaatgcattttttaaactatatttgcatccaagacaataaagacaccttattttttttgaaaagccaaaaaaaaaaaaaaaaaaaaaaaaaacctttgcgggccccctcgggcccccaaagaagccccttcccacagccaacacaatcccgatgggggcagcgcgcggcgcccccacaataaggggatacgtcgcgacaacatggttggcacatcaaggctggtgttcccccaagagaggaaaaaccccggggcacacggatgaacaacagagcgccgggaggtaaacttaaccacccacaatataaagaaaaacggcccggggggaacaccggggagcggctcctggcacaacaaacccccagaaggtggatctctccaaagcaccaccaaacggggacctcatcacaaccagcggctcccaaggcagagaccgcgactacgacaaataagcgcccgcgacccgtggtcacacacaagagagcgacaggaaagacgcggcacgactacacccgaaagacgcacacggccgcaccgcgagcacaccacgctgcccaaacacacacacacgac

SEQ ID NO: 61110 - DNA, 7846 bp, Homo sapiens
tgcagcgctagaaaggaattgtctgaccccagcattgcttcctggctcctttcttcctttttcaggagagcatcctgccgaccacagccctccccactgtgagccttcctgacagcctcatcgcgccccctaccgccccatccctggctcacatggatgagcagggctgtgaacacacctcccggactgaggacccgtttatccagcccacggacttcggtccctcagagccgccactgagtgtcccgcagcccttcctccctgtcttcaccatgcccctgctgtctcccagccccgccccaccgcccatctcccccgtgttaccattagttcctcctcctgccactgccctgaaccccccggctccacccaccttccatcagccacagaagtttgctggagtcaacaaagcgccgtctgtcatcacccacacggcctctgccaccctcacccacgatgcccccgccaccacctttagccagagtcagggccttgtgatcaccacccatcaccctgccccgtcagcggccccttgtgggctggcactgtctcctgtcacccggcctccccagccacggttaacttttgtgcaccccaaacctgtatccttgactgggggcaggcctaagcagccccacaaaatagtgcctgctcccaaaccagagcccgtgtccttggtgttgaagaatgcccgtatcgccccagctgccttttcaggccaaccacaagcggtgatcatgacgtcagggcctctgaagagagaagggatgttggcctccaccgtgtcccagtccaacgtggtcattgcgcctgctgccatcgccagggctcctggggtcccggagttccacagcagcatcctggtgacagatctcggccatggcacgagcagcccgcctgcccccgtctcccggctcttcccaagcacagcgcaagaccccctggggaagggcgagcaggtcccgctgcatgggggcagcccccaggtcactgtcacagggcccagtcgggactgcccaaactcagggcaggcctctccgtgtgcatcggagcagagccccagtcctcaatctccccagaacaactgctcagggaaatccgaccccaaaaatgtggctgcactaaagaaccggcagatgaagcacatctcagctgagcagaaaaggcgcttcaacatcaagatgtgcttcgacatgctcaacagcctcatctccaacaattccaagctgaccagtcacgccatcacactgcagaagactgtggagtacatcaccaagctgcagcaggagagaggccagatgcaggaggaggcccggcggctgcgggaggagatcgaggagctcaatgccaccatcatctcctgccagcagctgctccctgccacgggagtccccgttacccggcgccagtttgatcacatgaaagacatgtttgacgaatacgtgaaaacccggaccttgcagaattggaagttctggattttcagcatcatcatcaagccgctgtttgagtcgttcaagggcatggtgtccaccagcagcctggaggagctgcaccggacggcgctctcctggctggaccagcactgctccctgcccatcctcaggccgatggtattgagcacgctgcggcagctgagcacctccacctccatcctcacagacccggcacagctgccagagcaggcgtccaaggctgtcaccaggattggcaagagattgggagagtcctagctgcttagctggcatgtggccgcatgagatgccaggagacccttccctgcccatggagagtaggctgcgccccccagcccttcctgacgctcagcctcggggcctctctccaactctgccggcccaccgtggcatcgggaggccatgctcaggtctgaagcaggtttggggcctgctgacagcaatagcccgcctttgggaaccccttgctgtgaactctctcactcagtgacctcagtcaccaacctcctctgccctcggggcagcccacacaaaagggaagtgctggccgtgctggtcctgccctgctggtggcctgccgggcctggcgccggtgagcggaatcgatgggatgagggtgacagggcctgctcctgtcctgaggcccagccttgtccctcctgccacgtcctgtccacatgcatgcctctgcctgatgccctgctccactctctggtctgcccgtggggcagttggaaggcgtctttctttctcccctcaactctgacagcacccagcccttgtggatggacttgggcttctattcaggcttatgcatggcaggctgccagggggaagtgccttcttcagaggtcctccaggacacatgtgtgcagaaacggtggatgtggaacacacaggaccagaatggaagcgtgtgatgcacggtggctgctctggctgagaggccctgctgggcatgtttcatctgtccccttttagctccacctgacattgcaggatccatggggactcagcccagggccttctcggatgtcacctcaccgctgtggcccttctgccgttcttctccacttggctccagctgcagctgttgacagatcaagcatgtcctgtgggagcttagaaccctgaagttctagtgtctgaaagatcagactccacgtcctgctgtcagccttgtcatcttgtctgatgtctttcagctgggagccccaaaccaggacagttctcggaccaaagatgcccccacactcaaaagtctgtcccgtcttgtgtttggagaaggaaacaatgttggcaggcagcactctgtggtggtcagccctcagagctgtttctaggcatctctcagatcagacagcaaagaatctacccagatctgggctgggtggaggtgtggctgggctgggggccattctgagcctgcagtgagagtttggcccagcctcagtccttgctcttctctggctacctctgcagggagctgcaggggcaagcactctctccagcactcaggaagcccggccgagggtacctcctcgtggaaagaatgcactttaaagctctgctgaggagttcggagcccaggctttcaggcgacctctgccctccctgcctctcctcaccctccctctcttcctgcagggcctgggaagggctttgagggagcctgggagccatgtgaagaggggcacgcctgggctgtcccacagtttagatccagttggaggttctccctggctcctgcaggcctgcggggatctctccccacttcaggcctccggccagctgcctgccctcttgtctgtgcttcagccctgcacaaaagcagcttggtgacaccactcagccacccagagtacgtgtttacaggctttccagatcaccttcctgtggggtgaacgtaatgaggcggggctggtccttggaatttcccctggaaaatggtaacagactccatccttgacccggggatgagcatgaaggcattgtcccaaaggcagaggccaccgtggtaggaattccaccaaggccagaagggaaaaaggaagaacccaccgtgtctggctgtgcgggccctggggagggtcgtgagtgcagcccctctctacttctgtgcctttgtaaaacgtgtagataaccgcagtggttggctgagccaagaactctcctaaatcagtggctttctccccaccccttgctggggagtcatttttaaaaaaatctgtgggatataaaattggcctcctgctgcttcagcctacctctccctctgctgacttaatgtcgtgattctgtttcttcagatatttaaggctgttaggttgtgtgagccttgaagtgtgtgtgtgtgtcccagcgactgtccactgtccaggagatgcatgtctttgtattggagatatttctgtaactcattctcttggtgctcacgattgccatggccatagggccacagtgccgtatctgctgcagacatgattgtttcttgttctagaggttttcttgttttcgaatcttgcctgatgaatccagccagaccaaggggcctagatttgacctctgtcctgggctcctgggccaggtgcaggaacatctgaggccactctgctggccacctccagtgggtgctgaccacaggatgggctttgtttacactcattttcaccctgattcttgcccccactttcataaaagaaacttcaaaatgctgacgctttggagagtaagaaaatcaatcttggctgggcacggtggctcctgcctgtgatcctagcactttgggaggctgaagctgaaggatcacttgagctcaggagttggagaccaaccctggcaacataacaagaccctgtctctacaaaaaaaaaaaagaaaaaaaaaatttagccgtgtgtagcagtgagtcgcctgtaatcccagctactcgggaggctgagtcaggagaatcacttgagcctagaagttgcagtgagctatgatcatgccacactgtactccagcctggatgacagagtgaaaccctgcctctaaataaaagaaaatagaggcagactgtggtggctcacgcctgtaatcccagcactttggtaggccaaggcgggtggatcacctgcagtcaggagttcacaaccagcctgaccaacatggtgaaaccctgtctatactaaaaatacaaaacattagccacgtgtggtggtacacgcctgtaatcccagctactcgggaggctgagtcaggagaatcacttgaacctgggaggcggaggttgcagtgagctgagattgtaccactgcactccagcctgggtgacagagcaaaaccctatctcaaaaaaaaaaagaagaaaaaaatagaaaatccaaaaagaaaaaccagaaggcctgctggcgtataaatccctgggcgggtttctgataaattgccctgtgctgtcagcccctgcactgcactgctgccttccatggtgggtgggagaccccagagcggggcaggcgccactgagggcttttcttggagtcggccagcaggccacgcagcatccggcaccctgggcgggctggctagctgccttcttaggacatctctactttgaaggattttaccgcaggaagcaatagcagcgctggccattggtgctgatgacagcattgggtctggttgaggggaaggggctggaaagcagcagacccccccagtgctgcgcatggtcccggagctgtcagccaggggagtggggtcagccgtcagccagccctcccgtttcccgcccatgggccctgaccacactcccttttctagaagtcaatcctaaggtttctctgctctggctaagaggatgtaaatttggattcttagagggcatggcacccccagtccctgcccagataaagtagcacagtggcatgcagcacctctgtctgttgctgacgttggggggcttacacacccacctcatctccgtgcacagccatgactggccctgccggcagctggggtgcaggtaagggtctctctcatagaggggagctgcagctgagaactggcgaggccccttcctccaaggccctagctggcccccgggtgaacctgaggtggcaggttcaggttttcaagatggtgaggtctcgctgtctgctggacagtacgttaggctctcagaactcatgggtgtggagctgggcctgtcccgggccagtggacccctgtgtgtgggggatttggggtgctgtgggcctggttatgcactggcagatggaccttgctttggtccagctcttttccttaccctggctctgacgtgggaaggcttggagggcccgtctcatcacccccgttcgccctcagctgtccctttcccttgtcgcctggccgctgcctcgcccgcctgaggcctcctagcaggcagcctgggtgtgagttgagcctctctcttttccctctggtgggaaagtggcctttccctcaacacctgctccccggccccagaggaacccacctgttttggagctcagcttggcccagcgtttccttggggaagggaaaggagggctggacagcactgatccgggcaggcagcgtgtgcagcagtggccagccagagtgccaaagatgcacggggatgtggtgtgtggctccgggccctcgacatctctgctttgggggatttttaccttgtctgcacacttgtcaggggagaggggacagcaaggtgggaggttgaagagctttgaggctcagcagcatgtttgtggcattcggtggacaccatggccttgggcggctggacaggtttttgtgatgtgaaggacatgcatggggcacatggtaagcttggcaagggctccaggaacgctgacgaagggttttaggacccccacccccatgcctgtaccagggctggcctccagagcgggtgaggacagagcagctgtgggcttttcattctgaggtcttggcccccctggccaccgcaagggactctttgcttgtcagggcttgcaaaaaccaaccttcgagaaagaaaagggaactcttcacgttgaatgttgactttgtgtgtatgcgtgtgtgtgtgtgtgtgcacgcgcgcgtgtgcgtgtttacttcatggaattttgttttgtgaaattcccctccaatcgtgtcagaatttacctccatgccccagtcacactgttggttctgcgctctgaacctgggtgtagctcatttgaaggactctcttctgcgtttcctaacagttatttggtggtctcaagagttgaggttgtggagggttgggagaaactgaagttctatacatttccatagagtttacatcctgcctctcctcaccctccctctcttcctgcagggcctgggaagggctttgagggagcctgggagccatgtgaagaggggcacgcctgggctgtcccacagtttagatccagttggaggttctccctggctcctgcaggcctgcggggatctctccccacttcaggcctccggccagctgcctgccctcttgtctgtgcttcagccctgcacaaaagcagcttggtgacaccactcagccacccagattttcaggttcagtttgttgtgtaaatggcggttttttctggtgtgagctttggtgatggtggcagggctcctttgaagagatggttccacctcgtggtctgaagaacaaaccagagaagagtctggtttggccagaggccccctccggtccacgtcaccctgagtacacccctctgattgctctgctgtcaagaagcacgtttccaccagctgtattcaacactacaatgcattttttaaactatatttgcatccaagacaataaagacaccttattttttttgaaaagccaaaaaaaaaaaaaaaaaaaaaaaaaacctttgcgggccccctcgggcccccaaagaagccccttcccacagccaacacaatcccgatgggggcagcgcgcggcgcccccacaataaggggatacgtcgcgacaacatggttggcacatcaaggctggtgttcccccaagagaggaaaaaccccggggcacacggatgaacaacagagcgccgggaggtaaacttaaccacccacaatataaagaaaaacggcccggggggaacaccggggagcggctcctggcacaacaaacccccagaaggtggatctctccaaagcaccaccaaacggggacctcatcacaaccagcggctcccaaggcagagaccgcgactacgacaaataagcgcccgcgacccgtggtcacacacaagagagcgacaggaaagacgcggcacgactacacccgaaagacgcacacggccgcaccgcgagcacaccacgctgcccaaacacacacacacgac

SEQ ID NO: 61111 - DNA, 7774 bp, Homo sapiens
tgcagcgctagaaaggaattgtctgaccccagcattgcttcctggctcctttcttcctttttcaggagagcatcctgccgaccacagccctccccactgtgagccttcctgacagcctcatcgcgccccctaccgccccatccctggctcacatggatgagcagggctgtgaacacacctcccggactgaggacccgtttatccagcccacggacttcggtccctcagagccgccactgagtgtcccgcagcccttcctccctgtcttcaccatgcccctgctgtctcccagccccgccccaccgcccatctcccccgtgttaccattagttcctcctcctgccactgccctgaaccccccggctccacccaccttccatcagccacagaagtttgctggagtcaacaaagcgccgtctgtcatcacccacacggcctctgccaccctcacccacgatgcccccgccaccacctttagccagagtcagggccttgtgatcaccacccatcaccctgccccgtcagcggccccttgtgggctggcactgtctcctgtcacccggcctccccagccacggttaacttttgtgcaccccaaacctgtatccttgactgggggcaggcctaagcagccccacaaaatagtgcctgctcccaaaccagagcccgtgtccttggtgttgaagaatgcccgtatcgccccagctgccttttcaggccaaccacaagcggtgatcatgacgtcagggcctctgaagagagaagggatgttggcctccaccgtgtcccagtccaacgtggtcattgcgcctgctgccatcgccagggctcctggggtcccggagttccacagcagcatcctggtgacagatctcggccatggcacgagcagcccgcctgcccccgtctcccggctcttcccaagcacagcgcaagaccccctggggaagggcgagcaggtcccgctgcatgggggcagcccccaggtcactgtcacagggcccagtcgggactgcccaaactcagggcaggcctctccgtgtgcatcggagcagagccccagtcctcaatctccccagaacaactgctcagggaaatccgaccccaaaaatgtggctgcactaaagaaccggcagatgaagcacatctcagctgagcagaaaaggcgcttcaacatcaagatgtgcttcgacatgctcaacagcctcatctccaacaattccaagctgaccagtcacgccatcacactgcagaagactgtggagtacatcaccaagctgcagcaggagagaggccagatgcaggaggaggcccggcggctgcgggaggagatcgaggagctcaatgccaccatcatctcctgccagcagctgctccctgccacgggagtccccgttacccggcgccagtttgatcacatgaaagacatgtttgacgaatacgtgaaaacccggaccttgcagaattggaagttctggattttcagcatcatcatcaagccgctgtttgagtcgttcaagggcatggtgtccaccagcagcctggaggagctgcaccggacggcgctctcctggctggaccagcactgctccctgcccatcctcaggccgatggtattgagcacgctgcggcagctgagcacctccacctccatcctcacagacccggcacagctgccagagcaggcgtccaaggctgtcaccaggattggcaagagattgggagagtcctagctgcttagctggcatgtggccgcatgagatgccaggagacccttccctgcccatggagagtaggctgcgccccccagcccttcctgacgctcagcctcggggcctctctccaactctgccggcccaccgtggcatcgggaggccatgctcaggtctgaagcaggtttggggcctgctgacagcaatagcccgcctttgggaaccccttgctgtgaactctctcactcagtgacctcagtcaccaacctcctctgccctcggggcagcccacacaaaagggaagtgctggccgtgctggtcctgccctgctggtggcctgccgggcctggcgccggtgagcggaatcgatgggatgagggtgacagggcctgctcctgtcctgaggcccagccttgtccctcctgccacgtcctgtccacatgcatgcctctgcctgatgccctgctccactctctggtctgcccgtggggcagttggaaggcgtctttctttctcccctcaactctgacagcacccagcccttgtggatggacttgggcttctattcaggcttatgcatggcaggctgccagggggaagtgccttcttcagaggtcctccaggacacatgtgtgcagaaacggtggatgtggaacacacaggaccagaatggaagcgtgtgatgcacggtggctgctctggctgagaggccctgctgggcatgtttcatctgtccccttttagctccacctgacattgcaggatccatggggactcagcccagggccttctcggatgtcacctcaccgctgtggcccttctgccgttcttctccacttggctccagctgcagctgttgacagatcaagcatgtcctgtgggagcttagaaccctgaagttctagtgtctgaaagatcagactccacgtcctgctgtcagccttgtcatcttgtctgatgtctttcagctgggagccccaaaccaggacagttctcggaccaaagatgcccccacactcaaaagtctgtcccgtcttgtgtttggagaaggaaacaatgttggcaggcagcactctgtggtggtcagccctcagagctgtttctaggcatctctcagatcagacagcaaagaatctacccagatctgggctgggtggaggtgtggctgggctgggggccattctgagcctgcagtgagagtttggcccagcctcagtccttgctcttctctggctacctctgcagggagctgcaggggcaagcactctctccagcactcaggaagcccggccgagggtacctcctcgtggaaagaatgcactttaaagctctgctgaggagttcggagcccaggctttcaggcgacctctgccctccctgcctctcctcaccctccctctcttcctgcagggcctgggaagggctttgagggagcctgggagccatgtgaagaggggcacgcctgggctgtcccacagtttagatccagttggaggttctccctggctcctgcaggcctgcggggatctctccccacttcaggcctccggccagctgcctgccctcttgtctgtgcttcagccctgcacaaaagcagcttggtgacaccactcagccacccagagtacgtgtttacaggctttccagatcaccttcctgtggggtgaacgtaatgaggcggggctggtccttggaatttcccctggaaaatggtaacagactccatccttgacccggggatgagcatgaaggcattgtcccaaaggcagaggccaccgtggtaggaattccaccaaggccagaagggaaaaaggaagaacccaccgtgtctggctgtgcgggccctggggagggtcgtgagtgcagcccctctctacttctgtgcctttgtaaaacgtgtagataaccgcagtggttggctgagccaagaactctcctaaatcagtggctttctccccaccccttgctggggagtcatttttaaaaaaatctgtgggatataaaattggcctcctgctgcttcagcctacctctccctctgctgacttaatgtcgtgattctgtttcttcagatatttaaggctgttaggttgtgtgagccttgaagtgtgtgtgtgtgtcccagcgactgtccactgtccaggagatgcatgtctttgtattggagatatttctgtaactcattctcttggtgctcacgattgccatggccatagggccacagtgccgtatctgctgcagacatgattgtttcttgttctagaggttttcttgttttcgaatcttgcctgatgaatccagccagaccaaggggcctagatttgacctctgtcctgggctcctgggccaggtgcaggaacatctgaggccactctgctggccacctccagtgggtgctgaccacaggatgggctttgtttacactcattttcaccctgattcttgcccccactttcataaaagaaacttcaaaatgctgacgctttggagagtaagaaaatcaatcttggctgggcacggtggctcctgcctgtgatcctagcactttgggaggctgaagctgaaggatcacttgagctcaggagttggagaccaaccctggcaacataacaagaccctgtctctacaaaaaaaaaaaagaaaaaaaaaatttagccgtgtgtagcagtgagtcgcctgtaatcccagctactcgggaggctgagtcaggagaatcacttgagcctagaagttgcagtgagctatgatcatgccacactgtactccagcctggatgacagagtgaaaccctgcctctaaataaaagaaaatagaggcagactgtggtggctcacgcctgtaatcccagcactttggtaggccaaggcgggtggatcacctgcagtcaggagttcacaaccagcctgaccaacatggtgaaaccctgtctatactaaaaatacaaaacattagccacgtgtggtggtacacgcctgtaatcccagctactcgggaggctgagtcaggagaatcacttgaacctgggaggcggaggttgcagtgagctgagattgtaccactgcactccagcctgggtgacagagcaaaaccctatctcaaaaaaaaaaagaagaaaaaaatagaaaatccaaaaagaaaaaccagaaggcctgctggcgtataaatccctgggcgggtttctgataaattgccctgtgctgtcagcccctgcactgcactgctgccttccatggtgggtgggagaccccagagcggggcaggcgccactgagggcttttcttggagtcggccagcaggccacgcagcatccggcaccctgggcgggctggctagctgccttcttaggacatctctactttgaaggattttaccgcaggaagcaatagcagcgctggccattggtgctgatgacagcattgggtctggttgaggggaaggggctggaaagcagcagacccccccagtgctgcgcatggtcccggagctgtcagccaggggagtggggtcagccgtcagccagccctcccgtttcccgcccatgggccctgaccacactcccttttctagaagtcaatcctaaggtttctctgctctggctaagaggatgtaaatttggattcttagagggcatggcacccccagtccctgcccagataaagtagcacagtggcatgcagcacctctgtctgttgctgacgttggggggcttacacacccacctcatctccgtgcacagccatgactggccctgccggcagctggggtgcaggtaagggtctctctcatagaggggagctgcagctgagaactggcgaggccccttcctccaaggccctagctggcccccgggtgaacctgaggtggcaggttcaggttttcaagatggtgaggtctcgctgtctgctggacagtacgttaggctctcagaactcatgggtgtggagctgggcctgtcccgggccagtggacccctgtgtgtgggggatttggggtgctgtgggcctggttatgcactggcagatggaccttgctttggtccagctcttttccttaccctggctctgacgtgggaaggcttggagggcccgtctcatcacccccgttcgccctcagctgtccctttcccttgtcgcctggccgctgcctcgcccgcctgaggcctcctagcaggcagcctgggtgtgagttgagcctctctcttttccctctggtgggaaagtggcctttccctcaacacctgctccccggccccagaggaacccacctgttttggagctcagcttggcccagcgtttccttggggaagggaaaggagggctggacagcactgatccgggcaggcagcgtgtgcagcagtggccagccagagtgccaaagatgcacggggatgtggtgtgtggctccgggccctcgacatctctgctttgggggatttttaccttgtctgcacacttgtcaggggagaggggacagcaaggtgggaggttgaagagctttgaggctcagcagcatgtttgtggcattcggtggacaccatggccttgggcggctggacaggtttttgtgatgtgaaggacatgcatggggcacatggtaagcttggcaagggctccaggaacgctgacgaagggttttaggacccccacccccatgcctgtaccagggctggcctccagagcgggtgaggacagagcagctgtgggcttttcattctgaggtcttggcccccctggccaccgcaagggactctttgcttgtcagggcttgcaaaaaccaaccttcgagaaagaaaagggaactcttcacgttgaatgttgactttgtgtgtatgcgtgtgtgtgtgtgtgtgcacgcgcgcgtgtgcgtgtttacttcatggaattttgttttgtgaaattcccctccaatcgtgtcagaatttacctccatgccccagtcacactgttggttctgcgctctgaacctgggtgtagctcatttgaaggactctcttctgcgtttcctaacagttatttggtggtctcaagagttgaggttgtggagggttgggagaaactgaagttctatacatttccatagagtttacatcctgcagttaaaaggcagggagggctcagcccgggccccacagctccaggccatcccctacgggctgcccacagtgcccccttttctctagccgaatctttttcgaacagcccgggaaaggaaaacggattcacttgctgattttgttcacggcggaagcaccatgttccgttcctttttcaggttcagtttgttgtgtaaatggcggttttttctggtgtgagctttggtgatggtggcagggctcctttgaagagatggttccacctcgtggtctgaagaacaaaccagagaagagtctggtttggccagaggccccctccggtccacgtcaccctgagtacacccctctgattgctctgctgtcaagaagcacgtttccaccagctgtattcaacactacaatgcattttttaaactatatttgcatccaagacaataaagacaccttattttttttgaaaagccaaaaaaaaaaaaaaaaaaaaaaaaaacctttgcgggccccctcgggcccccaaagaagccccttcccacagccaacacaatcccgatgggggcagcgcgcggcgcccccacaataaggggatacgtcgcgacaacatggttggcacatcaaggctggtgttcccccaagagaggaaaaaccccggggcacacggatgaacaacagagcgccgggaggtaaacttaaccacccacaatataaagaaaaacggcccggggggaacaccggggagcggctcctggcacaacaaacccccagaaggtggatctctccaaagcaccaccaaacggggacctcatcacaaccagcggctcccaaggcagagaccgcgactacgacaaataagcgcccgcgacccgtggtcacacacaagagagcgacaggaaagacgcggcacgactacacccgaaagacgcacacggccgcaccgcgagcacaccacgctgcccaaacacacacacacgac

SEQ ID NO: 61112 - DNA, 1239 bp, Homo sapiens
ggtggccgcgccggcgctcttcgccgggtgtgacgtactaatcgtgcgccaccgctgccggtgggcccggggctcgcgggaggggaaggaggagggggggaggagtggcggcggcggcggtggcgctggtggcggcggtggcggaggtggaggtggaggtggaagctgaagctgaagcagagccagaggcggcgcggcggggtgctcggcggcgcggcacgggcccagaagcgttggaatcctgaattgagacggctgcgcctaaagacagcaggagtggcggggccgccgccgtcgccggagagatgagccgggaagcttgaggccggagacgcccgccttcgggcccgtccgcccggcttccccgctcccgggtactggaagatgaaagagactatacaagggaccgggtcctgggggcctgagcctcctggacccggcatacccccagcttactcaagtcccaggcgggagcgtcttcgttggcccccacctcccaaaccccgactcaagtcaggtggagggtttgggccagatcctgggtcagggcctcctttcatgtactctgcccaacggttttgggggacaatctgggccagaaggggagcgcagcttggcaccccctgatgccagcatcctcatcagcaatgtgtgcagcatcggggaccatgtggcccaggagctttttcagggctcagatttgggcatggcagaagaggcagagaggcctggggagaaagccggccagcacagccccctgcgagaggagcatgtgacctgcgtacagagcatcttggacgaattccttcaaacgtatggcagcctcatacccctcagcactgatgaggtagtagagaagctggaggacattttccagcaggagttttccaccccttccaggaagggcctggtgttgcagctgatccagtcttaccagcggatgccaggcaatgccatggtgaggggctggctacagaaaagcccctttcttcctctgtttgcaggggagtgtggccctgtggcctgggtggagcagtcatcctcccccttccccgtgcagggagcaggaaatcagtgctgggggtggtgggcggacaataggatcactgcctgccagatcttcaaacttttatttatatatatatatatatatatatatatatatataaataaaaatgccacggtcctgctctggtcaataaaggatcctttgttgatacgtaaaaaaaaaaaacactt

SEQ ID NO: 61113 - DNA, 1587 bp, Homo sapiens
gttttcatttctaaatgctaatcctttttctttcttcctgtctatgagtaggaactctctctccatccctgtagaatctcttggacatgtttatctcatgcttatggggtccccatttcttggagtgggattgacattggtggattctgcttcagtgtatccttcttgcggtcttatttgcatgcatgagtcaactgtgtgcatcccattgtgctttccccaggccagtctctcatgcccattccatttcccctgccctataggcctcctttcatgtactctgcccaacggttttgggggacaatctgggccagaaggggagcgcagcttggcaccccctgatgccagcatcctcatcagcaatgtgtgcagcatcggggaccatgtggcccaggagctttttcagggctcagatttgggcatggcagaagaggcagagaggcctggggagaaagccggccagcacagccccctgcgagaggagcatgtgacctgcgtacagagcatcttggacgaattccttcaaacgtatggcagcctcatacccctcagcactgatgaggtagtagagaagctggaggacattttccagcaggagttttccaccccttccagaggtgaggcttgaaagccctccttgaaagaagggctggggccttggggatgtggagagaatactgctgccttttcttccatagggctgtagttggggaggaggaagctagagctgaaggggaggactctgcaggcaggtgccaaatccttggaagctgatgggagagtctttacctgggaccctgaaatgttctacctgagtagtcatgtttatctttctggggagtgggcctttcgcaggtcctcagaaggacccatcatgagccagaaaaaagggagtcagttagaatttgtattccagggagtagtaggtatttctgtgtgccccagctgcatcatcttttgtgtgactccacccttggcctactcaggaagggcctggtgttgcagctgatccagtcttaccagcggatgccaggcaatgccatggtgaggggcttccgagtggcttataagcggcacgtgctgaccatggatgacttggggaccttgtatggacagaactggctcaatgaccaggtgagaaagggtagagaaacaggcctgagaggggattcagggagcagggtgtctggggccctctgcatgggggagccctgtacccatgccgcaccctccatggcaagctgcctcccatcttctccccaggtgatgaacatgtatggagacctggtcatggacacagtccctgaaaagtaggcccaaccagataggtcagtacccagaggaacttctgcagttttaagcagctttttaagctcctttcatctctttcattttacacagagagggtctctgtttcagggagagaggtggtagtggtagtgtattaatttcaaatccgtaatcttgggctctggatttatcagttgttttcctttctgccagtatttagtgtttttcgctatggccagccccaaggattgggatgggttcctattgtaactattgtaaaacaagatttaaaaaaaa

SEQ ID NO: 61114 - DNA, 612 bp, Homo sapiens
cgaattggtacacttacctgtacccaccggggtggaaaatcggatgggccggccgctctagaagtactcaaggagctgtgtcactgcaaactcactgtgtgagcctcgtaccccagaccccaagcccataaatgggaagggagacatgggagtcccttcccaagaaactccagttcctttcctctcttgcctcttcccactcacttccctttggtttttcatatttaaatgtttcaatttctgtatttttttttctttgagagaatacttgttgatttctgatgtgcagggggtggctacagaaaagcccctttcttcctctgtttgcaggggagtgtggccctgtggcctgggtggagcagtcatcctcccccttccccgtgcagggagcaggaaatcagtgctgggggtggtgggcggacaataggatcactgcctgccagatcttcaaacttttatttatatatatatatatatatatatatatatatataaataaaaatgccacggtcctatatatatatatatatataaatataaatatataaatgccacggtcctgctctggtcaataaaggatcctttgttgatacgtaaaaaaaaaaaacactt

SEQ ID NO: 61115 - DNA, 665 bp, Homo sapiens
ggtggccgcgccggcgctcttcgccgggtgtgacgtactaatcgtgcgccaccgctgccggtgggcccggggctcgcgggaggggaaggaggagggggggaggagtggcggcggcggcggtggcgctggtggcggcggtggcggaggtggaggtggaggtggaagctgaagctgaagcagagccagaggcggcgcggcggggtgctcggcggcgcggcacgggcccagaagcgttggaatcctgaattgagacggctgcgcctaaagacagcaggagtggcggggccgccgccgtcgccggagagatgagccgggaagcttgaggccggagacgcccgccttcgggcccgtccgcccggcttccccgctcccgggtactggaagatgaaagagaggctacagaaaagcccctttcttcctctgtttgcaggggagtgtggccctgtggcctgggtggagcagtcatcctcccccttccccgtgcagggagcaggaaatcagtgctgggggtggtgggcggacaataggatcactgcctgccagatcttcaaacttttatttatatatatatatatatatatatatatatatataaataaaaatgccacggtcctgctctggtcaataaaggatcctttgttgatacgtaaaaaaaaaaaacactt

SEQ ID NO: 61116 - DNA, 1487 bp, Homo sapiens
gaaaccgttgggcagagtacatgaaaggaggcccgagtcagggtccagaggagaatctgggccagaaggggagcgcagcttggcaccccctgatgccagcatcctcatcagcaatgtgtgcagcatcggggaccatgtggcccaggagctttttcagggctcagatttgggcatggcagaagaggcagagaggcctggggagaaagccggccagcacagccccctgcgagaggagcatgtgacctgcgtacagagcatcttggacgaattccttcaaacgtatggcagcctcatacccctcagcactgatgaggtagtagagaagctggaggacattttccagcaggagttttccaccccttccaggaagggcctggtgttgcagctgatccagtcttaccagcggatgccaggcaatgccatggtgaggggcttccgagtggcttataagcggcacgtgctgaccatggatgacttggggaccttgtatggacagaactggctcaatgaccaggtgatgaacatgtatggagacctggtcatggacacagtccctgaaaaggtgcatttcttcaatagtttcttctatgataaactccgtaccaagggttatgatggggtgaaaaggtggaccaaaaacgtggacatcttcaataaggagctactgctaatccccatccacctggaggtgcattggtccctcatctctgttgatgtgaggcgacgcaccatcacctattttgactcgcagcgtaccctaaaccgccgctgccctaagcatattgccaagtatctacaggcagaggcggtaaagaaagaccgactggatttccaccagggctggaaaggttacttcaaaatgaatgtggccaggcagaataatgacagtgactgtggtgcttttgtgttgcagtactgcaagcatctggccctgtctcagccattcagcttcacccagcaggacatgcccaaacttcgtcggcagatctacaaggagctgtgtcactgcaaactcactgtgtgagcctcgtaccccagaccccaagcccataaatgggaagggagacatgggagtcccttcccaagaaactccagttcctttcctctcttgcctcttcccactcacttccctttggtttttcatatttaaatgtttcaatttctgtatttttttttctttgagagaatacttgttgatttctgatgtgcagggggtggctacagaaaagcccctttcttcctctgtttgcaggggagtgtggccctgtggcctgggtggagcagtcatcctcccccttccccgtgcagggagcaggaaatcagtgctgggggtggtgggcggacaataggatcactgcctgccagatcttcaaacttttatttatatatatatatatatatatatatatatatataaataaaaatgccacggtcctgctctggtcaataaaggatcctttgttgatacgtaaaaaaaaaaaacactt

SEQ ID NO: 61117 - DNA, 1736 bp, Homo sapiens
gttttcatttctaaatgctaatcctttttctttcttcctgtctatgagtaggaactctctctccatccctgtagaatctcttggacatgtttatctcatgcttatggggtccccatttcttggagtgggattgacattggtggattctgcttcagtgtatccttcttgcggtcttatttgcatgcatgagtcaactgtgtgcatcccattgtgctttccccaggccagtctctcatgcccattccatttcccctgccctataggcctcctttcatgtactctgcccaacggttttgggggacaatctgggccagaaggggagcgcagcttggcaccccctgatgccagcatcctcatcagcaatgtgtgcagcatcggggaccatgtggcccaggagctttttcagggctcagatttgggcatggcagaagaggcagagaggcctggggagaaagccggccagcacagccccctgcgagaggagcatgtgacctgcgtacagagcatcttggacgaattccttcaaacgtatggcagcctcatacccctcagcactgatgaggtagtagagaagctggaggacattttccagcaggagttttccaccccttccaggaagggcctggtgttgcagctgatccagtcttaccagcggatgccaggcaatgccatggtgaggggcttccgagtggcttataagcggcacgtgctgaccatggatgacttggggaccttgtatggacagaactggctcaatgaccaggtgatgaacatgtatggagacctggtcatggacacagtccctgaaaaggtgcatttcttcaatagtttcttctatgataaactccgtaccaagggttatgatggggtgaaaaggtggaccaaaaacgtggacatcttcaataaggagctactgctaatccccatccacctggaggtgcattggtccctcatctctgttgatgtgaggcgacgcaccatcacctattttgactcgcagcgtaccctaaaccgccgctgccctaagcatattgccaagtatctacaggcagaggcggtaaagaaagaccgactggatttccaccagggctggaaaggttacttcaaaatgaatgtggccaggcagaataatgacagtgactgtggtgcttttgtgttgcagtactgcaagcatctggccctgtctcagccattcagcttcacccagcaggacatgcccaaacttcgtcggcagatctacaaggagctgtgtcactgcaaactcactgtgtgagcctcgtaccccagaccccaagcccataaatgggaagggagacatgggagtcccttcccaagaaactccagttcctttcctctcttgcctcttcccactcacttccctttggtttttcatatttaaatgtttcaatttctgtatttttttttctttgagagaatacttgttgatttctgatgtgcagggggtggctacagaaaagcccctttcttcctctgtttgcaggggagtgtggccctgtggcctgggtggagcagtcatcctcccccttccccgtgcagggagcaggaaatcagtgctgggggtggtgggcggacaataggatcactgcctgccagatcttcaaacttttatttatatatatatatatatatatatatatatatataaataaaaatgccacggtcctgctctggtcaataaaggatcctttgttgatacgtaaaaaaaaaaaacactt

SEQ ID NO: 61118 - DNA, 2494 bp, Homo sapiens
ggtggccgcgccggcgctcttcgccgggtgtgacgtactaatcgtgcgccaccgctgccggtgggcccggggctcgcgggaggggaaggaggagggggggaggagtggcggcggcggcggtggcgctggtggcggcggtggcggaggtggaggtggaggtggaagctgaagctgaagcagagccagaggcggcgcggcggggtgctcggcggcgcggcacgggcccagaagcgttggaatcctgaattgagacggctgcgcctaaagacagcaggagtggcggggccgccgccgtcgccggagagatgagccgggaagcttgaggccggagacgcccgccttcgggcccgtccgcccggcttccccgctcccgggtactggaagatgaaagagactatacaagggaccgggtcctgggggcctgagcctcctggacccggcatacccccagcttactcaagtcccaggcgggagcgtcttcgttggcccccacctcccaaaccccgactcaagtcaggtggagggtttgggccagatcctgggtcagggaccacagtgccagccagacgcctccctgtcccccgaccctcttttgatgcctcagcaagtgaagaggaggaagaagaggaggaggaggaggatgaagatgaagaggaggaagtggcagcttggaggctgcccccaagatggagtcagctgggaacctcccagcggccccgcccttcccgccccactcatcgaaaaacctgctcacagcgccgccgccgagccatgagagccttccggatgctgctctactcaaaaagcacctcgctgacattccactggaagctttgggggcgccaccggggccggcggcggggcctcgcacaccccaagaaccatctttcaccccagcaagggggtgcgacgccacaggtgccatccccctgttgtcgttttgactccccccgggggccacctccaccccggctgggtctgctaggtgctctcatggctgaggatggggtgagagggtctccaccagtgccctctgggccccccatggaggaagatggactcaggtggactccaaagtctcctctggaccctgactcgggcctcctttcatgtactctgcccaacggttttgggggacaatctgggccagaaggggagcgcagcttggcaccccctgatgccagcatcctcatcagcaatgtgtgcagcatcggggaccatgtggcccaggagctttttcagggctcagatttgggcatggcagaagaggcagagaggcctggggagaaagccggccagcacagccccctgcgagaggagcatgtgacctgcgtacagagcatcttggacgaattccttcaaacgtatggcagcctcatacccctcagcactgatgaggtagtagagaagctggaggacattttccagcaggagttttccaccccttccaggaagggcctggtgttgcagctgatccagtcttaccagcggatgccaggcaatgccatggtgaggggcttccgagtggcttataagcggcacgtgctgaccatggatgacttggggaccttgtatggacagaactggctcaatgaccaggtgatgaacatgtatggagacctggtcatggacacagtccctgaaaaggtggacatcttcaataaggagctactgctaatccccatccacctggaggtgcattggtccctcatctctgttgatgtgaggcgacgcaccatcacctattttgactcgcagcgtaccctaaaccgccgctgccctaagcatattgccaagtatctacaggcagaggcggtaaagaaagaccgactggatttccaccagggctggaaaggttacttcaaaatgaatgtggccaggcagaataatgacagtgactgtggtgcttttgtgttgcagtactgcaagcatctggccctgtctcagccattcagcttcacccagcaggacatgcccaaacttcgtcggcagatctacaaggagctgtgtcactgcaaactcactgtgtgagcctcgtaccccagaccccaagcccataaatgggaagggagacatgggagtcccttcccaagaaactccagttcctttcctctcttgcctcttcccactcacttccctttggtttttcatatttaaatgtttcaatttctgtatttttttttctttgagagaatacttgttgatttctgatgtgcagggggtggctacagaaaagcccctttcttcctctgtttgcaggggagtgtggccctgtggcctgggtggagcagtcatcctcccccttccccgtgcagggagcaggaaatcagtgctgggggtggtgggcggacaataggatcactgcctgccagatcttcaaacttttatttatatatatatatatatatatatatatatatataaataaaaatgccacggtcctgctctggtcaataaaggatcctttgttgatacgtaaaaaaaaaaaacactt

SEQ ID NO: 61119 - DNA, 1084 bp, Homo sapiens
tgagagaatacttgttgatttctgatgtgagtccgagtggcttataagcggcacgtgctgaccatggatgacttggggaccttgtatggacagaactggctcaatgaccaggtgatgaacatgtatggagacctggtcatggacacagtccctgaaaaggtgcatttcttcaatagtttcttctatgataaactccgtaccaagggttatgatggggtgaaaaggtggaccaaaaacgtggacatcttcaataaggagctactgctaatccccatccacctggaggtgcattggtccctcatctctgttgatgtgaggcgacgcaccatcacctattttgactcgcagcgtaccctaaaccgccgctgccctaagcatattgccaagtatctacaggcagaggcggtaaagaaagaccgactggatttccaccagggctggaaaggttacttcaaaatgaatgtggccaggcagaataatgacagtgactgtggtgcttttgtgttgcagtactgcaagcatctggccctgtctcagccattcagcttcacccagcaggacatgcccaaacttcgtcggcagatctacaaggagctgtgtcactgcaaactcactgtgtgagcctcgtaccccagaccccaagcccataaatgggaagggagacatgggagtcccttcccaagaaactccagttcctttcctctcttgcctcttcccactcacttccctttggtttttcatatttaaatgtttcaatttctgtatttttttttctttgagagaatacttgttgatttctgatgtgcagggggtggctacagaaaagcccctttcttcctctgtttgcaggggagtgtggccctgtggcctgggtggagcagtcatcctcccccttccccgtgcagggagcaggaaatcagtgctgggggtggtgggcggacaataggatcactgcctgccagatcttcaaacttttatttatatatatatatatatatatatatatatatataaataaaaatgccacggtcctgctctggtcaataaaggatcctttgttgatacgtaaaaaaaaaaaacactt

SEQ ID NO: 61120 - DNA, 874 bp, Homo sapiens
  misc_feature (6)..(6): n is a, c, g, or t
cttggngcgaaaaggtggaccaaaaacgtggacatcttcaataaggagctactgctaatccccatccacctggaggtgcattggtccctcatctctgttgatgtgaggcgacgcaccatcacctattttgactcgcagcgtaccctaaaccgccgctgccctaagcatattgccaagtatctacaggcagaggcggtaaagaaagaccgactggatttccaccagggctggaaaggttacttcaaaatgaatgtggccaggcagaataatgacagtgactgtggtgcttttgtgttgcagtactgcaagcatctggccctgtctcagccattcagcttcacccagcaggacatgcccaaacttcgtcggcagatctacaaggagctgtgtcactgcaaactcactgtgtgagcctcgtaccccagaccccaagcccataaatgggaagggagacatgggagtcccttcccaagaaactccagttcctttcctctcttgcctcttcccactcacttccctttggtttttcatatttaaatgtttcaatttctgtatttttttttctttgagagaatacttgttgatttctgatgtgcagggggtggctacagaaaagcccctttcttcctctgtttgcaggggagtgtggccctgtggcctgggtggagcagtcatcctcccccttccccgtgcagggagcaggaaatcagtgctgggggtggtgggcggacaataggatcactgcctgccagatcttcaaacttttatttatatatatatatatatatatatatatatatataaataaaaatgccacggtcctgctctggtcaataaaggatcctttgttgatacgtaaaaaaaaaaaacactt

SEQ ID NO: 61121 - DNA, 565 bp, Homo sapiens
cgaattggtacacttacctgtacccaccggggtggaaaatcggatgggccggccgctctagaagtactcaaggagctgtgtcactgcaaactcactgtgtgagcctcgtaccccagaccccaagcccataaatgggaagggagacatgggagtcccttcccaagaaactccagttcctttcctctcttgcctcttcccactcacttccctttggtttttcatatttaaatgtttcaatttctgtatttttttttctttgagagaatacttgttgatttctgatgtgcagggggtggctacagaaaagcccctttcttcctctgtttgcaggggagtgtggccctgtggcctgggtggagcagtcatcctcccccttccccgtgcagggagcaggaaatcagtgctgggggtggtgggcggacaataggatcactgcctgccagatcttcaaacttttatttatatatatatatatatatatatatatatatataaataaaaatgccacggtcctgctctggtcaataaaggatcctttgttgatacgtaaaaaaaaaaaacactt

SEQ ID NO: 61122 - DNA, 2421 bp, Homo sapiens
ggtggccgcgccggcgctcttcgccgggtgtgacgtactaatcgtgcgccaccgctgccggtgggcccggggctcgcgggaggggaaggaggagggggggaggagtggcggcggcggcggtggcgctggtggcggcggtggcggaggtggaggtggaggtggaagctgaagctgaagcagagccagaggcggcgcggcggggtgctcggcggcgcggcacgggcccagaagcgttggaatcctgaattgagacggctgcgcctaaagacagcaggagtggcggggccgccgccgtcgccggagagatgagccgggaagcttgaggccggagacgcccgccttcgggcccgtccgcccggcttccccgctcccgggtactggaagatgaaagagactatacaagggaccgggtcctgggggcctgagcctcctggacccggcatacccccagcttactcaagtcccaggcgggagcgtcttcgttggcccccacctcccaaaccccgactcaagtcaggtggagggtttgggccagatcctgggtcagggaccacagtgccagccagacgcctccctgtcccccgaccctcttttgatgcctcagcaagtgaagaggaggaagaagaggaggaggaggaggatgaagatgaagaggaggaagtggcagcttggaggctgcccccaagatggagtcagctgggaacctcccagcggccccgcccttcccgccccactcatcgaaaaacctgctcacagcgccgccgccgagccatgagagccttccggatgctgctctactcaaaaagcacctcgctgacattccactggaagctttgggggcgccaccggggccggcggcggggcctcgcacaccccaagaaccatctttcaccccagcaagggggtgcgacgccacaggtgccatccccctgttgtcgttttgactccccccgggggccacctccaccccggctgggtctgctaggtgctctcatggctgaggatggggtgagagggtctccaccagtgccctctgggccccccatggaggaagatggactcaggtggactccaaagtctcctctggaccctgactcgggcctcctttcatgtactctgcccaacggttttgggggacaatctgggccagaaggggagcgcagcttggcaccccctgatgccagcatcctcatcagcaatgtgtgcagcatcggggaccatgtggcccaggagctttttcagggctcagatttgggcatggcagaagaggcagagaggcctggggagaaagccggccagcacagccccctgcgagaggagcatgtgacctgcgtacagagcatcttggacgaattccttcaaacgtatggcagcctcatacccctcagcactgatgaggtagtagagaagctggaggacattttccagcaggagttttccaccccttccaggaagggcctggtgttgcagctgatccagtcttaccagcggatgccaggcaatgccatggtgaggggcttccgagtggcttataagcggcacgtgctgaccatggatgacttggggaccttgtatggacagaactggctcaatgaccaggtgatgaacatgtatggagacctggtcatggacacagtccctgaaaaggtgcatttcttcaatagtttcttctatgataaactccgtaccaagggttatgatggggtgaaaaggtggaccaaaaacgtggacatcttcaataaggagctactgctaatccccatccacctggaggtgcattggtccctcatctctgttgatgtgaggcgacgcaccatcacctattttgactcgcagcgtaccctaaaccgccgctgccctaagcatattgccaagtatctacaggcagaggcggtaaagaaagaccgactggatttccaccagggctggaaaggttacttcaaaatgaatgtggccaggcagaataatgacagtgactgtggtgcttttgtgttgcagtactgcaagcatctggccctgtctcagccattcagcttcacccagcaggacatgcccaaacttcgtcggcagatctacaaggagctgtgtcactgcaaactcacacttccctttggtttttcatatttaaatgtttcaatttctgtatttttttttctttgagagaatacttgttgatttctgatgtgcagggggtggctacagaaaagcccctttcttcctctgtttgcaggggagtgtggccctgtggcctgggtggagcagtcatcctcccccttccccgtgcagggagcaggaaatcagtgctgggggtggtgggcggacaataggatcactgcctgccagatcttcaaacttttatttatatatatagctctggtcaataaaggatcctttgttgatacgtaaaaaaaaaaaacactt

SEQ ID NO: 61123 - DNA, 1790 bp, Homo sapiens
ggtggccgcgccggcgctcttcgccgggtgtgacgtactaatcgtgcgccaccgctgccggtgggcccggggctcgcgggaggggaaggaggagggggggaggagtggcggcggcggcggtggcgctggtggcggcggtggcggaggtggaggtggaggtggaagctgaagctgaagcagagccagaggcggcgcggcggggtgctcggcggcgcggcacgggcccagaagcgttggaatcctgaattgagacggctgcgcctaaagacagcaggagtggcggggccgccgccgtcgccggagagatgagccgggaagcttgaggccggagacgcccgccttcgggcccgtccgcccggcttccccgctcccgggtactggaagatgaaagagactatacaagggaccgggtcctgggggcctgagcctcctggacccggcatacccccagcttactcaagtcccaggcgggagcgtcttcgttggcccccacctcccaaaccccgactcaagtcaggtggagggtttgggccagatcctgggtcagggaccacagtgccagccagacgcctccctgtcccccgaccctcttttgatgcctcagcaagtgaagaggaggaagaagaggaggaggaggaggatgaagatgaagaggaggaagtggcagcttggaggctgcccccaagatggagtcagctgggaacctcccagcggccccgcccttcccgccccactcatcgaaaaacctgctcacagcgccgccgccgagccatgagagccttccggatgctgctctactcaaaaagcacctcgctgacattccactggaagctttgggggcgccaccggggccggcggcggggcctcgcacaccccaagaaccatctttcaccccagcaagggggtgcgacgccacaggtgccatccccctgttgtcgttttgactccccccgggggccacctccaccccggctgggtctgctaggtgctctcatggctgaggatggggtgagagggtctccaccagtgccctctgggccccccatggaggaagatggactcaggtggactccaaagtctcctctggaccctgactcgggcctcctttcatgtactctgcccaacggttttgggggacaatctgggccagaaggggagcgcagcttggcaccccctgatgccagcatcctcatcagcaatgtgtgcagcatcggggaccatgtggcccaggagctttttcagggctcagatttgggcatggcagaagaggcagagaggcctggggagaaagccggccagcacagccccctgcgagaggagcatgtgacctgcgtacagagcatcttggacgaattccttcaaacgtatggcagcctcatacccctcagcactgatgaggtagtagagaagctggaggacattttccagcaggagttttccaccccttccaggaagggcctggtgttgcagctgatccagtcttaccagcggatgccaggcaatgccatggtgaggggctggctacagaaaagcccctttcttcctctgtttgcaggggagtgtggccctgtggcctgggtggagcagtcatcctcccccttccccgtgcagggagcaggaaatcagtgctgggggtggtgggcggacaataggatcactgcctgccagatcttcaaacttttatttatatatatatatatatatatatatatatatataaataaaaatgccacggtcctgctctggtcaataaaggatcctttgttgatacgtaaaaaaaaaaaacactt

SEQ ID NO: 61124 - DNA, 1833 bp, Homo sapiens
ggtggccgcgccggcgctcttcgccgggtgtgacgtactaatcgtgcgccaccgctgccggtgggcccggggctcgcgggaggggaaggaggagggggggaggagtggcggcggcggcggtggcgctggtggcggcggtggcggaggtggaggtggaggtggaagctgaagctgaagcagagccagaggcggcgcggcggggtgctcggcggcgcggcacgggcccagaagcgttggaatcctgaattgagacggctgcgcctaaagacagcaggagtggcggggccgccgccgtcgccggagagatgagccgggaagcttgaggccggagacgcccgccttcgggcccgtccgcccggcttccccgctcccgggtactggaagatgaaagagactatacaagggaccgggtcctgggggcctgagcctcctggacccggcatacccccagcttactcaagtcccaggcgggagcgtcttcgttggcccccacctcccaaaccccgactcaagtcaggtggagggtttgggccagatcctgggtcagggaccacagtgccagccagacgcctccctgtcccccgaccctcttttgatgcctcagcaagtgaagaggaggaagaagaggaggaggaggaggatgaagatgaagaggaggaagtggcagcttggaggctgcccccaagatggagtcagctgggaacctcccagcggccccgcccttcccgccccactcatcgaaaaacctgctcacagcgccgccgccgagccatgagagccttccggatgctgctctactcaaaaagcacctcgctgacattccactggaagctttgggggcgccaccggggccggcggcggggcctcgcacaccccaagaaccatctttcaccccagcaagggggtgcgacgccacaggtgccatccccctgttgtcgttttgactccccccgggggccacctccaccccggctgggtctgctaggtgctctcatggctgaggatggggtgagagggtctccaccagtgccctctgggccccccatggaggaagatggactcaggtggactccaaagtctcctctggaccctgactcgggcctcctttcatgtactctgcccaacggttttgggggacaatctgggccagaaggggagcgcagcttggcaccccctgatgccagcatcctcatcagcaatgtgtgcagcatcggggaccatgtggcccaggagctttttcagggctcagatttgggcatggcagaagaggcagagaggcctggggagaaagccggccagcacagccccctgcgagaggagcatgtgacctgcgtacagagcatcttggacgaattccttcaaacgtatggcagcctcatacccctcagcactgatgaggtagtagagaagctggaggacattttccagcaggagttttccaccccttccagcacttccctttggtttttcatatttaaatgtttcaatttctgtatttttttttctttgagagaatacttgttgatttctgatgtgcagggggtggctacagaaaagcccctttcttcctctgtttgcaggggagtgtggccctgtggcctgggtggagcagtcatcctcccccttccccgtgcagggagcaggaaatcagtgctgggggtggtgggcggacaataggatcactgcctgccagatcttcaaacttttatttatatatatatatatatatatatatatatatataaataaaaatgccacggtcctatatatatatatatatataaatataaatatataaatgccacggtcctgctcatgataaataaaggatcc

SEQ ID NO: 61125 - DNA, 425 bp, Homo sapiens
gtcagttgtggagcaggaagtaatctgttttagaacaccaaaacactggcttcactggttctcttctggacttctccatcccacattgggactgggtctctagtcttgggcctctggccttcatagagctccctgctaacctccaactcagtgtattttctccatctaaaacattctatcaagtaagaacactagctttagagtcaggctgtttttgaaccccaggctgtgggaccctggctccctttggggatgttctctgaaggatggagacacatctcatatgaaatgtgtagcacaggtcctgacacggggggtttctcatggcttgctttgttaacacccagtactgcaagcatctggccctgtctcagccattcagcttcacccagcaggacatgcccaaacttcgtcggcagatctac

SEQ ID NO: 61126 - DNA, 2572 bp, Homo sapiens
ggtggccgcgccggcgctcttcgccgggtgtgacgtactaatcgtgcgccaccgctgccggtgggcccggggctcgcgggaggggaaggaggagggggggaggagtggcggcggcggcggtggcgctggtggcggcggtggcggaggtggaggtggaggtggaagctgaagctgaagcagagccagaggcggcgcggcggggtgctcggcggcgcggcacgggcccagaagcgttggaatcctgaattgagacggctgcgcctaaagacagcaggagtggcggggccgccgccgtcgccggagagatgagccgggaagcttgaggccggagacgcccgccttcgggcccgtccgcccggcttccccgctcccgggtactggaagatgaaagagactatacaagggaccgggtcctgggggcctgagcctcctggacccggcatacccccagcttactcaagtcccaggcgggagcgtcttcgttggcccccacctcccaaaccccgactcaagtcaggtggagggtttgggccagatcctgggtcagggaccacagtgccagccagacgcctccctgtcccccgaccctcttttgatgcctcagcaagtgaagaggaggaagaagaggaggaggaggaggatgaagatgaagaggaggaagtggcagcttggaggctgcccccaagatggagtcagctgggaacctcccagcggccccgcccttcccgccccactcatcgaaaaacctgctcacagcgccgccgccgagccatgagagccttccggatgctgctctactcaaaaagcacctcgctgacattccactggaagctttgggggcgccaccggggccggcggcggggcctcgcacaccccaagaaccatctttcaccccagcaagggggtgcgacgccacaggtgccatccccctgttgtcgttttgactccccccgggggccacctccaccccggctgggtctgctaggtgctctcatggctgaggatggggtgagagggtctccaccagtgccctctgggccccccatggaggaagatggactcaggtggactccaaagtctcctctggaccctgactcgggcctcctttcatgtactctgcccaacggttttgggggacaatctgggccagaaggggagcgcagcttggcaccccctgatgccagcatcctcatcagcaatgtgtgcagcatcggggaccatgtggcccaggagctttttcagggctcagatttgggcatggcagaagaggcagagaggcctggggagaaagccggccagcacagccccctgcgagaggagcatgtgacctgcgtacagagcatcttggacgaattccttcaaacgtatggcagcctcatacccctcagcactgatgaggtagtagagaagctggaggacattttccagcaggagttttccaccccttccaggaagggcctggtgttgcagctgatccagtcttaccagcggatgccaggcaatgccatggtgaggggcttccgagtggcttataagcggcacgtgctgaccatggatgacttggggaccttgtatggacagaactggctcaatgaccaggtgatgaacatgtatggagacctggtcatggacacagtccctgaaaaggtgcatttcttcaatagtttcttctatgataaactccgtaccaagggttatgatggggtgaaaaggtggaccaaaaacgtggacatcttcaataaggagctactgctaatccccatccacctggaggtgcattggtccctcatctctgttgatgtgaggcgacgcaccatcacctattttgactcgcagcgtaccctaaaccgccgctgccctaagcatattgccaagtatctacaggcagaggcggtaaagaaagaccgactggatttccaccagggctggaaaggttacttcaaaatgaatgtggccaggcagaataatgacagtgactgtggtgcttttgtgttgcagtactgcaagcatctggccctgtctcagccattcagcttcacccagcaggacatgcccaaacttcgtcggcagatctacaaggagctgtgtcactgcaaactcactgtgtgagcctcgtaccccagaccccaagcccataaatgggaagggagacatgggagtcccttcccaagaaactccagttcctttcctctcttgcctcttcccactcacttccctttggtttttcatatttaaatgtttcaatttctgtatttttttttctttgagagaatacttgttgatttctgatgtgcagggggtggctacagaaaagcccctttcttcctctgtttgcaggggagtgtggccctgtggcctgggtggagcagtcatcctcccccttccccgtgcagggagcaggaaatcagtgctgggggtggtgggcggacaataggatcactgcctgccagatcttcaaacttttatttatatatatatatatatatatatatatatatataaataaaaatgccacggtcctgctctggtcaataaaggatcctttgttgatacgtaaaaaaaaaaaacactt

SEQ ID NO: 61127 - DNA, 1266 bp, Homo sapiens
ctagaggaccccgagctcgggactgcgtacagagcatcttggacgaattccttcaaacgtatggcagcctcatacccctcagcactgatgaggtagtagagaagctggaggacattttccagcaggagttttccaccccttccaggaagggcctggtgttgcagctgatccagtcttaccagcggatgccaggcaatgccatggtgaggggcttccgagtggcttataagcggcacgtgctgaccatggatgacttggggaccttgtatggacagaactggctcaatgaccaggtgatgaacatgtatggagacctggtcatggacacagtccctgaaaaggtgcatttcttcaatagtttcttctatgataaactccgtaccaagggttatgatggggtgaaaaggtggaccaaaaacgtggacatcttcaataaggagctactgctaatccccatccacctggaggtgcattggtccctcatctctgttgatgtgaggcgacgcaccatcacctattttgactcgcagcgtaccctaaaccgccgctgccctaagcatattgccaagtatctacaggcagaggcggtaaagaaagaccgactggatttccaccagggctggaaaggttacttcaaaatgaatgtggccaggcagaataatgacagtgactgtggtgcttttgtgttgcagtactgcaagcatctggccctgtctcagccattcagcttcacccagcaggacatgcccaaacttcgtcggcagatctacaaggagctgtgtcactgcaaactcactgtgtgagcctcgtaccccagaccccaagcccataaatgggaagggagacatgggagtcccttcccaagaaactccagttcctttcctctcttgcctcttcccactcacttccctttggtttttcatatttaaatgtttcaatttctgtatttttttttctttgagagaatacttgttgatttctgatgtgcagggggtggctacagaaaagcccctttcttcctctgtttgcaggggagtgtggccctgtggcctgggtggagcagtcatcctcccccttccccgtgcagggagcaggaaatcagtgctgggggtggtgggcggacaataggatcactgcctgccagatcttcaaacttttatttatatatatatatatatatatatatatatatataaataaaaatgccacggtcctgctctggtcaataaaggatcctttgttgatacgtaaaaaaaaaaaacactt

SEQ ID NO: 61128 - DNA, 2021 bp, Homo sapiens
ggtggccgcgccggcgctcttcgccgggtgtgacgtactaatcgtgcgccaccgctgccggtgggcccggggctcgcgggaggggaaggaggagggggggaggagtggcggcggcggcggtggcgctggtggcggcggtggcggaggtggaggtggaggtggaagctgaagctgaagcagagccagaggcggcgcggcggggtgctcggcggcgcggcacgggcccagaagcgttggaatcctgaattgagacggctgcgcctaaagacagcaggagtggcggggccgccgccgtcgccggagagatgagccgggaagcttgaggccggagacgcccgccttcgggcccgtccgcccggcttccccgctcccgggtactggaagatgaaagagactatacaagggaccgggtcctgggggcctgagcctcctggacccggcatacccccagcttactcaagtcccaggcgggagcgtcttcgttggcccccacctcccaaaccccgactcaagtcaggtggagggtttgggccagatcctgggtcagggcctcctttcatgtactctgcccaacggttttgggggacaatctgggccagaaggggagcgcagcttggcaccccctgatgccagcatcctcatcagcaatgtgtgcagcatcggggaccatgtggcccaggagctttttcagggctcagatttgggcatggcagaagaggcagagaggcctggggagaaagccggccagcacagccccctgcgagaggagcatgtgacctgcgtacagagcatcttggacgaattccttcaaacgtatggcagcctcatacccctcagcactgatgaggtagtagagaagctggaggacattttccagcaggagttttccaccccttccaggaagggcctggtgttgcagctgatccagtcttaccagcggatgccaggcaatgccatggtgaggggcttccgagtggcttataagcggcacgtgctgaccatggatgacttggggaccttgtatggacagaactggctcaatgaccaggtgatgaacatgtatggagacctggtcatggacacagtccctgaaaaggtgcatttcttcaatagtttcttctatgataaactccgtaccaagggttatgatggggtgaaaaggtggaccaaaaacgtggacatcttcaataaggagctactgctaatccccatccacctggaggtgcattggtccctcatctctgttgatgtgaggcgacgcaccatcacctattttgactcgcagcgtaccctaaaccgccgctgccctaagcatattgccaagtatctacaggcagaggcggtaaagaaagaccgactggatttccaccagggctggaaaggttacttcaaaatgaatgtggccaggcagaataatgacagtgactgtggtgcttttgtgttgcagtactgcaagcatctggccctgtctcagccattcagcttcacccagcaggacatgcccaaacttcgtcggcagatctacaaggagctgtgtcactgcaaactcactgtgtgagcctcgtaccccagaccccaagcccataaatgggaagggagacatgggagtcccttcccaagaaactccagttcctttcctctcttgcctcttcccactcacttccctttggtttttcatatttaaatgtttcaatttctgtatttttttttctttgagagaatacttgttgatttctgatgtgcagggggtggctacagaaaagcccctttcttcctctgtttgcaggggagtgtggccctgtggcctgggtggagcagtcatcctcccccttccccgtgcagggagcaggaaatcagtgctgggggtggtgggcggacaataggatcactgcctgccagatcttcaaacttttatttatatatatatatatatatatatatatatatataaataaaaatgccacggtcctgctctggtcaataaaggatcctttgttgatacgtaaaaaaaaaaaacactt

SEQ ID NO: 61129 - DNA, 2107 bp, Homo sapiens
gttttcatttctaaatgctaatcctttttctttcttcctgtctatgagtaggaactctctctccatccctgtagaatctcttggacatgtttatctcatgcttatggggtccccatttcttggagtgggattgacattggtggattctgcttcagtgtatccttcttgcggtcttatttgcatgcatgagtcaactgtgtgcatcccattgtgctttccccaggccagtctctcatgcccattccatttcccctgccctataggcctcctttcatgtactctgcccaacggttttgggggacaatctgggccagaaggggagcgcagcttggcaccccctgatgccagcatcctcatcagcaatgtgtgcagcatcggggaccatgtggcccaggagctttttcagggctcagatttgggcatggcagaagaggcagagaggcctggggagaaagccggccagcacagccccctgcgagaggagcatgtgacctgcgtacagagcatcttggacgaattccttcaaacgtatggcagcctcatacccctcagcactgatgaggtagtagagaagctggaggacattttccagcaggagttttccaccccttccagaggtgaggcttgaaagccctccttgaaagaagggctggggccttggggatgtggagagaatactgctgccttttcttccatagggctgtagttggggaggaggaagctagagctgaaggggaggactctgcaggcaggtgccaaatccttggaagctgatgggagagtctttacctgggaccctgaaatgttctacctgagtagtcatgtttatctttctggggagtgggcctttcgcaggtcctcagaaggacccatcatgagccagaaaaaagggagtcagttagaatttgtattccagggagtagtaggtatttctgtgtgccccagctgcatcatcttttgtgtgactccacccttggcctactcaggaagggcctggtgttgcagctgatccagtcttaccagcggatgccaggcaatgccatggtgaggggcttccgagtggcttataagcggcacgtgctgaccatggatgacttggggaccttgtatggacagaactggctcaatgaccaggtgatgaacatgtatggagacctggtcatggacacagtccctgaaaaggtgcatttcttcaatagtttcttctatgataaactccgtaccaagggttatgatggggtgaaaaggtggaccaaaaacgtggacatcttcaataaggagctactgctaatccccatccacctggaggtgcattggtccctcatctctgttgatgtgaggcgacgcaccatcacctattttgactcgcagcgtaccctaaaccgccgctgccctaagcatattgccaagtatctacaggcagaggcggtaaagaaagaccgactggatttccaccagggctggaaaggttacttcaaaatgaatgtggccaggcagaataatgacagtgactgtggtgcttttgtgttgcagtactgcaagcatctggccctgtctcagccattcagcttcacccagcaggacatgcccaaacttcgtcggcagatctacaaggagctgtgtcactgcaaactcactgtgtgagcctcgtaccccagaccccaagcccataaatgggaagggagacatgggagtcccttcccaagaaactccagttcctttcctctcttgcctcttcccactcacttccctttggtttttcatatttaaatgtttcaatttctgtatttttttttctttgagagaatacttgttgatttctgatgtgcagggggtggctacagaaaagcccctttcttcctctgtttgcaggggagtgtggccctgtggcctgggtggagcagtcatcctcccccttccccgtgcagggagcaggaaatcagtgctgggggtggtgggcggacaataggatcactgcctgccagatcttcaaacttttatttatatatatatatatatatatatatatatatataaataaaaatgccacggtcctgctctggtcaataaaggatcctttgttgatacgtaaaaaaaaaaaacactt

SEQ ID NO: 61130 - DNA, 2521 bp, Homo sapiens
ggtggccgcgccggcgctcttcgccgggtgtgacgtactaatcgtgcgccaccgctgccggtgggcccggggctcgcgggaggggaaggaggagggggggaggagtggcggcggcggcggtggcgctggtggcggcggtggcggaggtggaggtggaggtggaagctgaagctgaagcagagccagaggcggcgcggcggggtgctcggcggcgcggcacgggcccagaagcgttggaatcctgaattgagacggctgcgcctaaagacagcaggagtggcggggccgccgccgtcgccggagagatgagccgggaagcttgaggccggagacgcccgccttcgggcccgtccgcccggcttccccgctcccgggtactggaagatgaaagagactatacaagggaccgggtcctgggggcctgagcctcctggacccggcatacccccagcttactcaagtcccaggcgggagcgtcttcgttggcccccacctcccaaaccccgactcaagtcaggtggagggtttgggccagatcctgggtcagggaccacagtgccagccagacgcctccctgtcccccgaccctcttttgatgcctcagcaagtgaagaggaggaagaagaggaggaggaggaggatgaagatgaagaggaggaagtggcagcttggaggctgcccccaagatggagtcagctgggaacctcccagcggccccgcccttcccgccccactcatcgaaaaacctgctcacagcgccgccgccgagccatgagagccttccggatgctgctctactcaaaaagcacctcgctgacattccactggaagctttgggggcgccaccggggccggcggcggggcctcgcacaccccaagaaccatctttcaccccagcaagggggtgcgacgccacaggtgccatccccctgttgtcgttttgactccccccgggggccacctccaccccggctgggtctgctaggtgctctcatggctgaggatggggtgagagggtctccaccagtgccctctgggccccccatggaggaagatggactcaggtggactccaaagtctcctctggaccctgactcgggcctcctttcatgtactctgcccaacggttttgggggacaatctgggccagaaggggagcgcagcttggcaccccctgatgccagcatcctcatcagcaatgtgtgcagcatcggggaccatgtggcccaggagctttttcagggctcagatttgggcatggcagaagaggcagagaggcctggggagaaagccggccagcacagccccctgcgagaggagcatgtgacctgcgtacagagcatcttggacgaattccttcaaacgtatggcagcctcatacccctcagcactgatgaggtagtagagaagctggaggacattttccagcaggagttttccaccccttccaggaagggcctggtgttgcagctgatccagtcttaccagcggatgccaggcaatgccatggtgaggggcttccgagtggcttataagcggcacgtgctgaccatggatgacttggggaccttgtatggacagaactggctcaatgaccaggtgatgaacatgtatggagacctggtcatggacacagtccctgaaaaggtgcatttcttcaatagtttcttctatgataaactccgtaccaagggttatgatggggtgaaaaggtggaccaaaaacgtggacatcttcaataaggagctactgctaatccccatccacctggaggtgcattggtccctcatctctgttgatgtgaggcgacgcaccatcacctattttgactcgcagcgtaccctaaaccgccgctgccctaagcatattgccaagtatctacaggcagaggcggtaaagaaagaccgactggatttccaccagggctggaaaggttacttcaaaatgtactgcaagcatctggccctgtctcagccattcagcttcacccagcaggacatgcccaaacttcgtcggcagatctacaaggagctgtgtcactgcaaactcactgtgtgagcctcgtaccccagaccccaagcccataaatgggaagggagacatgggagtcccttcccaagaaactccagttcctttcctctcttgcctcttcccactcacttccctttggtttttcatatttaaatgtttcaatttctgtatttttttttctttgagagaatacttgttgatttctgatgtgcagggggtggctacagaaaagcccctttcttcctctgtttgcaggggagtgtggccctgtggcctgggtggagcagtcatcctcccccttccccgtgcagggagcaggaaatcagtgctgggggtggtgggcggacaataggatcactgcctgccagatcttcaaacttttatttatatatatatatatatatatatatatatatataaataaaaatgccacggtcctgctctggtcaataaaggatcctttgttgatacgtaaaaaaaaaaaacactt

SEQ ID NO: 61131 - DNA, 2619 bp, Homo sapiens
ggtggccgcgccggcgctcttcgccgggtgtgacgtactaatcgtgcgccaccgctgccggtgggcccggggctcgcgggaggggaaggaggagggggggaggagtggcggcggcggcggtggcgctggtggcggcggtggcggaggtggaggtggaggtggaagctgaagctgaagcagagccagaggcggcgcggcggggtgctcggcggcgcggcacgggcccagaagcgttggaatcctgaattgagacggctgcgcctaaagacagcaggagtggcggggccgccgccgtcgccggagagatgagccgggaagcttgaggccggagacgcccgccttcgggcccgtccgcccggcttccccgctcccgggtactggaagatgaaagagactatacaagggaccgggtcctgggggcctgagcctcctggacccggcatacccccagcttactcaagtcccaggcgggagcgtcttcgttggcccccacctcccaaaccccgactcaagtcaggtggagggtttgggccagatcctgggtcagggaccacagtgccagccagacgcctccctgtcccccgaccctcttttgatgcctcagcaagtgaagaggaggaagaagaggaggaggaggaggatgaagatgaagaggaggaagtggcagcttggaggctgcccccaagatggagtcagctgggaacctcccagcggccccgcccttcccgccccactcatcgaaaaacctgctcacagcgccgccgccgagccatgagagccttccggatgctgctctactcaaaaagcacctcgctgacattccactggaagctttgggggcgccaccggggccggcggcggggcctcgcacaccccaagaaccatctttcaccccagcaagggggtgcgacgccacaggtgccatccccctgttgtcgttttgactccccccgggggccacctccaccccggctgggtctgctaggtgctctcatggctgaggatggggtgagagggtctccaccagtgccctctgggccccccatggaggaagatggactcaggtggactccaaagtctcctctggaccctgactcgggcctcctttcatgtactctgcccaacggttttgggggacaatctgggccagaaggggagcgcagcttggcaccccctgatgccagcatcctcatcagcaatgtgtgcagcatcggggaccatgtggcccaggagctttttcagggctcagatttgggcatggcagaagaggcagagaggcctggggagaaagccggccagcacagccccctgcgagaggagcatgtgacctgcgtacagagcatcttggacgaattccttcaaacgtatggcagcctcatacccctcagcactgatgaggtagtagagaagctggaggacattttccagcaggagttttccaccccttccaggaagggcctggtgttgcagctgatccagtcttaccagcggatgccaggcaatgccatggtgaggggcttccgagtggcttataagcggcacgtgctgaccatggatgacttggggaccttgtatggacagaactggctcaatgaccaggtgatgaacatgtatggagacctggtcatggacacagtccctgaaaaggtgcatttcttcaatagtttcttctatgataaactccgtaccaagggttatgatggggtgaaaaggtggaccaaaaacgtggacatcttcaataaggagctactgctaatccccatccacctggaggtgcattggtccctcatctctgttgatgtgaggcgacgcaccatcacctattttgactcgcagcgtaccctaaaccgccgctgccctaagcatattgccaagtatctacaggcagaggcggtaaagaaagaccgactggatttccaccagggctggaaaggttacttcaaaatgaatgtggccaggcagaataatgacagtgactgtggtgcttttgtgttgcagtactgcaagcatctggccctgtctcagccattcagcttcacccagcaggacatgcccaaacttcgtcggcagatctacaaggagctgtgtcactgcaaactcactgtgtgagcctcgtaccccagaccccaagcccataaatgggaagggagacatgggagtcccttcccaagaaactccagttcctttcctctcttgcctcttcccactcacttccctttggtttttcatatttaaatgtttcaatttctgtatttttttttctttgagagaatacttgttgatttctgatgtgcagggggtggctacagaaaagcccctttcttcctctgtttgcaggggagtgtggccctgtggcctgggtggagcagtcatcctcccccttccccgtgcagggagcaggaaatcagtgctgggggtggtgggcggacaataggatcactgcctgccagatcttcaaacttttatttatatatatatatatatatatatatatatatataaataaaaatgccacggtcctatatatatatatatatataaatataaatatataaatgccacggtcctgctctggtcaataaaggatcctttgttgatacgtaaaaaaaaaaaacactt

SEQ ID NO: 61132 - DNA, 1923 bp, Homo sapiens
ggtggccgcgccggcgctcttcgccgggtgtgacgtactaatcgtgcgccaccgctgccggtgggcccggggctcgcgggaggggaaggaggagggggggaggagtggcggcggcggcggtggcgctggtggcggcggtggcggaggtggaggtggaggtggaagctgaagctgaagcagagccagaggcggcgcggcggggtgctcggcggcgcggcacgggcccagaagcgttggaatcctgaattgagacggctgcgcctaaagacagcaggagtggcggggccgccgccgtcgccggagagatgagccgggaagcttgaggccggagacgcccgccttcgggcccgtccgcccggcttccccgctcccgggtactggaagatgaaagagactatacaagggaccgggtcctgggggcctgagcctcctggacccggcatacccccagcttactcaagtcccaggcgggagcgtcttcgttggcccccacctcccaaaccccgactcaagtcaggtggagggtttgggccagatcctgggtcagggaccacagtgccagccagacgcctccctgtcccccgaccctcttttgatgcctcagcaagtgaagaggaggaagaagaggaggaggaggaggatgaagatgaagaggaggaagtggcagcttggaggctgcccccaagatggagtcagctgggaacctcccagcggccccgcccttcccgccccactcatcgaaaaacctgctcacagcgccgccgccgagccatgagagccttccggatgctgctctactcaaaaagcacctcgctgacattccactggaagctttgggggcgccaccggggccggcggcggggcctcgcacaccccaagaaccatctttcaccccagcaagggggtgcgacgccacaggtgccatccccctgttgtcgttttgactccccccgggggccacctccaccccggctgggtctgctaggtgctctcatggctgaggatggggtgagagggtctccaccagtgccctctgggccccccatggaggaagatggactcaggtggactccaaagtctcctctggaccctgactcgggcctcctttcatgtactctgcccaacggttttgggggacaatctgggccagaaggggagcgcagcttggcaccccctgatgccagcatcctcatcagcaatgtgtgcagcatcggggaccatgtggcccaggagctttttcagggctcagatttgggcatggcagaagaggcagagaggcctggggagaaagccggccagcacagccccctgcgagaggagcatgtgacctgcgtacagagcatcttggacgaattccttcaaacgtatggcagcctcatacccctcagcactgatgaggtagtagagaagctggaggacattttccagcaggagttttccaccccttccaggaagggcctggtgttgcagctgatccagtcttaccagcggatgccaggcaatgccatggtgaggggcttccgagtggcttataagcggcacgtgctgaccatggatgacttggggaccttgtatggacagaactggctcaatgaccaggtgatgaacatgtatggagacctggtcatggacacagtccctgaaaagtaggcccaaccagataggtcagtacccagaggaacttctgcagttttaagcagctttttaagctcctttcatctctttcattttacacagagagggtctctgtttcagggagagaggtggtagtggtagtgtattaatttcaaatccgtaatcttgggctctggatttatcagttgttttcctttctgccagtatttagtgtttttcgctatggccagccccaaggattgggatgggttcctattgtaactattgtaaaacaagatttaaaaaaaa

SEQ ID NO: 61133 - DNA, 947 bp, Homo sapiens
ggtggccgcgccggcgctcttcgccgggtgtgacgtactaatcgtgcgccaccgctgccggtgggcccggggctcgcgggaggggaaggaggagggggggaggagtggcggcggcggcggtggcgctggtggcggcggtggcggaggtggaggtggaggtggaagctgaagctgaagcagagccagaggcggcgcggcggggtgctcggcggcgcggcacgggcccagaagcgttggaatcctgaattgagacggctgcgcctaaagacagcaggagtggcggggccgccgccgtcgccggagagatgagccgggaagcttgaggccggagacgcccgccttcgggcccgtccgcccggcttccccgctcccgggtactggaagatgaaagagactatacaagggaccgggtcctgggggcctgagcctcctggacccggcatacccccagcttactcaagtcccaggcgggagcgtcttcgttggcccccacctcccaaaccccgactcaagtcaggtggagggtttgggccagatcctgggtcagggcctcctttcatgtactctgcccaacggttttgggggacaatctgggccagaaggggagcgcagcttggcaccccctgatgccagcatcctcatcagcaatgtgtgcagcatcggggaccatgtggcccaggagctttttcagggctcagatttgggcatggcagaagaggcagagaggcctggggagaaagccggccagcacagccccctgcgagaggagcatgtgacctgcgtacagatcatcctcccccttccccgtgcagggagcaggaaatcagtgctgggggtggtgggcggacaataggatcactgcctgccagatcttcaaacttttatttatatatatagctctggtcaataaaggatcctttgttgatacgtaaaaaaaaaaaacactt

SEQ ID NO: 61134 - DNA, 710 bp, Homo sapiens
gttcagatacccttttataataactgtcttcttagtatattaacactcaagatgtttgtgtatctttaatttgcctttgtttcacaataactggcttttgttttccttttcatggtgtgttgttggctatatagaggcatttattggtaaattataatcagcagttgcaccatggaagtattcttggtgataaattcttggggttacatagtatagttaacatgttattttcaagaaacatgagtgtgtgtgtctgtgtgtgtgtgtctgaagagtatcacttatatgcagtgcatatacatgtaagtgcattactttgctcaaatatcttctgacctattacagtcaactcatgcatgagtgtgaacatgtattacagaaggtcttacagccttagtttctgttttagattttatgtgctgcttcctttctcaaacaaaagcatgaaaggaaagaggataagtactagaaatattcatttttttccttcacaaatctaaatgttgcttatgaaaactcatcttagagtaatgaatatgtggaagtgggtaggtaggaggaaatgtgcctctttaaaatcctaaaattttaccattgatattgacatttgtttgcgtgtatataaatggagcatgtgtaaatatagaattccaatagcattttttattttattataaatctataataaatatatataaatcactaccaga

SEQ ID NO: 61135 - DNA, 2709 bp, Homo sapiens
  misc_feature (17)..(17): n is a, c, g, or t
  misc_feature (20)..(21): n is a, c, g, or t
  misc_feature (112)..(112): n is a, c, g, or t
gctttttgtgagacccnttnncactgtgcaatttttgcattatttaccctcccccgacaacctgtatccttggccctttctgattttctctgcttggtctctttcggtcgancggggattaccggggagtcggcctcggggctctgctctcctacctcagtctgccctaccctggaatggggaaaatgcggacatgccactcagtccggccgcgaacagtgctccagaactcagagagttttccagacgggtggagatcgcgttccctgcccgccgaggtcccatcgcttccctgctgggaagacaaatgaggcgctttagccgtctccacggccagcccctccctcataacccgagattctttgtgggctcttagtccatagctgcctttgaggtggtgtagaccttgctaaccaggacggcccagtaggcagagctcatttttattcctgtctgcaatcgtgcaaaaacgcctcttatggaaaagccagagcgccaggagtcagcaaaacacactaaagattgggcagtcactggggagaacactcagcccgcctgcacccaggtgaaatatacagccttgttgctcacacaaagcctgtttggtggtttcttcacacggatgcatgtgacatttggtgctgaagacccaggacaggaggactcctttgggagaccagtgccctgttgtcgccctcactccgtgaggagatccacctatgatctcaggtcctcagaccaaccagcccaaggaacatcttgccaatttcaaatcgggtaagtggtcttttcactcttctccagcctttcttgctacccttcaatcttcctctctcactacccttcaatctccctgtccttccaattcccgttctttttcctctctagtagagataaggagacacattttatctgtggacccaaaactccagcgtcagtcacggactcgggaagacagtcttcccttggtgtttaatcactgtggggacgcctgcctgattattcacccacactccattggtgtctgatcaccacggggatgcctgccttggtcattcacccacattcccttggtgacaagtcaattgcggggacacctgctttggctgctcacccacattgcagcccagggctgctcaatgccccccgctgccccacccgccttctccgtgcctctaccctctcttttctcgggtttacctccttcactatgggcaaccttccaccctccattcctccttcttctcccttagcctgtgttctcaaaaacttaaaacctcttcaactcacacctgacctaaaacctaagtgtcttattttcttctgcaacaccgcttggccccaatacaaactcgacaatgattccaaatagccagaaaacggcactttcgagttctccatcctacaagttctagataattcttgtcataaaatgggcaaatggtctgaggtgcctgacgtccaggcattcttttacacattggtccctccctagtctctgctcccaatgtgactcatcccaaatctttcttctttctctcctttctgttccttcggtctccaccccaagttccgagtcctctgaatccttcttttctatggactcatctgacctccccccttctccccaggctgctcctcgccaggctgagccaggtcccaattctcacttagcctctgctcccccaccctataatccttttatcacctcccctcctcacacctggtccagcttacagtttcgttcctcgactagctctccccgatctgcccaacaatttcctgttaaagagatggctgactatcctgacttcatcagagcaggctggtgcctggccttcctggaatgagtgggtgttctgacaggcccccagtttgtcccatctgcaccgccaagaggtctccgggtggccagaggagcaaagttgccttccaagtgcctgttggtgcctgggagaacacagcaggagtgtcgtgcggcccacagcgcagtgcatggtgattccaggcgctgaacaactccccttgacccttgggcctgcatctgactcccggctgcagaatcagaagctgagtccaggcaaccgctcggccactcccggtcactcctctctggacacccagttactaaagtcagcaaagaagatgcggtaatcaccgcctgatctccacatggtgaacacaacactctcactaacacctccttgaccagtcagtcttcagcactgggggtggacaggcaggttttctgtgtttaccagaatcgcacaggctaagcacaaacatggaaccagagttccaggtgaggaaacctcactcgcagaagcccaggctgcaccccaccaggtgatgcagtgcgcctaggctgtgggtgctaggagccaagtgctagggactcgtcatgagtgggaatccccacgttcctgtcactgctgtcaaacagaaggtaaacagtcttacgaatgtaattccttaggaagacttgtacaaacttttattaggatatctatttatttaatactgaactttggcctactttgtgataagactataaacaaattgaggaaatcactatttctcacttctgtatttctcaaaaaataattttgttacagagttcaatatactgtgtactactgatcttctattgtgaaagcaaagcatttcatcaaaacaaagtattttaaattatgagtgaaaattgtgtat

SEQ ID NO: 61136 - DNA, 1649 bp, Homo sapiens
  misc_feature (17)..(17): n is a, c, g, or t
  misc_feature (20)..(21): n is a, c, g, or t
  misc_feature (112)..(112): n is a, c, g, or t
gctttttgtgagacccnttnncactgtgcaatttttgcattatttaccctcccccgacaacctgtatccttggccctttctgattttctctgcttggtctctttcggtcgancggggattaccggggagtcggcctcggggctctgctctcctacctcagtctgccctaccctggaatggggaaaatgcggacatgccactcagtccggccgcgaacagtgctccagaactcagagagttttccagacgggtggagatcgcgttccctgcccgccgaggtcccatcgcttccctgctgggaagacaaatgaggcgctttagccgtctccacggccagcccctccctcataacccgagattctttgtgggctcttagtccatagctgcctttgaggtggtgtagaccttgctaaccaggacggcccagtaggcagagctcatttttattcctgtctgcaatcgtgcaaaaacgcctcttatggaaaagccagagcgccaggagtcagcactcagcccgcctgcacccaggtgaaatatacagccttgttgctcacacaaagcctgtttggtggtttcttcacacggatgcatgtgacatttggtgctgaagacccaggacaggaggactcctttgggagaccagtgccctgttgtcgccctcactccgtgaggagatccacctatgatctcaggtcctcagaccaaccagcccaaggaacatcttgccaatttcaaatcggataggagtgtcaggcctctgagtccaagctaagccatcaaatcccctgtgacctgcacgtgtacatccagatgacctgaagcaactgaagatccacaaaagaagtgaaagtagccttaactgatgacattccaccattgtgatttgttcctgccccacgctaactgataccatatattcttcccccgcccttgagaatgtactttgtacacctatcccaaacctataagaactaatgataatcctaccaccctttgctgactctctttttggactcagcccgcctgcacccaggtgaaataaacagccctgttgctcacacaaaagaaaaaaaaaaaaaaaaaaaaaaagaaaaaaaaaaaaaaaaaaaaaaaaaaagaaacaagaaacataagaaaaaagaggcgcggcgcgcctataataaaaatctacccgagagggacaccacactattagcgagccacccgcagtttttttagtcacaaatgagggcaccacataagggagggatatattacacgaacgcaggcatggcgagcgccgaatatcaaaacaacacgccgcgacccggcagccgggacaacacacgccgacaccaacgtggaggaacactcttggcacgacagcgaacaaccaccccccacaccattatcggggggggggggcgcttaagcattattttggtgggcgacgagaccagaaatctacactaagcgaataaatacaactgacaaacctcgcggaggaggaagacatttatactgaaaatctaccagagggtcactcataactggtggtggtgacacacgcgcacccacgccgatttagtcacgtgcgcgacgtaatacagtaatctgtgtctcctcaggacgatgatttaactagtaaacacaaaagattttctacgcgg

SEQ ID NO: 61137 - DNA, 1590 bp, Homo sapiens
ggtggcatgcgcgtgaagtcttagctacttgggaggctacggtgggaggatggcttgagcttaggagtttgaggttacaggaagctatgattgtgccactgccctccagcctgggtgatggagtaagaccatgtttcaaaaacaaaacaaaaaaaaaagaaatgcaagttagaccaatgaagtataatgtaatgaaatacaaaaaattcattgctatggtttcaaattcccagtgcaattaacctttaagatactacgtgtcaggcctctgagcccaaactaagccatcatatcccctgtgacctgcatgtatacatacagatggcctgaagcaactgaagatccacaaaagaagtgaaaatagccttaactgatgacattccaccattgagatttgttcctgccccaccctaactgatacgatatattctcccccgcccttaagaagactcagcccgcctgcacccaggtgaaatatacagccttgttgctcacacaaagcctgtttggtggtttcttcacacggatgcatgtgacatttggtgctgaagacccaggacaggaggactcctttgggagaccagtgccctgttgtcgccctcactccgtgaggagatccacctatgatctcaggtcctcagaccaaccagcccaaggaacatcttgccaatttcaaatcggataggagtgtcaggcctctgagtccaagctaagccatcaaatcccctgtgacctgcacgtgtacatccagatgacctgaagcaactgaagatccacaaaagaagtgaaagtagccttaactgatgacattccaccattgtgatttgttcctgccccacgctaactgataccatatattcttcccccgcccttgagaatgtactttgtacacctatcccaaacctataagaactaatgataatcctaccaccctttgctgactctctttttggactcagcccgcctgcacccaggtgaaataaacagccctgttgctcacacaaaagaaaaaaaaaaaaaaaaaaaaaaagaaaaaaaaaaaaaaaaaaaaaaaaaaagaaacaagaaacataagaaaaaagaggcgcggcgcgcctataataaaaatctacccgagagggacaccacactattagcgagccacccgcagtttttttagtcacaaatgagggcaccacataagggagggatatattacacgaacgcaggcatggcgagcgccgaatatcaaaacaacacgccgcgacccggcagccgggacaacacacgccgacaccaacgtggaggaacactcttggcacgacagcgaacaaccaccccccacaccattatcggggggggggggcgcttaagcattattttggtgggcgacgagaccagaaatctacactaagcgaataaatacaactgacaaacctcgcggaggaggaagacatttatactgaaaatctaccagagggtcactcataactggtggtggtgacacacgcgcacccacgccgatttagtcacgtgcgcgacgtaatacagtaatctgtgtctcctcaggacgatgatttaactagtaaacacaaaagattttctacgcgg

SEQ ID NO: 61138 - DNA, 1857 bp, Homo sapiens
  misc_feature (17)..(17): n is a, c, g, or t
  misc_feature (20)..(21): n is a, c, g, or t
  misc_feature (112)..(112): n is a, c, g, or t
gctttttgtgagacccnttnncactgtgcaatttttgcattatttaccctcccccgacaacctgtatccttggccctttctgattttctctgcttggtctctttcggtcgancggggattaccggggagtcggcctcggggctctgctctcctacctcagtctgccctaccctggaatggggaaaatgcggacatgccactcagtccggccgcgaacagtgctccagaactcagagagttttccagacgggtggagatcgcgttccctgcccgccgaggtcccatcgcttccctgctgggaagacaaatgaggcgctttagccgtctccacggccagcccctccctcataacccgagattctttgtgggctcttagtccatagctgcctttgaggtggtgtagaccttgctaaccaggacggcccagtaggcagagctcatttttattcctgtctgcaatcgtgcaaaaacgcctcttatggaaaagccagagcgccaggagtcagcaaaacacactaaagattgggcagtcactggggagaacatggcctgaagcaactgaagatccacaaaagaagtgaaaatagccttaactgatgacattccaccattgagatttgttcctgccccaccctaactgatacgatatattctcccccgcccttaagaagactcagcccgcctgcacccaggtgaaatatacagccttgttgctcacacaaagcctgtttggtggtttcttcacacggatgcatgtgacatttggtgctgaagacccaggacaggaggactcctttgggagaccagtgccctgttgtcgccctcactccgtgaggagatccacctatgatctcaggtcctcagaccaaccagcccaaggaacatcttgccaatttcaaatcggctctccccgatctgcccaacaatttcctgttaaagagatggctgactatcctgacttcatcagagcaggctggtgcctggccttcctggaatgagtgggtgttctgacaggcccccagtttgtcccatctgcaccgccaagaggtctccgggtggccagaggagcaaagttgccttccaagtgcctgttggtgcctgggagaacacagcaggagtgtcgtgcggcccacagcgcagtgcatggtgattccaggcgctgaacaactccccttgacccttgggcctgcatctgactcccggctgcagaatcagaagctgagtccaggcaaccgctcggccactcccggtcactcctctctggacacccagttactaaagtcagcaaagaagatgcggtaatcaccgcctgatctccacatggtgaacacaacactctcactaacacctccttgaccagtcagtcttcagcactgggggtggacaggcaggttttctgtgtttaccagaatcgcacaggctaagcacaaacatggaaccagagttccaggtgaggaaacctcactcgcagaagcccaggctgcaccccaccaggtgatgcagtgcgcctaggctgtgggtgctaggagccaagtgctagggactcgtcatgagtgggaatccccacgttcctgtcactgctgtcaaacagaaggtaaacagtcttacgaatgtaattccttaggaagacttgtacaaacttttattaggatatctatttatttaatactgaactttggcctactttgtgataagactataaacaaattgaggaaatcactatttctcacttctgtatttctcaaaaaataattttgttacagagttcaatatactgtgtactactgatcttctattgtgaaagcaaagcatttcatcaaaacaaagtattttaaattatgagtgaaaattgtgtat

SEQ ID NO: 61139 - DNA, 1308 bp, Homo sapiens
  misc_feature (17)..(17): n is a, c, g, or t
  misc_feature (20)..(21): n is a, c, g, or t
  misc_feature (112)..(112): n is a, c, g, or t
gctttttgtgagacccnttnncactgtgcaatttttgcattatttaccctcccccgacaacctgtatccttggccctttctgattttctctgcttggtctctttcggtcgancggggattaccggggagtcggcctcggggctctgctctcctacctcagtctgccctaccctggaatggggaaaatgcggacatgccactcagtccggccgcgaacagtgctccagaactcagagagttttccagacgggtggagatcgcgttccctgcccgccgaggtcccatcgcttccctgctgggaagacaaatgaggcgctttagccgtctccacggccagcccctccctcataacccgagattctttgtgggctcttagtccatagctgcctttgaggtggtgtagaccttgctaaccaggacggcccagtaggcagagctcatttttattcctgtctgcaatcgtgcaaaaacgcctcttatggaaaagccagagcgccaggagtcagcaaaacacactaaagattgggcagtcactggggagaacatggcctgaagcaactgaagatccacaaaagaagtgaaaatagccttaactgatgacattccaccattgagatttgttcctgccccaccctaactgatacgatatattctcccccgcccttaagaagactcagcccgcctgcacccaggtgaaataaacagccctgttgctcacacaaaagaaaaaaaaaaaaaaaaaaaaaaagaaaaaaaaaaaaaaaaaaaaaaaaaaagaaacaagaaacataagaaaaaagaggcgcggcgcgcctataataaaaatctacccgagagggacaccacactattagcgagccacccgcagtttttttagtcacaaatgagggcaccacataagggagggatatattacacgaacgcaggcatggcgagcgccgaatatcaaaacaacacgccgcgacccggcagccgggacaacacacgccgacaccaacgtggaggaacactcttggcacgacagcgaacaaccaccccccacaccattatcggggggggggggcgcttaagcattattttggtgggcgacgagaccagaaatctacactaagcgaataaatacaactgacaaacctcgcggaggaggaagacatttatactgaaaatctaccagagggtcactcataactggtggtggtgacacacgcgcacccacgccgatttagtcacgtgcgcgacgtaatacagtaatctgtgtctcctcaggacgatgatttaactagtaaacacaaaagattttctacgcgg

SEQ ID NO: 61140 - DNA, 804 bp, Homo sapiens
  misc_feature (17)..(17): n is a, c, g, or t
  misc_feature (20)..(21): n is a, c, g, or t
  misc_feature (112)..(112): n is a, c, g, or t
gctttttgtgagacccnttnncactgtgcaatttttgcattatttaccctcccccgacaacctgtatccttggccctttctgattttctctgcttggtctctttcggtcgancggggattaccggggagtcggcctcggggctctgctctcctacctcagtctgccctaccctggaatggggaaaatgcggacatgccactcagtccggccgcgaacagtgctccagaactcagagagttttccagacgggtggagatcgcgttccctgcccgccgaggtcccatcgcttccctgctgggaagacaaatgaggcgctttagccgtctccacggccagcccctccctcataacccgagattctttgtgggctcttagtccatagctgcctttgaggtggtgtagaccttgctaaccaggacggcccagtaggcagagctcatttttattcctgtctgcaatcgtgcaaaaacgcctcttatggaaaagccagagcgccaggagtcagcaaaacacactaaagattgggcagtcactggggagaacatggcacacaaggagattatatcccgcacctggcttggaggatcctacgcccatggagcctcgctcattggtggcacagcagtctgagatcaaactgcaaggtggcagcgaggctgggggcagggcgcccaccattgccgaggcttgagtaggtaaacaaagcacccgggaagctcgaactgggtggagcccaccccagctcaaggaggcctgcctgcctctgtagactccacctctgggggcagggcatagccaaacaa

SEQ ID NO: 61141 - DNA, 1686 bp, Homo sapiens
  misc_feature (17)..(17): n is a, c, g, or t
  misc_feature (20)..(21): n is a, c, g, or t
  misc_feature (112)..(112): n is a, c, g, or t
gctttttgtgagacccnttnncactgtgcaatttttgcattatttaccctcccccgacaacctgtatccttggccctttctgattttctctgcttggtctctttcggtcgancggggattaccggggagtcggcctcggggctctgctctcctacctcagtctgccctaccctggaatggggaaaatgcggacatgccactcagtccggccgcgaacagtgctccagaactcagagagttttccagacgggtggagatcgcgttccctgcccgccgaggtcccatcgcttccctgctgggaagacaaatgaggcgctttagccgtctccacggccagcccctccctcataacccgagattctttgtgggctcttagtccatagctgcctttgaggtggtgtagaccttgctaaccaggacggcccagtaggcagagctcatttttattcctgtctgcaatcgtgcaaaaacgcctcttatggaaaagccagagcgccaggagtcagcaaaacacactaaagattgggcagtcactggggagaacactcagcccgcctgcacccaggtgaaatatacagccttgttgctcacacaaagcctgtttggtggtttcttcacacggatgcatgtgacatttggtgctgaagacccaggacaggaggactcctttgggagaccagtgccctgttgtcgccctcactccgtgaggagatccacctatgatctcaggtcctcagaccaaccagcccaaggaacatcttgccaatttcaaatcggataggagtgtcaggcctctgagtccaagctaagccatcaaatcccctgtgacctgcacgtgtacatccagatgacctgaagcaactgaagatccacaaaagaagtgaaagtagccttaactgatgacattccaccattgtgatttgttcctgccccacgctaactgataccatatattcttcccccgcccttgagaatgtactttgtacacctatcccaaacctataagaactaatgataatcctaccaccctttgctgactctctttttggactcagcccgcctgcacccaggtgaaataaacagccctgttgctcacacaaaagaaaaaaaaaaaaaaaaaaaaaaagaaaaaaaaaaaaaaaaaaaaaaaaaaagaaacaagaaacataagaaaaaagaggcgcggcgcgcctataataaaaatctacccgagagggacaccacactattagcgagccacccgcagtttttttagtcacaaatgagggcaccacataagggagggatatattacacgaacgcaggcatggcgagcgccgaatatcaaaacaacacgccgcgacccggcagccgggacaacacacgccgacaccaacgtggaggaacactcttggcacgacagcgaacaaccaccccccacaccattatcggggggggggggcgcttaagcattattttggtgggcgacgagaccagaaatctacactaagcgaataaatacaactgacaaacctcgcggaggaggaagacatttatactgaaaatctaccagagggtcactcataactggtggtggtgacacacgcgcacccacgccgatttagtcacgtgcgcgacgtaatacagtaatctgtgtctcctcaggacgatgatttaactagtaaacacaaaagattttctacgcgg

SEQ ID NO: 61142 - DNA, 1813 bp, Homo sapiens
  misc_feature (17)..(17): n is a, c, g, or t
  misc_feature (20)..(21): n is a, c, g, or t
  misc_feature (112)..(112): n is a, c, g, or t
gctttttgtgagacccnttnncactgtgcaatttttgcattatttaccctcccccgacaacctgtatccttggccctttctgattttctctgcttggtctctttcggtcgancggggattaccggggagtcggcctcggggctctgctctcctacctcagtctgccctaccctggaatggggaaaatgcggacatgccactcagtccggccgcgaacagtgctccagaactcagagagttttccagacgggtggagatcgcgttccctgcccgccgaggtcccatcgcttccctgctgggaagacaaatgaggcgctttagccgtctccacggccagcccctccctcataacccgagattctttgtgggctcttagtccatagctgcctttgaggtggtgtagaccttgctaaccaggacggcccagtaggcagagctcatttttattcctgtctgcaatcgtgcaaaaacgcctcttatggaaaagccagagcgccaggagtcagcaaaacacactaaagattgggcagtcactggggagaacatggcctgaagcaactgaagatccacaaaagaagtgaaaatagccttaactgatgacattccaccattgagatttgttcctgccccaccctaactgatacgatatattctcccccgcccttaagaagactcagcccgcctgcacccaggtgaaatatacagccttgttgctcacacaaagcctgtttggtggtttcttcacacggatgcatgtgacatttggtgctgaagacccaggacaggaggactcctttgggagaccagtgccctgttgtcgccctcactccgtgaggagatccacctatgatctcaggtcctcagaccaaccagcccaaggaacatcttgccaatttcaaatcggataggagtgtcaggcctctgagtccaagctaagccatcaaatcccctgtgacctgcacgtgtacatccagatgacctgaagcaactgaagatccacaaaagaagtgaaagtagccttaactgatgacattccaccattgtgatttgttcctgccccacgctaactgataccatatattcttcccccgcccttgagaatgtactttgtacacctatcccaaacctataagaactaatgataatcctaccaccctttgctgactctctttttggactcagcccgcctgcacccaggtgaaataaacagccctgttgctcacacaaaagaaaaaaaaaaaaaaaaaaaaaaagaaaaaaaaaaaaaaaaaaaaaaaaaaagaaacaagaaacataagaaaaaagaggcgcggcgcgcctataataaaaatctacccgagagggacaccacactattagcgagccacccgcagtttttttagtcacaaatgagggcaccacataagggagggatatattacacgaacgcaggcatggcgagcgccgaatatcaaaacaacacgccgcgacccggcagccgggacaacacacgccgacaccaacgtggaggaacactcttggcacgacagcgaacaaccaccccccacaccattatcggggggggggggcgcttaagcattattttggtgggcgacgagaccagaaatctacactaagcgaataaatacaactgacaaacctcgcggaggaggaagacatttatactgaaaatctaccagagggtcactcataactggtggtggtgacacacgcgcacccacgccgatttagtcacgtgcgcgacgtaatacagtaatctgtgtctcctcaggacgatgatttaactagtaaacacaaaagattttctacgcgg

SEQ ID NO: 61143 - DNA, 1015 bp, Homo sapiens
  misc_feature (17)..(17): n is a, c, g, or t
  misc_feature (20)..(21): n is a, c, g, or t
  misc_feature (112)..(112): n is a, c, g, or t
gctttttgtgagacccnttnncactgtgcaatttttgcattatttaccctcccccgacaacctgtatccttggccctttctgattttctctgcttggtctctttcggtcgancggggattaccggggagtcggcctcggggctctgctctcctacctcagtctgccctaccctggaatggggaaaatgcggacatgccactcagtccggccgcgaacagtgctccagaactcagagagttttccagacgggtggagatcgcgttccctgcccgccgaggtcccatcgcttccctgctgggaagacaaatgaggcgctttagccgtctccacggccagcccctccctcataacccgagattctttgtgggctcttagtccatagctgcctttgaggtggtgtagaccttgctaaccaggacggcccagtaggcagagctcatttttattcctgtctgcaatcgtgcaaaaacgcctcttatggaaaagccagagcgccaggagtcagcaaaacacactaaagattgggcagtcactggggagaacgtgagtaaaagcacaggaacagcaaagcgttcaggaacgttcgaggctgacgcaaccggcgcaggaaggtggtgtgtggtgggagagtgggaggagacagtggaaagtttagacttgcttctgtaagtgataagaagtcatcagatattttcaagcaggagaggaaaataatctctctgtttcgcaaagttaactctcatggcaacagagcagagtagcggggggatgggggctgggagatgttgggaagctattgttaccactctggtgaagagtcatgggacctcaaaagctgggatagtcacggtgggaatggaaaggaagggcacaagctgagaggcatttgggaggagaatcaatagcactttattgactggatgtgtgagatgagtgaggacagcaatcagaagaggactttgaggtttctagcctgagtggctggaaggacaccacttcccctacctgaaatag

SEQ ID NO: 61144 - DNA, 329 bp, Homo sapiens
ggtttcttcatcatcacgtgaacacagagcctgtttgtaaacacactaaacacagtggcctagatagaaactgtatcgtagtttaaaatctgcctcgcgggatgttactaaactcgctaatagtttaaaggttacttacaatagagcaagttggacaattttgtggtgttggggaaatgttagggcaaggcctagaggttcattttgaatcttggtttgtgactttagggtagttagaaactttctacttaatgtacctttaaaatagtccattttctatgttttgtataatctgaaactgtacatggaaaataaagtttaaaaccaga

SEQ ID NO: 61145 - DNA, 489 bp, Homo sapiens
ggtttcttcatcatcacgtgaacacagagcctgtttgtaaacacactaaacacagtggcctagatagaaactgtatcgtagtttaaaatctgcctcgcgggatgttactaaactcgctaatagtttaaaggttacttacaatagagcaagttggacaattttgtggtgttggggaaatgttagggcaaggcctagaggttcattttgaatcttggtttgtgactttagggtagttagaaactttctacttaatgtacctttaaaatagtccattttctatgttttgtataatctgaaactgtacatggaaaataaagtttaaaaccagattgcccagagcaagactctaatgttcccaacggtgatgacatctagggcagaatgctgccattttgaggggcagggggtcagctgatttctcatcaagataataatgtatggtttttacactaagcaactgataaatggacaatttatcactggaaaaaa

SEQ ID NO: 61146 - DNA, 285 bp, Homo sapiens
gagatggaatctctctctgtcacccaggctggagtgcagtggcgcgttcttggctcagtgcaacctctgccttctgggttcaagtgattctcctgcctcagcctcctgaacaggcatgagccactgcgtctggccttctataattttctggtagtcacgatggaaacaaacaaaacaccttagaaccagagatcgaccccctcaagcaatacatcaattcccttttaagccacataggacacaccaatgctccacaatcgtttgctagactagttgcatcatgtc

SEQ ID NO: 61147 - DNA, 5044 bp, Homo sapiens
ggcgggatcggggaaggaggggccccgccgcctagagggtggagggagggcgcgcagtcccagcccagagcttcaaaacagcccggcggcctcgcctcgcacccccagccagtccgtcgatccagctgccagcgcagccgccagcgccggcacatcccgctctgggctttaaacgtgacccctcgcctcgactcgccctgccctgtgaaaatgttggtgcttcttgctttcatcatcgccttccacatcacctctgcagccttgctgttcattgccaccgtcgacaatgcctggtgggtaggagatgagttttttgcagatgtctggagaatatgtaccaacaacacgaattgcacagtcatcaatgacagctttcaagagtactccacgctgcaggcggtccaggccaccatgatcctctccaccattctctgctgcatcgccttcttcatcttcgtgctccagctcttccgcctgaagcagggagagaggtttgtcctaacctccatcatccagctaatgtcatgtctgtgtgtcatgattgcggcctccatttatacagacaggcgtgaagacattcacgacaaaaacgcgaaattctatcccgtgaccagagaaggcagctacggctactcctacatcctggcgtgggtggccttcgcctgcaccttcatcagcggcatgatgtacctgatactgaggaagcgcaaatagagttccggagctgggttgcttctgctgcagtacagaatccacattcagataaccattttgtatataatcattattttttgaggtttttctagcaaacgtattgtttcctttaaaagccaaaaaaaaaaaaaaaaacaaaacaaaaaaaagaaaaaagaaaaaaaaattccaaaagagagaagagtttttgcattcttgagatcagagaatagactatgaaggctggtattcagaactgctgcccactcaaaagtctcaacaagacacaagcaaaaatccagcaatgctcaaatccaaaagcactcggcaggacatttcttaaccatggggctgtgatgggaggagaggagaggctgggaaagccgggtctctggggacgtgcttcctatgggtttcagctggcccaagcccctcccgaatctctctgctagtggtgggtggaagagggtgaggtggggtataggagaagaatgacagcttcctgagaggtttcacccaagttccaagtgagaagcaggtgtagtccctggcattctgtctgtatccaaaccagagcccagccatccctccggtatcggggtgggtcagaaaaagtctcacctcaatttgccgacagtgtcacctgcttgccttaggaatggtcatccttaacctgcgtgccagatttagactcgtctttaggcaaaacctacagcgccccccccctcaccccagacctacagaatcagagtcttcaagggatggggccagggaatctgcatttctaacgcgctccctgggcaacgcttcagatgcgttgaagttggggaccacggtgcctgggccaggtcagcagagctgcctcgtaaatgctggggtatcgtcatgtggagatggggaggtgaatgcaacccccacagcaggccaaaaccttggcctccatcgccacagctgtctacatctagggccccaaaactccattcctgagccatgtgaactcatagacaccttcagggtgtggggtacagcctccttcccatcttatcccagaaggcctctcccttcttgtccagcccttcatgctacacctggctggcctctcacccctatttctagagcctcagaggacccatccaccattcattcattcattcattcattcattcattcattcattcatcaacataaatcataacttgcatgcatgtgccaggcacaggggataccctctagagacaatctcctcctagggctcatggcctagtggaggagacagattaaaacttaattagaaaaactggctgggtacagtggctcatgcttgtaatcccagcactttgggaggctgaggcgggtggatcacctgaggtcaggagttcaagaccagcctggccaaaatggtaaaacctgtctctactaaaaatacaaaaatgagctgggcgtggtggtgcatgcctgtaatcccagctatcaggtggctgaggcaggagaatcacttgaaatgggaggtggaggttgcagtgagccgagaccgtgccactgcactccagcctgggtgacagagtgagactccatctcaaaaaaagaaaaaaaagaaaagaaactaattacacactgtgatggaggctgcaaagaacaccactaagaattcaaaatcagctgggtgcggtggctcacacctgtaatcccagcactttgggaggctgaggcaggtggatcacaaggtcaggagttcaagaccagcctggccaacatggtgaaaccccgtctctaccgaaaatacaacaaaattagcccggtgtggtggcaggtgcctgtaatcccagctacttaggaggctgaggcaggagaatcgcttgaaactgggaggcggaggtcgcagtgagccgagattcaccactgcactccagcccaggcgacagtctgagactccgtctcaaaaataaaacgattcaaaatcgaggcctgtggcatggtagggaggctgctttacgcgtgcctattattaaatgctcctggaggcatttaggtatttagatcagtctaaatatagctccattcagttcgtgcagatgacagttattgggcagtacctgtctgtgtaacacccagaaaacatgtctgtggaggggcccatggtcccgacagtaaatgcggtgagagggtcccatagagctggagttttcaagctttaggggttcccgtgctgcttgggacaggctgattcagagggtctgggtgaatgatttccaggtgattttaagactgtgctgagaaatagggcttttggggccttgtccttcaggatcaaagcatgatgctgtgtggcaatgcagaccacccaggaaccatcccaggagataagctctttgcacctcattgtctttttctgcttatgttggagcaggatgctgggggctgtcctgggatggggtgtgggacctcgtgctatttaaatacttttgcacttgaccttctgctgagtggagtggtggtttgccatcagctcagttccagtggagctgaagagacatctggtttgagtagttttagggccaccatggatatctcttcaatgcaggattggctctttccatctgctctttcattcatttgtttttgacagatagtattaaatgtttaccatgttccaggcactgtgtgaggctctgaaaatacaggggtgagcaaatccagatatcctccctgccatcatgaagtttggagtctatgagataggaccccctccctatggagaagccaccaatgcagtacagggtgacctggggccagagacaggacaaatgtcacctcctgcctccatgagatactctcactagtcatattgtgggcaagaatgtggcttacacccctagggttaacaggatgctacccaagctcatggaggaagttgaatcttaagttcccttgaaactttctaccttggtggcttttctataattttcttttttctttttctttttttttttttttttgagactgagttttgctcttgttgcccaggctggagtgcggtggcaccatcttggctcaccgcaacctctgcctcctgggttcaagtgattctcctgcctcagcctcccgagtagctgggattgcaggcatgtcccaccatgcccagctaatttttgtatttttagtagagatggggtttctccatgttggtcaggctggtttcgaactcccaacctcaggtgatccgcccacctcagccttccaaagtgctgggattacaggcatgagccactgcgtctggccttctataattttctggtagtcacgatggaaacaaacaaaacaccttagaaccagagatcgaccccctcaagcaatacatcaattcccttcacaagaaacgtcggggctacatgagtatctgtgttgaatgcggtctgaaatgatcctatggattttcccggctggttgccactactgtacaacattcagtgcccacatccatctgtgccattaagcttttttgagacatgagagatgcctcttccctgctgtatgacatgcatttgggaagttggaaagaaatgacaaaatcagggagaaaacatccaagcttcttacctgtagatagaatcagccctcacttggtgcttattaccagttattcaagaacaataacaacaacaaaattagtagacatccaagaagcacatattaggaccaaagatagcatcaactgtatttgaaggaactgtagtttgcgcattttatgacatttttataaagtactgtaattctttcattgaggggctatgtgatggagacagactaactcattttgttatttgcattaaaattattttgggtctctgttcaaatgagtttggagaatgcttgacttgttggtctgtgtaaatgtgtatatatatatacctgaatacaggaacatcggagacctattcactcccacacactctgctatagtttgcgtgcttttgtggacacccctcatgaacaggctggcgctctaggacgctctgtgttcactgatgatgaagaaacctagaactccaagcctgtttgtaaacacactaaacacagtggcctagatagaaactgtatcgtagtttaaaatctgcctcgcgggatgttactaaactcgctaatagtttaaaggttacttacaatagagcaagttggacaattttgtggtgttggggaaatgttagggcaaggcctagaggttcattttgaatcttggtttgtgactttagggtagttagaaactttctacttaatgtacctttaaaatagtccattttctatgttttgtataatctgaaactgtacatggaaaataaagtttaaaaccaga

SEQ ID NO: 61148 - DNA, 5204 bp, Homo sapiens
ggcgggatcggggaaggaggggccccgccgcctagagggtggagggagggcgcgcagtcccagcccagagcttcaaaacagcccggcggcctcgcctcgcacccccagccagtccgtcgatccagctgccagcgcagccgccagcgccggcacatcccgctctgggctttaaacgtgacccctcgcctcgactcgccctgccctgtgaaaatgttggtgcttcttgctttcatcatcgccttccacatcacctctgcagccttgctgttcattgccaccgtcgacaatgcctggtgggtaggagatgagttttttgcagatgtctggagaatatgtaccaacaacacgaattgcacagtcatcaatgacagctttcaagagtactccacgctgcaggcggtccaggccaccatgatcctctccaccattctctgctgcatcgccttcttcatcttcgtgctccagctcttccgcctgaagcagggagagaggtttgtcctaacctccatcatccagctaatgtcatgtctgtgtgtcatgattgcggcctccatttatacagacaggcgtgaagacattcacgacaaaaacgcgaaattctatcccgtgaccagagaaggcagctacggctactcctacatcctggcgtgggtggccttcgcctgcaccttcatcagcggcatgatgtacctgatactgaggaagcgcaaatagagttccggagctgggttgcttctgctgcagtacagaatccacattcagataaccattttgtatataatcattattttttgaggtttttctagcaaacgtattgtttcctttaaaagccaaaaaaaaaaaaaaaaacaaaacaaaaaaaagaaaaaagaaaaaaaaattccaaaagagagaagagtttttgcattcttgagatcagagaatagactatgaaggctggtattcagaactgctgcccactcaaaagtctcaacaagacacaagcaaaaatccagcaatgctcaaatccaaaagcactcggcaggacatttcttaaccatggggctgtgatgggaggagaggagaggctgggaaagccgggtctctggggacgtgcttcctatgggtttcagctggcccaagcccctcccgaatctctctgctagtggtgggtggaagagggtgaggtggggtataggagaagaatgacagcttcctgagaggtttcacccaagttccaagtgagaagcaggtgtagtccctggcattctgtctgtatccaaaccagagcccagccatccctccggtatcggggtgggtcagaaaaagtctcacctcaatttgccgacagtgtcacctgcttgccttaggaatggtcatccttaacctgcgtgccagatttagactcgtctttaggcaaaacctacagcgccccccccctcaccccagacctacagaatcagagtcttcaagggatggggccagggaatctgcatttctaacgcgctccctgggcaacgcttcagatgcgttgaagttggggaccacggtgcctgggccaggtcagcagagctgcctcgtaaatgctggggtatcgtcatgtggagatggggaggtgaatgcaacccccacagcaggccaaaaccttggcctccatcgccacagctgtctacatctagggccccaaaactccattcctgagccatgtgaactcatagacaccttcagggtgtggggtacagcctccttcccatcttatcccagaaggcctctcccttcttgtccagcccttcatgctacacctggctggcctctcacccctatttctagagcctcagaggacccatccaccattcattcattcattcattcattcattcattcattcattcatcaacataaatcataacttgcatgcatgtgccaggcacaggggataccctctagagacaatctcctcctagggctcatggcctagtggaggagacagattaaaacttaattagaaaaactggctgggtacagtggctcatgcttgtaatcccagcactttgggaggctgaggcgggtggatcacctgaggtcaggagttcaagaccagcctggccaaaatggtaaaacctgtctctactaaaaatacaaaaatgagctgggcgtggtggtgcatgcctgtaatcccagctatcaggtggctgaggcaggagaatcacttgaaatgggaggtggaggttgcagtgagccgagaccgtgccactgcactccagcctgggtgacagagtgagactccatctcaaaaaaagaaaaaaaagaaaagaaactaattacacactgtgatggaggctgcaaagaacaccactaagaattcaaaatcagctgggtgcggtggctcacacctgtaatcccagcactttgggaggctgaggcaggtggatcacaaggtcaggagttcaagaccagcctggccaacatggtgaaaccccgtctctaccgaaaatacaacaaaattagcccggtgtggtggcaggtgcctgtaatcccagctacttaggaggctgaggcaggagaatcgcttgaaactgggaggcggaggtcgcagtgagccgagattcaccactgcactccagcccaggcgacagtctgagactccgtctcaaaaataaaacgattcaaaatcgaggcctgtggcatggtagggaggctgctttacgcgtgcctattattaaatgctcctggaggcatttaggtatttagatcagtctaaatatagctccattcagttcgtgcagatgacagttattgggcagtacctgtctgtgtaacacccagaaaacatgtctgtggaggggcccatggtcccgacagtaaatgcggtgagagggtcccatagagctggagttttcaagctttaggggttcccgtgctgcttgggacaggctgattcagagggtctgggtgaatgatttccaggtgattttaagactgtgctgagaaatagggcttttggggccttgtccttcaggatcaaagcatgatgctgtgtggcaatgcagaccacccaggaaccatcccaggagataagctctttgcacctcattgtctttttctgcttatgttggagcaggatgctgggggctgtcctgggatggggtgtgggacctcgtgctatttaaatacttttgcacttgaccttctgctgagtggagtggtggtttgccatcagctcagttccagtggagctgaagagacatctggtttgagtagttttagggccaccatggatatctcttcaatgcaggattggctctttccatctgctctttcattcatttgtttttgacagatagtattaaatgtttaccatgttccaggcactgtgtgaggctctgaaaatacaggggtgagcaaatccagatatcctccctgccatcatgaagtttggagtctatgagataggaccccctccctatggagaagccaccaatgcagtacagggtgacctggggccagagacaggacaaatgtcacctcctgcctccatgagatactctcactagtcatattgtgggcaagaatgtggcttacacccctagggttaacaggatgctacccaagctcatggaggaagttgaatcttaagttcccttgaaactttctaccttggtggcttttctataattttcttttttctttttctttttttttttttttttgagactgagttttgctcttgttgcccaggctggagtgcggtggcaccatcttggctcaccgcaacctctgcctcctgggttcaagtgattctcctgcctcagcctcccgagtagctgggattgcaggcatgtcccaccatgcccagctaatttttgtatttttagtagagatggggtttctccatgttggtcaggctggtttcgaactcccaacctcaggtgatccgcccacctcagccttccaaagtgctgggattacaggcatgagccactgcgtctggccttctataattttctggtagtcacgatggaaacaaacaaaacaccttagaaccagagatcgaccccctcaagcaatacatcaattcccttcacaagaaacgtcggggctacatgagtatctgtgttgaatgcggtctgaaatgatcctatggattttcccggctggttgccactactgtacaacattcagtgcccacatccatctgtgccattaagcttttttgagacatgagagatgcctcttccctgctgtatgacatgcatttgggaagttggaaagaaatgacaaaatcagggagaaaacatccaagcttcttacctgtagatagaatcagccctcacttggtgcttattaccagttattcaagaacaataacaacaacaaaattagtagacatccaagaagcacatattaggaccaaagatagcatcaactgtatttgaaggaactgtagtttgcgcattttatgacatttttataaagtactgtaattctttcattgaggggctatgtgatggagacagactaactcattttgttatttgcattaaaattattttgggtctctgttcaaatgagtttggagaatgcttgacttgttggtctgtgtaaatgtgtatatatatatacctgaatacaggaacatcggagacctattcactcccacacactctgctatagtttgcgtgcttttgtggacacccctcatgaacaggctggcgctctaggacgctctgtgttcactgatgatgaagaaacctagaactccaagcctgtttgtaaacacactaaacacagtggcctagatagaaactgtatcgtagtttaaaatctgcctcgcgggatgttactaaactcgctaatagtttaaaggttacttacaatagagcaagttggacaattttgtggtgttggggaaatgttagggcaaggcctagaggttcattttgaatcttggtttgtgactttagggtagttagaaactttctacttaatgtacctttaaaatagtccattttctatgttttgtataatctgaaactgtacatggaaaataaagtttaaaaccagattgcccagagcaagactctaatgttcccaacggtgatgacatctagggcagaatgctgccattttgaggggcagggggtcagctgatttctcatcaagataataatgtatggtttttacactaagcaactgataaatggacaatttatcactggaaaaaa

SEQ ID NO: 61149 - DNA, 5057 bp, Homo sapiens
ggcgggatcggggaaggaggggccccgccgcctagagggtggagggagggcgcgcagtcccagcccagagcttcaaaacagcccggcggcctcgcctcgcacccccagccagtccgtcgatccagctgccagcgcagccgccagcgccggcacatcccgctctgggctttaaacgtgacccctcgcctcgactcgccctgccctgtgaaaatgttggtgcttcttgctttcatcatcgccttccacatcacctctgcagccttgctgttcattgccaccgtcgacaatgcctggtgggtaggagatgagttttttgcagatgtctggagaatatgtaccaacaacacgaattgcacagtcatcaatgacagctttcaagagtactccacgctgcaggcggtccaggccaccatgatcctctccaccattctctgctgcatcgccttcttcatcttcgtgctccagctcttccgcctgaagcagggagagaggtttgtcctaacctccatcatccagctaatgtcatgtctgtgtgtcatgattgcggcctccatttatacagacaggcgtgaagacattcacgacaaaaacgcgaaattctatcccgtgaccagagaaggcagctacggctactcctacatcctggcgtgggtggccttcgcctgcaccttcatcagcggcatgatgtacctgatactgaggaagcgcaaatagagttccggagctgggttgcttctgctgcagtacagaatccacattcagataaccattttgtatataatcattattttttgaggtttttctagcaaacgtattgtttcctttaaaagccaaaaaaaaaaaaaaaaacaaaacaaaaaaaagaaaaaagaaaaaaaaattccaaaagagagaagagtttttgcattcttgagatcagagaatagactatgaaggctggtattcagaactgctgcccactcaaaagtctcaacaagacacaagcaaaaatccagcaatgctcaaatccaaaagcactcggcaggacatttcttaaccatggggctgtgatgggaggagaggagaggctgggaaagccgggtctctggggacgtgcttcctatgggtttcagctggcccaagcccctcccgaatctctctgctagtggtgggtggaagagggtgaggtggggtataggagaagaatgacagcttcctgagaggtttcacccaagttccaagtgagaagcaggtgtagtccctggcattctgtctgtatccaaaccagagcccagccatccctccggtatcggggtgggtcagaaaaagtctcacctcaatttgccgacagtgtcacctgcttgccttaggaatggtcatccttaacctgcgtgccagatttagactcgtctttaggcaaaacctacagcgccccccccctcaccccagacctacagaatcagagtcttcaagggatggggccagggaatctgcatttctaacgcgctccctgggcaacgcttcagatgcgttgaagttggggaccacggtgcctgggccaggtcagcagagctgcctcgtaaatgctggggtatcgtcatgtggagatggggaggtgaatgcaacccccacagcaggccaaaaccttggcctccatcgccacagctgtctacatctagggccccaaaactccattcctgagccatgtgaactcatagacaccttcagggtgtggggtacagcctccttcccatcttatcccagaaggcctctcccttcttgtccagcccttcatgctacacctggctggcctctcacccctatttctagagcctcagaggacccatccaccattcattcattcattcattcattcattcattcattcattcatcaacataaatcataacttgcatgcatgtgccaggcacaggggataccctctagagacaatctcctcctagggctcatggcctagtggaggagacagattaaaacttaattagaaaaactggctgggtacagtggctcatgcttgtaatcccagcactttgggaggctgaggcgggtggatcacctgaggtcaggagttcaagaccagcctggccaaaatggtaaaacctgtctctactaaaaatacaaaaatgagctgggcgtggtggtgcatgcctgtaatcccagctatcaggtggctgaggcaggagaatcacttgaaatgggaggtggaggttgcagtgagccgagaccgtgccactgcactccagcctgggtgacagagtgagactccatctcaaaaaaagaaaaaaaagaaaagaaactaattacacactgtgatggaggctgcaaagaacaccactaagaattcaaaatcagctgggtgcggtggctcacacctgtaatcccagcactttgggaggctgaggcaggtggatcacaaggtcaggagttcaagaccagcctggccaacatggtgaaaccccgtctctaccgaaaatacaacaaaattagcccggtgtggtggcaggtgcctgtaatcccagctacttaggaggctgaggcaggagaatcgcttgaaactgggaggcggaggtcgcagtgagccgagattcaccactgcactccagcccaggcgacagtctgagactccgtctcaaaaataaaacgattcaaaatcgaggcctgtggcatggtagggaggctgctttacgcgtgcctattattaaatgctcctggaggcatttaggtatttagatcagtctaaatatagctccattcagttcgtgcagatgacagttattgggcagtacctgtctgtgtaacacccagaaaacatgtctgtggaggggcccatggtcccgacagtaaatgcggtgagagggtcccatagagctggagttttcaagctttaggggttcccgtgctgcttgggacaggctgattcagagggtctgggtgaatgatttccaggtgattttaagactgtgctgagaaatagggcttttggggccttgtccttcaggatcaaagcatgatgctgtgtggcaatgcagaccacccaggaaccatcccaggagataagctctttgcacctcattgtctttttctgcttatgttggagcaggatgctgggggctgtcctgggatggggtgtgggacctcgtgctatttaaatacttttgcacttgaccttctgctgagtggagtggtggtttgccatcagctcagttccagtggagctgaagagacatctggtttgagtagttttagggccaccatggatatctcttcaatgcaggattggctctttccatctgctctttcattcatttgtttttgacagatagtattaaatgtttaccatgttccaggcactgtgtgaggctctgaaaatacaggggtgagcaaatccagatatcctccctgccatcatgaagtttggagtctatgagataggaccccctccctatggagaagccaccaatgcagtacagggtgacctggggccagagacaggacaaatgtcacctcctgcctccatgagatactctcactagtcatattgtgggcaagaatgtggcttacacccctagggttaacaggatgctacccaagctcatggaggaagttgaatcttaagttcccttgaaactttctaccttggtggcttttctataattttcttttttctttttctttttttttttttttttgagactgagttttgctcttgttgcccaggctggagtgcggtggcaccatcttggctcaccgcaacctctgcctcctgggttcaagtgattctcctgcctcagcctcccgagtagctgggattgcaggcatgtcccaccatgcccagctaatttttgtatttttagtagagatggggtttctccatgttggtcaggctggtttcgaactcccaacctcaggtgatccgcccacctcagccttccaaagtgctgggattacaggcatgagccactgcgtctggccttctataattttctggtagtcacgatggaaacaaacaaaacaccttagaaccagagatcgaccccctcaagcaatacatcaattcccttcacaagaaacgtcggggctacatgagtatctgtgttgaatgcggtctgaaatgatcctatggattttcccggctggttgccactactgtacaacattcagtgcccacatccatctgtgccattaagcttttttgagacatgagagatgcctcttccctgctgtatgacatgcatttgggaagttggaaagaaatgacaaaatcagggagaaaacatccaagcttcttacctgtagatagaatcagccctcacttggtgcttattaccagttattcaagaacaataacaacaacaaaattagtagacatccaagaagcacatattaggaccaaagatagcatcaactgtatttgaaggaactgtagtttgcgcattttatgacatttttataaagtactgtaattctttcattgaggggctatgtgatggagacagactaactcattttgttatttgcattaaaattattttgggtctctgttcaaatgagtttggagaatgcttgacttgttggtctgtgtaaatgtgtatatatatatacctgaatacaggaacatcggagacctattcactcccacacactctgctatagtttgcgtgcttttgtggacacccctcatgaacaggctggcgctctaggacgctctgtgttcactgatgatgaagaaacctagaactccaagcctgtttgtaaacacactaaacacagtggcctagatagaaactgtatcgtagtttaaaatctgcctcgcgggatgttactaaactcgctaatagtttaaaggttacttacaatagagcaagttggacaattttgtggtgttggggaaatgttagggcaaggcctagaggttcattttgaatcttggtttgtgactttagggtagttagaaactttctacttaatgtacctttaaaactttattttccatgtacagtttcagattatacaaaacacagaaaatggactattttaaaggtacattaaggtcgacg

SEQ ID NO: 61150 - DNA, 4896 bp, Homo sapiens
ggcgggatcggggaaggaggggccccgccgcctagagggtggagggagggcgcgcagtcccagcccagagcttcaaaacagcccggcggcctcgcctcgcacccccagccagtccgtcgatccagctgccagcgcagccgccagcgccggcacatcccgctctgggctttaaacgtgacccctcgcctcgactcgccctgccctgtgaaaatgttggtgcttcttgctttcatcatcgccttccacatcacctctgcagccttgctgttcattgccaccgtcgacaatgcctggtgggtaggagatgagttttttgcagatgtctggagaatatgtaccaacaacacgaattgcacagtcatcaatgacagctttcaagagtactccacgctgcaggcggtccaggccaccatgatcctctccaccattctctgctgcatcgccttcttcatcttcgtgctccagctcttccgcctgaagcagggagagaggtttgtcctaacctccatcatccagctaatgtcatgtctgtgtgtcatgattgcggcctccatttatacagacaggcgtgaagacattcacgacaaaaacgcgaaattctatcccgtgaccagagaaggcagctacggctactcctacatcctggcgtgggtggccttcgcctgcaccttcatcagcggcatgatgtacctgatactgaggaagcgcaaatagagttccggagctgggttgcttctgctgcagtacagaatccacattcagataaccattttgtatataatcattattttttgaggtttttctagcaaacgtattgtttcctttaaaagccaaaaaaaaaaaaaaaaacaaaacaaaaaaaagaaaaaagaaaaaaaaattccaaaagagagaagagtttttgcattcttgagatcagagaatagactatgaaggctggtattcagaactgctgcccactcaaaagtctcaacaagacacaagcaaaaatccagcaatgctcaaatccaaaagcactcggcaggacatttcttaaccatggggctgtgatgggaggagaggagaggctgggaaagccgggtctctggggacgtgcttcctatgggtttcagctggcccaagcccctcccgaatctctctgctagtggtgggtggaagagggtgaggtggggtataggagaagaatgacagcttcctgagaggtttcacccaagttccaagtgagaagcaggtgtagtccctggcattctgtctgtatccaaaccagagcccagccatccctccggtatcggggtgggtcagaaaaagtctcacctcaatttgccgacagtgtcacctgcttgccttaggaatggtcatccttaacctgcgtgccagatttagactcgtctttaggcaaaacctacagcgccccccccctcaccccagacctacagaatcagagtcttcaagggatggggccagggaatctgcatttctaacgcgctccctgggcaacgcttcagatgcgttgaagttggggaccacggtgcctgggccaggtcagcagagctgcctcgtaaatgctggggtatcgtcatgtggagatggggaggtgaatgcaacccccacagcaggccaaaaccttggcctccatcgccacagctgtctacatctagggccccaaaactccattcctgagccatgtgaactcatagacaccttcagggtgtggggtacagcctccttcccatcttatcccagaaggcctctcccttcttgtccagcccttcatgctacacctggctggcctctcacccctatttctagagcctcagaggacccatccaccattcattcattcattcattcattcattcattcattcattcatcaacataaatcataacttgcatgcatgtgccaggcacaggggataccctctagagacaatctcctcctagggctcatggcctagtggaggagacagattaaaacttaattagaaaaactggctgggtacagtggctcatgcttgtaatcccagcactttgggaggctgaggcgggtggatcacctgaggtcaggagttcaagaccagcctggccaaaatggtaaaacctgtctctactaaaaatacaaaaatgagctgggcgtggtggtgcatgcctgtaatcccagctatcaggtggctgaggcaggagaatcacttgaaatgggaggtggaggttgcagtgagccgagaccgtgccactgcactccagcctgggtgacagagtgagactccatctcaaaaaaagaaaaaaaagaaaagaaactaattacacactgtgatggaggctgcaaagaacaccactaagaattcaaaatcagctgggtgcggtggctcacacctgtaatcccagcactttgggaggctgaggcaggtggatcacaaggtcaggagttcaagaccagcctggccaacatggtgaaaccccgtctctaccgaaaatacaacaaaattagcccggtgtggtggcaggtgcctgtaatcccagctacttaggaggctgaggcaggagaatcgcttgaaactgggaggcggaggtcgcagtgagccgagattcaccactgcactccagcccaggcgacagtctgagactccgtctcaaaaataaaacgattcaaaatcgaggcctgtggcatggtagggaggctgctttacgcgtgcctattattaaatgctcctggaggcatttaggtatttagatcagtctaaatatagctccattcagttcgtgcagatgacagttattgggcagtacctgtctgtgtaacacccagaaaacatgtctgtggaggggcccatggtcccgacagtaaatgcggtgagagggtcccatagagctggagttttcaagctttaggggttcccgtgctgcttgggacaggctgattcagagggtctgggtgaatgatttccaggtgattttaagactgtgctgagaaatagggcttttggggccttgtccttcaggatcaaagcatgatgctgtgtggcaatgcagaccacccaggaaccatcccaggagataagctctttgcacctcattgtctttttctgcttatgttggagcaggatgctgggggctgtcctgggatggggtgtgggacctcgtgctatttaaatacttttgcacttgaccttctgctgagtggagtggtggtttgccatcagctcagttccagtggagctgaagagacatctggtttgagtagttttagggccaccatggatatctcttcaatgcaggattggctctttccatctgctctttcattcatttgtttttgacagatagtattaaatgtttaccatgttccaggcactgtgtgaggctctgaaaatacaggggtgagcaaatccagatatcctccctgccatcatgaagtttggagtctatgagataggaccccctccctatggagaagccaccaatgcagtacagggtgacctggggccagagacaggacaaatgtcacctcctgcctccatgagatactctcactagtcatattgtgggcaagaatgtggcttacacccctagggttaacaggatgctacccaagctcatggaggaagttgaatcttaagttcccttgaaactttctaccttggtggcttttctataattttcttttttctttttctttttttttttttttttgagactgagttttgctcttgttgcccaggctggagtgcggtggcaccatcttggctcaccgcaacctctgcctcctgggttcaagtgattctcctgcctcagcctcccgagtagctgggattgcaggcatgtcccaccatgcccagctaatttttgtatttttagtagagatggggtttctccatgttggtcaggctggtttcgaactcccaacctcaggtgatccgcccacctcagccttccaaagtgctgggattacaggcatgagccactgcgtctggccttctataattttctggtagtcacgatggaaacaaacaaaacaccttagaaccagagatcgaccccctcaagcaatacatcaattcccttcacaagaaacgtcggggctacatgagtatctgtgttgaatgcggtctgaaatgatcctatggattttcccggctggttgccactactgtacaacattcagtgcccacatccatctgtgccattaagcttttttgagacatgagagatgcctcttccctgctgtatgacatgcatttgggaagttggaaagaaatgacaaaatcagggagaaaacatccaagcttcttacctgtagatagaatcagccctcacttggtgcttattaccagttattcaagaacaataacaacaacaaaattagtagacatccaagaagcacatattaggaccaaagatagcatcaactgtatttgaaggaactgtagtttgcgcattttatgacatttttataaagtactgtaattctttcattgaggggctatgtgatggagacagactaactcattttgttatttgcattaaaattattttgggtctctgttcaaatgagtttggagaatgcttgacttgttggtctgtgtaaatgtgtatatatatatacctgaatacaggaacatcggagacctattcactcccacacactctgctatagtttgcgtgcttttgtggacacccctcatgaacaggctggcgctctaggacgctctgtgttcactgatgatgaagaaacctagaactccaagcctgtttgtaaacacactaaacacagtggcctagatagaaactgtatcgtagtttaaaatctgcctcgcgggatgttactaaactcgctaatagtttaaaggttacttacaatagagcaagttggactactccccaggatcctgctagagtc

SEQ ID NO: 61151 - DNA, 5298 bp, Homo sapiens
  misc_feature (5113)..(5113): n is a, c, g, or t
  misc_feature (5130)..(5130): n is a, c, g, or t
  misc_feature (5134)..(5134): n is a, c, g, or t
  misc_feature (5141)..(5141): n is a, c, g, or t
  misc_feature (5144)..(5144): n is a, c, g, or t
  misc_feature (5149)..(5149): n is a, c, g, or t
  misc_feature (5171)..(5171): n is a, c, g, or t
  misc_feature (5189)..(5189): n is a, c, g, or t
  misc_feature (5216)..(5216): n is a, c, g, or t
  misc_feature (5220)..(5220): n is a, c, g, or t
  misc_feature (5230)..(5230): n is a, c, g, or t
ccggagcaggcctgggagtccttgcagggtggcctgggtgactgctcaccagcccggccctccccagggttctgggccagagcctccctggccgttggagcgggagctgtgggtggaacacttctgaattgggagattgcctcggacctccagacgccgaacatctcagcacatcccgctctgggctttaaacgtgacccctcgcctcgactcgccctgccctgtgaaaatgttggtgcttcttgctttcatcatcgccttccacatcacctctgcagccttgctgttcattgccaccgtcgacaatgcctggtgggtaggagatgagttttttgcagatgtctggagaatatgtaccaacaacacgaattgcacagtcatcaatgacagctttcaagagtactccacgctgcaggcggtccaggccaccatgatcctctccaccattctctgctgcatcgccttcttcatcttcgtgctccagctcttccgcctgaagcagggagagaggtttgtcctaacctccatcatccagctaatgtcatgtctgtgtgtcatgattgcggcctccatttatacagacaggcgtgaagacattcacgacaaaaacgcgaaattctatcccgtgaccagagaaggcagctacggctactcctacatcctggcgtgggtggccttcgcctgcaccttcatcagcggcatgatgtacctgatactgaggaagcgcaaatagagttccggagctgggttgcttctgctgcagtacagaatccacattcagataaccattttgtatataatcattattttttgaggtttttctagcaaacgtattgtttcctttaaaagccaaaaaaaaaaaaaaaaacaaaacaaaaaaaagaaaaaagaaaaaaaaattccaaaagagagaagagtttttgcattcttgagatcagagaatagactatgaaggctggtattcagaactgctgcccactcaaaagtctcaacaagacacaagcaaaaatccagcaatgctcaaatccaaaagcactcggcaggacatttcttaaccatggggctgtgatgggaggagaggagaggctgggaaagccgggtctctggggacgtgcttcctatgggtttcagctggcccaagcccctcccgaatctctctgctagtggtgggtggaagagggtgaggtggggtataggagaagaatgacagcttcctgagaggtttcacccaagttccaagtgagaagcaggtgtagtccctggcattctgtctgtatccaaaccagagcccagccatccctccggtatcggggtgggtcagaaaaagtctcacctcaatttgccgacagtgtcacctgcttgccttaggaatggtcatccttaacctgcgtgccagatttagactcgtctttaggcaaaacctacagcgccccccccctcaccccagacctacagaatcagagtcttcaagggatggggccagggaatctgcatttctaacgcgctccctgggcaacgcttcagatgcgttgaagttggggaccacggtgcctgggccaggtcagcagagctgcctcgtaaatgctggggtatcgtcatgtggagatggggaggtgaatgcaacccccacagcaggccaaaaccttggcctccatcgccacagctgtctacatctagggccccaaaactccattcctgagccatgtgaactcatagacaccttcagggtgtggggtacagcctccttcccatcttatcccagaaggcctctcccttcttgtccagcccttcatgctacacctggctggcctctcacccctatttctagagcctcagaggacccatccaccattcattcattcattcattcattcattcattcattcattcatcaacataaatcataacttgcatgcatgtgccaggcacaggggataccctctagagacaatctcctcctagggctcatggcctagtggaggagacagattaaaacttaattagaaaaactggctgggtacagtggctcatgcttgtaatcccagcactttgggaggctgaggcgggtggatcacctgaggtcaggagttcaagaccagcctggccaaaatggtaaaacctgtctctactaaaaatacaaaaatgagctgggcgtggtggtgcatgcctgtaatcccagctatcaggtggctgaggcaggagaatcacttgaaatgggaggtggaggttgcagtgagccgagaccgtgccactgcactccagcctgggtgacagagtgagactccatctcaaaaaaagaaaaaaaagaaaagaaactaattacacactgtgatggaggctgcaaagaacaccactaagaattcaaaatcagctgggtgcggtggctcacacctgtaatcccagcactttgggaggctgaggcaggtggatcacaaggtcaggagttcaagaccagcctggccaacatggtgaaaccccgtctctaccgaaaatacaacaaaattagcccggtgtggtggcaggtgcctgtaatcccagctacttaggaggctgaggcaggagaatcgcttgaaactgggaggcggaggtcgcagtgagccgagattcaccactgcactccagcccaggcgacagtctgagactccgtctcaaaaataaaacgattcaaaatcgaggcctgtggcatggtagggaggctgctttacgcgtgcctattattaaatgctcctggaggcatttaggtatttagatcagtctaaatatagctccattcagttcgtgcagatgacagttattgggcagtacctgtctgtgtaacacccagaaaacatgtctgtggaggggcccatggtcccgacagtaaatgcggtgagagggtcccatagagctggagttttcaagctttaggggttcccgtgctgcttgggacaggctgattcagagggtctgggtgaatgatttccaggtgattttaagactgtgctgagaaatagggcttttggggccttgtccttcaggatcaaagcatgatgctgtgtggcaatgcagaccacccaggaaccatcccaggagataagctctttgcacctcattgtctttttctgcttatgttggagcaggatgctgggggctgtcctgggatggggtgtgggacctcgtgctatttaaatacttttgcacttgaccttctgctgagtggagtggtggtttgccatcagctcagttccagtggagctgaagagacatctggtttgagtagttttagggccaccatggatatctcttcaatgcaggattggctctttccatctgctctttcattcatttgtttttgacagatagtattaaatgtttaccatgttccaggcactgtgtgaggctctgaaaatacaggggtgagcaaatccagatatcctccctgccatcatgaagtttggagtctatgagataggaccccctccctatggagaagccaccaatgcagtacagggtgacctggggccagagacaggacaaatgtcacctcctgcctccatgagatactctcactagtcatattgtgggcaagaatgtggcttacacccctagggttaacaggatgctacccaagctcatggaggaagttgaatcttaagttcccttgaaactttctaccttggtggcttttctataattttcttttttctttttctttttttttttttttttgagactgagttttgctcttgttgcccaggctggagtgcggtggcaccatcttggctcaccgcaacctctgcctcctgggttcaagtgattctcctgcctcagcctcccgagtagctgggattgcaggcatgtcccaccatgcccagctaatttttgtatttttagtagagatggggtttctccatgttggtcaggctggtttcgaactcccaacctcaggtgatccgcccacctcagccttccaaagtgctgggattacaggcatgagccactgcgtctggccttctataattttctggtagtcacgatggaaacaaacaaaacaccttagaaccagagatcgaccccctcaagcaatacatcaattcccttcacaagaaacgtcggggctacatgagtatctgtgttgaatgcggtctgaaatgatcctatggattttcccggctggttgccactactgtacaacattcagtgcccacatccatctgtgccattaagcttttttgagacatgagagatgcctcttccctgctgtatgacatgcatttgggaagttggaaagaaatgacaaaatcagggagaaaacatccaagcttcttacctgtagatagaatcagccctcacttggtgcttattaccagttattcaagaacaataacaacaacaaaattagtagacatccaagaagcacatattaggaccaaagatagcatcaactgtatttgaaggaactgtagtttgcgcattttatgacatttttataaagtactgtaattctttcattgaggggctatgtgatggagacagactaactcattttgttatttgcattaaaattattttgggtctctgttcaaatgagtttggagaatgcttgacttgttggtctgtgtaaatgtgtatatatatatacctgaatacaggaacatcggagacctattcactcccacacactctgctatagtttgcgtgcttttgtggacacccctcatgaacaggctggcgctctaggacgctctgtgttcactgatgatgaagaaacctagaactccaagcctgtttgtaaacacactaaacacagtggcctagatagaaactgtatcgtagtttaaaatctgcctcgcgggatgttactaaactcgctaatagtttaaaggttacttacaatagagcaagttggacaattttgtggtgttggggaaatgttagggcaaggcctagaggttcattttgaatcttggtttgtgactttagggtagttagaaactttctacttaatgtacctttaaaatagtccattttctatgttttgtataatctgaaactgtacatggaaaataaagtttaaaaccagaaaaaaaaattgcttcaacagtgtttggacggaacagatccggggactctnttccagccttcgaccgncctncgatttnctntccgnttgcacctccgggaccatcttntcggccatctcctgcttntgggacctgcaacaccggttttgtggntagntccttcttgncaacaaccatgagctcccagatttgtagaattattcacccgacgtggaagcagccgcaccctggtctt

SEQ ID NO: 61152 - DNA, 4989 bp, Homo sapiens
ggcgggatcggggaaggaggggccccgccgcctagagggtggagggagggcgcgcagtcccagcccagagcttcaaaacagcccggcggcctcgcctcgcacccccagccagtccgtcgatccagctgccagcgcagccgccagcgccggcacatcccgctctgggctttaaacgtgacccctcgcctcgactcgccctgccctgtgaaaatgttggtgcttcttgctttcatcatcgccttccacatcacctctgcagccttgctgttcattgccaccgtcgacaatgcctggtgggtaggagatgagttttttgcagatgtctggagaatatgtaccaacaacacgaattgcacagtcatcaatgacagctttcaagagtactccacgctgcaggcggtccaggccaccatgatcctctccaccattctctgctgcatcgccttcttcatcttcgtgctccagctcttccgcctgaagcagggagagaggtttgtcctaacctccatcatccagctaatgtcatgtctgtgtgtcatgattgcggcctccatttatacagacaggcgtgaagacattcacgacaaaaacgcgaaattctatcccgtgaccagagaaggcagctacggctactcctacatcctggcgtgggtggccttcgcctgcaccttcatcagcggcatgatgtacctgatactgaggaagcgcaaatagagttccggagctgggttgcttctgctgcagtacagaatccacattcagataaccattttgtatataatcattattttttgaggtttttctagcaaacgtattgtttcctttaaaagccaaaaaaaaaaaaaaaaacaaaacaaaaaaaagaaaaaagaaaaaaaaattccaaaagagagaagagtttttgcattcttgagatcagagaatagactatgaaggctggtattcagaactgctgcccactcaaaagtctcaacaagacacaagcaaaaatccagcaatgctcaaatccaaaagcactcggcaggacatttcttaaccatggggctgtgatgggaggagaggagaggctgggaaagccgggtctctggggacgtgcttcctatgggtttcagctggcccaagcccctcccgaatctctctgctagtggtgggtggaagagggtgaggtggggtataggagaagaatgacagcttcctgagaggtttcacccaagttccaagtgagaagcaggtgtagtccctggcattctgtctgtatccaaaccagagcccagccatccctccggtatcggggtgggtcagaaaaagtctcacctcaatttgccgacagtgtcacctgcttgccttaggaatggtcatccttaacctgcgtgccagatttagactcgtctttaggcaaaacctacagcgccccccccctcaccccagacctacagaatcagagtcttcaagggatggggccagggaatctgcatttctaacgcgctccctgggcaacgcttcagatgcgttgaagttggggaccacggtgcctgggccaggtcagcagagctgcctcgtaaatgctggggtatcgtcatgtggagatggggaggtgaatgcaacccccacagcaggccaaaaccttggcctccatcgccacagctgtctacatctagggccccaaaactccattcctgagccatgtgaactcatagacaccttcagggtgtggggtacagcctccttcccatcttatcccagaaggcctctcccttcttgtccagcccttcatgctacacctggctggcctctcacccctatttctagagcctcagaggacccatccaccattcattcattcattcattcattcattcattcattcattcatcaacataaatcataacttgcatgcatgtgccaggcacaggggataccctctagagacaatctcctcctagggctcatggcctagtggaggagacagattaaaacttaattagaaaaactggctgggtacagtggctcatgcttgtaatcccagcactttgggaggctgaggcgggtggatcacctgaggtcaggagttcaagaccagcctggccaaaatggtaaaacctgtctctactaaaaatacaaaaatgagctgggcgtggtggtgcatgcctgtaatcccagctatcaggtggctgaggcaggagaatcacttgaaatgggaggtggaggttgcagtgagccgagaccgtgccactgcactccagcctgggtgacagagtgagactccatctcaaaaaaagaaaaaaaagaaaagaaactaattacacactgtgatggaggctgcaaagaacaccactaagaattcaaaatcagctgggtgcggtggctcacacctgtaatcccagcactttgggaggctgaggcaggtggatcacaaggtcaggagttcaagaccagcctggccaacatggtgaaaccccgtctctaccgaaaatacaacaaaattagcccggtgtggtggcaggtgcctgtaatcccagctacttaggaggctgaggcaggagaatcgcttgaaactgggaggcggaggtcgcagtgagccgagattcaccactgcactccagcccaggcgacagtctgagactccgtctcaaaaataaaacgattcaaaatcgaggcctgtggcatggtagggaggctgctttacgcgtgcctattattaaatgctcctggaggcatttaggtatttagatcagtctaaatatagctccattcagttcgtgcagatgacagttattgggcagtacctgtctgtgtaacacccagaaaacatgtctgtggaggggcccatggtcccgacagtaaatgcggtgagagggtcccatagagctggagttttcaagctttaggggttcccgtgctgcttgggacaggctgattcagagggtctgggtgaatgatttccaggtgattttaagactgtgctgagaaatagggcttttggggccttgtccttcaggatcaaagcatgatgctgtgtggcaatgcagaccacccaggaaccatcccaggagataagctctttgcacctcattgtctttttctgcttatgttggagcaggatgctgggggctgtcctgggatggggtgtgggacctcgtgctatttaaatacttttgcacttgaccttctgctgagtggagtggtggtttgccatcagctcagttccagtggagctgaagagacatctggtttgagtagttttagggccaccatggatatctcttcaatgcaggattggctctttccatctgctctttcattcatttgtttttgacagatagtattaaatgtttaccatgttccaggcactgtgtgaggctctgaaaatacaggggtgagcaaatccagatatcctccctgccatcatgaagtttggagtctatgagataggaccccctccctatggagaagccaccaatgcagtacagggtgacctggggccagagacaggacaaatgtcacctcctgcctccatgagatactctcactagtcatattgtgggcaagaatgtggcttacacccctagggttaacaggatgctacccaagctcatggaggaagttgaatcttaagttcccttgaaactttctaccttggtggcttttctataattttcttttttctttttctttttttttttttttttgagactgagttttgctcttgttgcccaggctggagtgcggtggcaccatcttggctcaccgcaacctctgcctcctgggttcaagtgattctcctgcctcagcctcccgagtagctgggattgcaggcatgtcccaccatgcccagctaatttttgtatttttagtagagatggggtttctccatgttggtcaggctggtttcgaactcccaacctcaggtgatccgcccacctcagccttccaaagtgctgggattacaggcatgagccactgcgtctggccttctataattttctggtagtcacgatggaaacaaacaaaacaccttagaaccagagatcgaccccctcaagcaatacatcaattcccttcacaagaaacgtcggggctacatgagtatctgtgttgaatgcggtctgaaatgatcctatggattttcccggctggttgccactactgtacaacattcagtgcccacatccatctgtgccattaagcttttttgagacatgagagatgcctcttccctgctgtatgacatgcatttgggaagttggaaagaaatgacaaaatcagggagaaaacatccaagcttcttacctgtagatagaatcagccctcacttggtgcttattaccagttattcaagaacaataacaacaacaaaattagtagacatccaagaagcacatattaggaccaaagatagcatcaactgtatttgaaggaactgtagtttgcgcattttatgacatttttataaagtactgtaattctttcattgaggggctatgtgatggagacagactaactcattttgttatttgcattaaaattattttgggtctctgttcaaatgagtttggagaatgcttgacttgttggtctgtgtaaatgtgtatatatatatacctgaatacaggaacatcggagacctattcactcccacacactctgctatagtttgcgtgcttttgtggacacccctcatgaacaggctggcgctctaggacgctctgtgttcactgatgatgaagaaacctagaactccaagcctgtttgtaaacacactaaacacagtggcctagatagaaactgtatcgtattacaatagagcaagttggacaattttgtggtgttggggaaatgttagggcaaggcctagaggttcattttgaatcttggtttgtgactttagggtagttagaaactttctacttaatgtacctttaaaatagtccattttctatgttttgtataatctgaaactgtacatggaaaataaagtttaaaaccaga

SEQ ID NO: 61153 - DNA, 4709 bp, Homo sapiens
ggcgggatcggggaaggaggggccccgccgcctagagggtggagggagggcgcgcagtcccagcccagagcttcaaaacagcccggcggcctcgcctcgcacccccagccagtccgtcgatccagctgccagcgcagccgccagcgccggcacatcccgctctgggctttaaacgtgacccctcgcctcgactcgccctgccctgtgaaaatgttggtgcttcttgctttcatcatcgccttccacatcacctctgcagccttgctgttcattgccaccgtcgacaatgcctggtgggtaggagatgagttttttgcagatgtctggagaatatgtaccaacaacacgaattgcacagtcatcaatgacagctttcaagagtactccacgctgcaggcggtccaggccaccatgatcctctccaccattctctgctgcatcgccttcttcatcttcgtgctccagctcttccgcctgaagcagggagagaggtttgtcctaacctccatcatccagctaatgtcatgtctgtgtgtcatgattgcggcctccatttatacagacaggcgtgaagacattcacgacaaaaacgcgaaattctatcccgtgaccagagaaggcagctacggctactcctacatcctggcgtgggtggccttcgcctgcaccttcatcagcggcatgatgtacctgatactgaggaagcgcaaatagagttccggagctgggttgcttctgctgcagtacagaatccacattcagataaccattttgtatataatcattattttttgaggtttttctagcaaacgtattgtttcctttaaaagccaaaaaaaaaaaaaaaaacaaaacaaaaaaaagaaaaaagaaaaaaaaattccaaaagagagaagagtttttgcattcttgagatcagagaatagactatgaaggctggtattcagaactgctgcccactcaaaagtctcaacaagacacaagcaaaaatccagcaatgctcaaatccaaaagcactcggcaggacatttcttaaccatggggctgtgatgggaggagaggagaggctgggaaagccgggtctctggggacgtgcttcctatgggtttcagctggcccaagcccctcccgaatctctctgctagtggtgggtggaagagggtgaggtggggtataggagaagaatgacagcttcctgagaggtttcacccaagttccaagtgagaagcaggtgtagtccctggcattctgtctgtatccaaaccagagcccagccatccctccggtatcggggtgggtcagaaaaagtctcacctcaatttgccgacagtgtcacctgcttgccttaggaatggtcatccttaacctgcgtgccagatttagactcgtctttaggcaaaacctacagcgccccccccctcaccccagacctacagaatcagagtcttcaagggatggggccagggaatctgcatttctaacgcgctccctgggcaacgcttcagatgcgttgaagttggggaccacggtgcctgggccaggtcagcagagctgcctcgtaaatgctggggtatcgtcatgtggagatggggaggtgaatgcaacccccacagcaggccaaaaccttggcctccatcgccacagctgtctacatctagggccccaaaactccattcctgagccatgtgaactcatagacaccttcagggtgtggggtacagcctccttcccatcttatcccagaaggcctctcccttcttgtccagcccttcatgctacacctggctggcctctcacccctatttctagagcctcagaggacccatccaccattcattcattcattcattcattcattcattcattcattcatcaacataaatcataacttgcatgcatgtgccaggcacaggggataccctctagagacaatctcctcctagggctcatggcctagtggaggagacagattaaaacttaattagaaaaactggctgggtacagtggctcatgcttgtaatcccagcactttgggaggctgaggcgggtggatcacctgaggtcaggagttcaagaccagcctggccaaaatggtaaaacctgtctctactaaaaatacaaaaatgagctgggcgtggtggtgcatgcctgtaatcccagctatcaggtggctgaggcaggagaatcacttgaaatgggaggtggaggttgcagtgagccgagaccgtgccactgcactccagcctgggtgacagagtgagactccatctcaaaaaaagaaaaaaaagaaaagaaactaattacacactgtgatggaggctgcaaagaacaccactaagaattcaaaatcagctgggtgcggtggctcacacctgtaatcccagcactttgggaggctgaggcaggtggatcacaaggtcaggagttcaagaccagcctggccaacatggtgaaaccccgtctctaccgaaaatacaacaaaattagcccggtgtggtggcaggtgcctgtaatcccagctacttaggaggctgaggcaggagaatcgcttgaaactgggaggcggaggtcgcagtgagccgagattcaccactgcactccagcccaggcgacagtctgagactccgtctcaaaaataaaacgattcaaaatcgaggcctgtggcatggtagggaggctgctttacgcgtgcctattattaaatgctcctggaggcatttaggtatttagatcagtctaaatatagctccattcagttcgtgcagatgacagttattgggcagtacctgtctgtgtaacacccagaaaacatgtctgtggaggggcccatggtcccgacagtaaatgcggtgagagggtcccatagagctggagttttcaagctttaggggttcccgtgctgcttgggacaggctgattcagagggtctgggtgaatgatttccaggtgattttaagactgtgctgagaaatagggcttttggggccttgtccttcaggatcaaagcatgatgctgtgtggcaatgcagaccacccaggaaccatcccaggagataagctctttgcacctcattgtctttttctgcttatgttggagcaggatgctgggggctgtcctgggatggggtgtgggacctcgtgctatttaaatacttttgcacttgaccttctgctgagtggagtggtggtttgccatcagctcagttccagtggagctgaagagacatctggtttgagtagttttagggccaccatggatatctcttcaatgcaggattggctctttccatctgctctttcattcatttgtttttgacagatagtattaaatgtttaccatgttccaggcactgtgtgaggctctgaaaatacaggggtgagcaaatccagatatcctccctgccatcatgaagtttggagtctatgagataggaccccctccctatggagaagccaccaatgcagtacagggtgacctggggccagagacaggacaaatgtcacctcctgcctccatgagatactctcactagtcatattgtgggcaagaatgtggcttacacccctagggttaacaggatgctacccaagctcatggaggaagttgaatcttaagttcccttgaaactttctaccttggtggcttttctataattttcttttttctttttctttttttttttttttttgagactgagttttgctcttgttgcccaggctggagtgcggtggcaccatcttggctcaccgcaacctctgcctcctgggttcaagtgattctcctgcctcagcctcccgagtagctgggattgcaggcatgtcccaccatgcccagctaatttttgtatttttagtagagatggggtttctccatgttggtcaggctggtttcgaactcccaacctcaggtgatccgcccacctcagccttccaaagtgctgggattacaggcatgagccactgcgtctggccttctataattttctggtagtcacgatggaaacaaacaaaacaccttagaaccagagatcgaccccctcaagcaatacatcaattcccttcacaagaaacgtcggggctacatgagtatctgtgttgaatgcggtctgaaatgatcctatggattttcccggctggttgccactactgtacaacattcagtgcccacatccatctgtgccattaagcttttttgagacatgagagatgcctcttccctgctgtatgacatgcatttgggaagttggaaagaaatgacaaaatcagggagaaaacatccaagcttcttacctgtagatagaatcagccctcacttggtgcttattaccagttattcaagaacaataacaacaacaaaattagtagacatccaagaagcacatattaggaccaaagatagcatcaactgtatttgaaggaactgtagtttgcgcattttatgacatttttataaagtactgtaattctttcattgaggggctatgtgatggagacagactaactcattttgttatttgcattaaaattattttgggtctctgttcaaatgagtttggagaatgcttgacttgttggtctgtgtaaatgtgtatatatatatacctgaatacaggaacatcggagacctattcactcccacacactctgctatagtttgcgtgcttttgtggacacgggacacgaatgtacaggtgagccgagctcgattc

SEQ ID NO: 61154 - DNA, 4264 bp, Homo sapiens
ggcgggatcggggaaggaggggccccgccgcctagagggtggagggagggcgcgcagtcccagcccagagcttcaaaacagcccggcggcctcgcctcgcacccccagccagtccgtcgatccagctgccagcgcagccgccagcgccggcacatcccgctctgggctttaaacgtgacccctcgcctcgactcgccctgccctgtgaaaatgttggtgcttcttgctttcatcatcgccttccacatcacctctgcagccttgctgttcattgccaccgtcgacaatgcctggtgggtaggagatgagttttttgcagatgtctggagaatatgtaccaacaacacgaattgcacagtcatcaatgacagctttcaagagtactccacgctgcaggcggtccaggccaccatgatcctctccaccattctctgctgcatcgccttcttcatcttcgtgctccagctcttccgcctgaagcagggagagaggtttgtcctaacctccatcatccagctaatgtcatgtctgtgtgtcatgattgcggcctccatttatacagacaggcgtgaagacattcacgacaaaaacgcgaaattctatcccgtgaccagagaaggcagctacggctactcctacatcctggcgtgggtggccttcgcctgcaccttcatcagcggcatgatgtacctgatactgaggaagcgcaaatagagttccggagctgggttgcttctgctgcagtacagaatccacattcagataaccattttgtatataatcattattttttgaggtttttctagcaaacgtattgtttcctttaaaagccaaaaaaaaaaaaaaaaacaaaacaaaaaaaagaaaaaagaaaaaaaaattccaaaagagagaagagtttttgcattcttgagatcagagaatagactatgaaggctggtattcagaactgctgcccactcaaaagtctcaacaagacacaagcaaaaatccagcaatgctcaaatccaaaagcactcggcaggacatttcttaaccatggggctgtgatgggaggagaggagaggctgggaaagccgggtctctggggacgtgcttcctatgggtttcagctggcccaagcccctcccgaatctctctgctagtggtgggtggaagagggtgaggtggggtataggagaagaatgacagcttcctgagaggtttcacccaagttccaagtgagaagcaggtgtagtccctggcattctgtctgtatccaaaccagagcccagccatccctccggtatcggggtgggtcagaaaaagtctcacctcaatttgccgacagtgtcacctgcttgccttaggaatggtcatccttaacctgcgtgccagatttagactcgtctttaggcaaaacctacagcgccccccccctcaccccagacctacagaatcagagtcttcaagggatggggccagggaatctgcatttctaacgcgctccctgggcaacgcttcagatgcgttgaagttggggaccacggtgcctgggccaggtcagcagagctgcctcgtaaatgctggggtatcgtcatgtggagatggggaggtgaatgcaacccccacagcaggccaaaaccttggcctccatcgccacagctgtctacatctagggccccaaaactccattcctgagccatgtgaactcatagacaccttcagggtgtggggtacagcctccttcccatcttatcccagaaggcctctcccttcttgtccagcccttcatgctacacctggctggcctctcacccctatttctagagcctcagaggacccatccaccattcattcattcattcattcattcattcattcattcattcatcaacataaatcataacttgcatgcatgtgccaggcacaggggataccctctagagacaatctcctcctagggctcatggcctagtggaggagacagattaaaacttaattagaaaaactggctgggtacagtggctcatgcttgtaatcccagcactttgggaggctgaggcgggtggatcacctgaggtcaggagttcaagaccagcctggccaaaatggtaaaacctgtctctactaaaaatacaaaaatgagctgggcgtggtggtgcatgcctgtaatcccagctatcaggtggctgaggcaggagaatcacttgaaatgggaggtggaggttgcagtgagccgagaccgtgccactgcactccagcctgggtgacagagtgagactccatctcaaaaaaagaaaaaaaagaaaagaaactaattacacactgtgatggaggctgcaaagaacaccactaagaattcaaaatcagctgggtgcggtggctcacacctgtaatcccagcactttgggaggctgaggcaggtggatcacaaggtcaggagttcaagaccagcctggccaacatggtgaaaccccgtctctaccgaaaatacaacaaaattagcccggtgtggtggcaggtgcctgtaatcccagctacttaggaggctgaggcaggagaatcgcttgaaactgggaggcggaggtcgcagtgagccgagattcaccactgcactccagcccaggcgacagtctgagactccgtctcaaaaataaaacgattcaaaatcgaggcctgtggcatggtagggaggctgctttacgcgtgcctattattaaatgctcctggaggcatttaggtatttagatcagtctaaatatagctccattcagttcgtgcagatgacagttattgggcagtacctgtctgtgtaacacccagaaaacatgtctgtggaggggcccatggtcccgacagtaaatgcggtgagagggtcccatagagctggagttttcaagctttaggggttcccgtgctgcttgggacaggctgattcagagggtctgggtgaatgatttccaggtgattttaagactgtgctgagaaatagggcttttggggccttgtccttcaggatcaaagcatgatgctgtgtggcaatgcagaccacccaggaaccatcccaggagataagctctttgcacctcattgtctttttctgcttatgttggagcaggatgctgggggctgtcctgggatggggtgtgggacctcgtgctatttaaatacttttgcacttgaccttctgctgagtggagtggtggtttgccatcagctcagttccagtggagctgaagagacatctggtttgagtagttttagggccaccatggatatctcttcaatgcaggattggctctttccatctgctctttcattcatttgtttttgacagatagtattaaatgtttaccatgttccaggcactgtgtgaggctctgaaaatacaggggtgagcaaatccagatatcctccctgccatcatgaagtttggagtctatgagataggaccccctccctatggagaagccaccaatgcagtacagggtgacctggggccagagacaggacaaatgtcacctcctgcctccatgagatactctcactagtcatattgtgggcaagaatgtggcttacacccctagggttaacaggatgctacccaagctcatggaggaagttgaatcttaagttcccttgaaactttctaccttggtggcttttctataattttcttttttctttttctttttttttttttttttgagattccatctcaaaaaaagaaaaaaaggaaaagaattatttacttgtgatggaggttgcaaagaacaccagggcccgccaaagggttttaccccatgaacaatgtgtgggatcctgacttttggttacacgagtgattggtcccaatattggaatctgatttaacattctgtggtaacccaggtatttgattgaagaaggggtcactaaggggagacatgacttgttcctattttcttttcatggaaaacctgtttttccccctattaagcatatttactcggggtcattttccttcttgtggaggttctaattaaaaattctgggacattcactttaaaatagttactttgcctctgtagtggtggcattcataaacatgggaggttttactctctttcaaatgagtttttttgaacaattttttggtgttactggaaccaccgcagtaagtttaagaccgggattggaactcatttcttccagaatggtaagtcaagctagggacaatacatatctagcgcaggttaattcaaaactcggcgaaaagatagagtggaacaacagagatata

SEQ ID NO: 61155 - DNA, 2244 bp, Homo sapiens
  misc_feature (2059)..(2059): n is a, c, g, or t
  misc_feature (2076)..(2076): n is a, c, g, or t
  misc_feature (2080)..(2080): n is a, c, g, or t
  misc_feature (2087)..(2087): n is a, c, g, or t
  misc_feature (2090)..(2090): n is a, c, g, or t
  misc_feature (2095)..(2095): n is a, c, g, or t
  misc_feature (2117)..(2117): n is a, c, g, or t
  misc_feature (2135)..(2135): n is a, c, g, or t
  misc_feature (2162)..(2162): n is a, c, g, or t
  misc_feature (2166)..(2166): n is a, c, g, or t
  misc_feature (2176)..(2176): n is a, c, g, or t
ctgtcctgggagtgggggtgtgtctagccgtcgctgcctcttgaagagtactattgtcgctgcttgtacctttctgtcatgagtgcgcacgtgcgtggtgttgtccactcacgactcagtttccagctcgacctggtccaccacctctggtccgattactatcaacgcgtgccaccgatcggcatgactctcattccacactagcacgagaattcgagcgtctatcccgatcatgcgtcagttgcagtctcattgtagtctgctggagcagatagtatttacataggtcctaccaatgtgccaaggccatcctcgtagtagaaggctctgaaaatacaggggtgagcaaatccagatatcctccctgccatcatgaagtttggagtctatgagataggaccccctccctatggagaagccaccaatgcagtacagggtgacctggggccagagacaggacaaatgtcacctcctgcctccatgagatactctcactagtcatattgtgggcaagaatgtggcttacacccctagggttaacaggatgctacccaagctcatggaggaagttgaatcttaagttcccttgaaactttctaccttggtggcttttctataattttcttttttctttttctttttttttttttttttgagactgagttttgctcttgttgcccaggctggagtgcggtggcaccatcttggctcaccgcaacctctgcctcctgggttcaagtgattctcctgcctcagcctcccgagtagctgggattgcaggcatgtcccaccatgcccagctaatttttgtatttttagtagagatggggtttctccatgttggtcaggctggtttcgaactcccaacctcaggtgatccgcccacctcagccttccaaagtgctgggattacaggcatgagccactgcgtctggccttctataattttctggtagtcacgatggaaacaaacaaaacaccttagaaccagagatcgaccccctcaagcaatacatcaattcccttcacaagaaacgtcggggctacatgagtatctgtgttgaatgcggtctgaaatgatcctatggattttcccggctggttgccactactgtacaacattcagtgcccacatccatctgtgccattaagcttttttgagacatgagagatgcctcttccctgctgtatgacatgcatttgggaagttggaaagaaatgacaaaatcagggagaaaacatccaagcttcttacctgtagatagaatcagccctcacttggtgcttattaccagttattcaagaacaataacaacaacaaaattagtagacatccaagaagcacatattaggaccaaagatagcatcaactgtatttgaaggaactgtagtttgcgcattttatgacatttttataaagtactgtaattctttcattgaggggctatgtgatggagacagactaactcattttgttatttgcattaaaattattttgggtctctgttcaaatgagtttggagaatgcttgacttgttggtctgtgtaaatgtgtatatatatatacctgaatacaggaacatcggagacctattcactcccacacactctgctatagtttgcgtgcttttgtggacacccctcatgaacaggctggcgctctaggacgctctgtgttcactgatgatgaagaaacctagaactccaagcctgtttgtaaacacactaaacacagtggcctagatagaaactgtatcgtagtttaaaatctgcctcgcgggatgttactaaactcgctaatagtttaaaggttacttacaatagagcaagttggacaattttgtggtgttggggaaatgttagggcaaggcctagaggttcattttgaatcttggtttgtgactttagggtagttagaaactttctacttaatgtacctttaaaatagtccattttctatgttttgtataatctgaaactgtacatggaaaataaagtttaaaaccagaaaaaaaaattgcttcaacagtgtttggacggaacagatccggggactctnttccagccttcgaccgncctncgatttnctntccgnttgcacctccgggaccatcttntcggccatctcctgcttntgggacctgcaacaccggttttgtggntagntccttcttgncaacaaccatgagctcccagatttgtagaattattcacccgacgtggaagcagccgcaccctggtctt

SEQ ID NO: 61156 - DNA, 2309 bp, Homo sapiens
ggcgggatcggggaaggaggggccccgccgcctagagggtggagggagggcgcgcagtcccagcccagagcttcaaaacagcccggcggcctcgcctcgcacccccagccagtccgtcgatccagctgccagcgcagccgccagcgccggcacatcccgctctgggctttaaacgtgacccctcgcctcgactcgccctgccctgtgaaaatgttggtgcttcttgctttcatcatcgccttccacatcacctctgcagccttgctgttcattgccaccgtcgacaatgcctggtgggtaggagatgagttttttgcagatgtctggagaatatgtaccaacaacacgaattgcacagtcatcaatgacagctttcaagagtactccacgctgcaggcggtccaggccaccatgatcctctccaccattctctgctgcatcgccttcttcatcttcgtgctccagctcttccgcctgaagcagggagagaggtttgtcctaacctccatcatccagctaatgtcatgtctgtgtgtcatgattgcggcctccatttatacagacaggcgtgaagacattcacgacaaaaacgcgaaattctatcccgtgaccagagaaggcagctacggctactcctacatcctggcgtgggtggccttcgcctgcaccttcatcagcggcatgatgtacctgatactgaggaagcgcaaatagagttccggagctgggttgcttctgctgcagtacagaatccacattcagataaccattttgtatataatcattattttttgaggtttttctagcaaacgtattgtttcctttaaaagccaaaaaaaaaaaaaaaaacaaaacaaaaaaaagaaaaaagaaaaaaaaattccaaaagagagaagagtttttgcattcttgagatcagagaatagactatgaaggctggtattcagaactgctgcccactcaaaagtctcaacaagacacaagcaaaaatccagcaatgctcaaatccaaaagcactcggcaggacatttcttaaccatggggctgtgatgggaggagaggagaggctgggaaagccgggtctctggggacgtgcttcctatgggtttcagctggcccaagcccctcccgaatctctctgctagtggtgggtggaagagggtgaggtggggtataggagaagaatgacagcttcctgagaggtttcacccaagttccaagtgagaagcaggtgtagtccctggcattctgtctgtatccaaaccagagcccagccatccctccggtatcggggtgggtcagaaaaagtctcacctcaatttgccgacagtgtcacctgcttgccttaggaatggtcatccttaacctgcgtgccagatttagactcgtctttaggcaaaacctacagcgccccccccctcaccccagacctacagaatcagagtcttcaagggatggggccagggaatctgcatttctaacgcgctccctgggcaacgcttcagatgcgttgaagttggggaccacggtgcctgggccaggtcagcagagctgcctcgtaaatgctggggtatcgtcatgtggagatggggaggtgaatgcaacccccacagcaggccaaaaccttggcctccatcgccacagctgtctacatctagggccccaaaactccattcctgagccatgtgaactcatagacaccttcagggtgtggggtacagcctccttcccatcttatcccagaaggcctctcccttcttgtccagcccttcatgctacacctggctggcctctcacccctatttctagagcctcagaggacccatccaccattcattcattcattcattcattcattcattcattcattcatcaacataaatacaggcatgagccactgcgtctggccttctataattttctggtagtcacgatggaaacaaacaaaacaccttagaaccagagatcgaccccctcaagcaatacatcaattcccttcacaagaaacgtcggggctacatgagtatctgtgttgaatgcggtctgaaatgatcctatggattttcccggctggttgccactactgtacaacattcagtgcccacatccatctgtgccattaagcttttttgagacatgagagatgcctcttccctgctgtatgacatgcatttgggaagttggaaagaaatgacaaaatcagggagaaaacatccaagcttcttacctgtagatagaatcagccctcacttggccggtattgagtggccggtattgagtggccatgtgatcatcaatggggatcctct

SEQ ID NO: 61157 - DNA, 1208 bp, Homo sapiens
ggcgggatcggggaaggaggggccccgccgcctagagggtggagggagggcgcgcagtcccagcccagagcttcaaaacagcccggcggcctcgcctcgcacccccagccagtccgtcgatccagctgccagcgcagccgccagcgccggcacatcccgctctgggctttaaacgtgacccctcgcctcgactcgccctgccctgtgaaaatgttggtgcttcttgctttcatcatcgccttccacatcacctctgcagccttgctgttcattgccaccgtcgacaatgcctggtgggtaggagatgagttttttgcagatgtctggagaatatgtaccaacaacacgaattgcacagtcatcaatgacagctttcaagagtactccacgctgcaggcggtccaggccaccatgatcctctccaccattctctgctgcatcgccttcttcatcttcgtgctccagctcttccgcctgaagcagggagagaggtttgtcctaacctccatcatccagctaatgtcatgtctgtgtgtcatgattgcggcctccatttatacagacaggcgtgaagacattcacgacaaaaacgcgaaattctatcccgtgaccagagaaggcagctacggctactcctacatcctggcgtgggtggccttcgcctgcaccttcatcagcggcatgatgtacctgatactgaggaagcgcaaatagagttccggagctgggttgcttctgctgcagtacagaatccacattcagataaccattttgtatataatcattattttttgaggtttttctagcaaacgtattgtttcctttaaaagccaaaaaaaaaaaaaaaaacaaaacaaaaaaaagaaaaaagaaaaggaaagaaaaaaaaaaaaaaggggggggggcgaaaagaaatcacccccaggggggccaagtttaggcgcgcacacccagtcttctgggacacaaaggggcgccccaaacaggggaagacggtcttaataagcagagaacggggcccgccataaacacggctctctggcgcgccaacacggacagcggggcacttggggaagggacccccaactgcgggggggacacagggggacccatcccaacagatatacggccagggaacataacatcagggtctagggctcgacacacggatgtccggcgagaaactgccacgggagttcgagcactcc

SEQ ID NO: 61158 - DNA, 936 bp, Homo sapiens
  misc_feature (751)..(751): n is a, c, g, or t
  misc_feature (768)..(768): n is a, c, g, or t
  misc_feature (772)..(772): n is a, c, g, or t
  misc_feature (779)..(779): n is a, c, g, or t
  misc_feature (782)..(782): n is a, c, g, or t
  misc_feature (787)..(787): n is a, c, g, or t
  misc_feature (809)..(809): n is a, c, g, or t
  misc_feature (827)..(827): n is a, c, g, or t
  misc_feature (854)..(854): n is a, c, g, or t
  misc_feature (858)..(858): n is a, c, g, or t
  misc_feature (868)..(868): n is a, c, g, or t
gggcgctccaggattaccgggagtatccaagaagcacatattaggaccaaagatagcatcaactgtatttgaaggaactgtagtttgcgcattttatgacatttttataaagtactgtaattctttcattgaggggctatgtgatggagacagactaactcattttgttatttgcattaaaattattttgggtctctgttcaaatgagtttggagaatgcttgacttgttggtctgtgtaaatgtgtatatatatatacctgaatacaggaacatcggagacctattcactcccacacactctgctatagtttgcgtgcttttgtggacacccctcatgaacaggctggcgctctaggacgctctgtgttcactgatgatgaagaaacctagaactccaagcctgtttgtaaacacactaaacacagtggcctagatagaaactgtatcgtagtttaaaatctgcctcgcgggatgttactaaactcgctaatagtttaaaggttacttacaatagagcaagttggacaattttgtggtgttggggaaatgttagggcaaggcctagaggttcattttgaatcttggtttgtgactttagggtagttagaaactttctacttaatgtacctttaaaatagtccattttctatgttttgtataatctgaaactgtacatggaaaataaagtttaaaaccagaaaaaaaaattgcttcaacagtgtttggacggaacagatccggggactctnttccagccttcgaccgncctncgatttnctntccgnttgcacctccgggaccatcttntcggccatctcctgcttntgggacctgcaacaccggttttgtggntagntccttcttgncaacaaccatgagctcccagatttgtagaattattcacccgacgtggaagcagccgcaccctggtctt

SEQ ID NO: 61159 - DNA, 1115 bp, Homo sapiens
  misc_feature (930)..(930): n is a, c, g, or t
  misc_feature (947)..(947): n is a, c, g, or t
  misc_feature (951)..(951): n is a, c, g, or t
  misc_feature (958)..(958): n is a, c, g, or t
  misc_feature (961)..(961): n is a, c, g, or t
  misc_feature (966)..(966): n is a, c, g, or t
  misc_feature (988)..(988): n is a, c, g, or t
  misc_feature (1006)..(1006): n is a, c, g, or t
  misc_feature (1033)..(1033): n is a, c, g, or t
  misc_feature (1037)..(1037): n is a, c, g, or t
  misc_feature (1047)..(1047): n is a, c, g, or t
agcctaccatgtactcccagactctaaagctaaattgggagacagaatgcctagggaatagatcattgtgaagttctgagctcttttgagggactctatagccttctttctttaggggatccacttgcctgctgtgggaaatcatagtgagtgatttacagggatccttctcctccaagctgcattggcttcttatatcctttgcgaccttgggctgaaagagaaacagctgcaaatgttgtgctgtctctttgaggttgtcttggggacagttccccgcaaaggtcattcctagcttttgaggtcaatgttaggtctacctggccaggtagactaactcattttgttatttgcattaaaattattttgggtctctgttcaaatgagtttggagaatgcttgacttgttggtctgtgtaaatgtgtatatatatatacctgaatacaggaacatcggagacctattcactcccacacactctgctatagtttgcgtgcttttgtggacacccctcatgaacaggctggcgctctaggacgctctgtgttcactgatgatgaagaaacctagaactccaagcctgtttgtaaacacactaaacacagtggcctagatagaaactgtatcgtagtttaaaatctgcctcgcgggatgttactaaactcgctaatagtttaaaggttacttacaatagagcaagttggacaattttgtggtgttggggaaatgttagggcaaggcctagaggttcattttgaatcttggtttgtgactttagggtagttagaaactttctacttaatgtacctttaaaatagtccattttctatgttttgtataatctgaaactgtacatggaaaataaagtttaaaaccagaaaaaaaaattgcttcaacagtgtttggacggaacagatccggggactctnttccagccttcgaccgncctncgatttnctntccgnttgcacctccgggaccatcttntcggccatctcctgcttntgggacctgcaacaccggttttgtggntagntccttcttgncaacaaccatgagctcccagatttgtagaattattcacccgacgtggaagcagccgcaccctggtctt

SEQ ID NO: 61160 - DNA, 325 bp, Homo sapiens
taagtagctgggactgcaggtatgacgaccacgcccagctaattttcttttattgtttttatagacagtgtcttactatgttgcctgggctggtctcaatctcctgggctcaagtgatcttcccaccttctcccaaagttccaggattataggcatgagccaccacgcccagctaaaaggtgtttattttttattgtaattttgttttgtcattgacagattttgaatttctctttcttaccctcttcagcacatcccgctctgggctttaaacgtgacccctcgcctcgactcgccctgccctgtgaaaatgttggtgcttctt

SEQ ID NO: 61161 - DNA, 5279 bp, Homo sapiens
  misc_feature (5094)..(5094): n is a, c, g, or t
  misc_feature (5111)..(5111): n is a, c, g, or t
  misc_feature (5115)..(5115): n is a, c, g, or t
  misc_feature (5122)..(5122): n is a, c, g, or t
  misc_feature (5125)..(5125): n is a, c, g, or t
  misc_feature (5130)..(5130): n is a, c, g, or t
  misc_feature (5152)..(5152): n is a, c, g, or t
  misc_feature (5170)..(5170): n is a, c, g, or t
  misc_feature (5197)..(5197): n is a, c, g, or t
  misc_feature (5201)..(5201): n is a, c, g, or t
  misc_feature (5211)..(5211): n is a, c, g, or t
ggcgggatcggggaaggaggggccccgccgcctagagggtggagggagggcgcgcagtcccagcccagagcttcaaaacagcccggcggcctcgcctcgcacccccagccagtccgtcgatccagctgccagcgcagccgccagcgccggcacatcccgctctgggctttaaacgtgacccctcgcctcgactcgccctgccctgtgaaaatgttggtgcttcttgctttcatcatcgccttccacatcacctctgcagccttgctgttcattgccaccgtcgacaatgcctggtgggtaggagatgagttttttgcagatgtctggagaatatgtaccaacaacacgaattgcacagtcatcaatgacagctttcaagagtactccacgctgcaggcggtccaggccaccatgatcctctccaccattctctgctgcatcgccttcttcatcttcgtgctccagctcttccgcctgaagcagggagagaggtttgtcctaacctccatcatccagctaatgtcatgtctgtgtgtcatgattgcggcctccatttatacagacaggcgtgaagacattcacgacaaaaacgcgaaattctatcccgtgaccagagaaggcagctacggctactcctacatcctggcgtgggtggccttcgcctgcaccttcatcagcggcatgatgtacctgatactgaggaagcgcaaatagagttccggagctgggttgcttctgctgcagtacagaatccacattcagataaccattttgtatataatcattattttttgaggtttttctagcaaacgtattgtttcctttaaaagccaaaaaaaaaaaaaaaaacaaaacaaaaaaaagaaaaaagaaaaaaaaattccaaaagagagaagagtttttgcattcttgagatcagagaatagactatgaaggctggtattcagaactgctgcccactcaaaagtctcaacaagacacaagcaaaaatccagcaatgctcaaatccaaaagcactcggcaggacatttcttaaccatggggctgtgatgggaggagaggagaggctgggaaagccgggtctctggggacgtgcttcctatgggtttcagctggcccaagcccctcccgaatctctctgctagtggtgggtggaagagggtgaggtggggtataggagaagaatgacagcttcctgagaggtttcacccaagttccaagtgagaagcaggtgtagtccctggcattctgtctgtatccaaaccagagcccagccatccctccggtatcggggtgggtcagaaaaagtctcacctcaatttgccgacagtgtcacctgcttgccttaggaatggtcatccttaacctgcgtgccagatttagactcgtctttaggcaaaacctacagcgccccccccctcaccccagacctacagaatcagagtcttcaagggatggggccagggaatctgcatttctaacgcgctccctgggcaacgcttcagatgcgttgaagttggggaccacggtgcctgggccaggtcagcagagctgcctcgtaaatgctggggtatcgtcatgtggagatggggaggtgaatgcaacccccacagcaggccaaaaccttggcctccatcgccacagctgtctacatctagggccccaaaactccattcctgagccatgtgaactcatagacaccttcagggtgtggggtacagcctccttcccatcttatcccagaaggcctctcccttcttgtccagcccttcatgctacacctggctggcctctcacccctatttctagagcctcagaggacccatccaccattcattcattcattcattcattcattcattcattcattcatcaacataaatcataacttgcatgcatgtgccaggcacaggggataccctctagagacaatctcctcctagggctcatggcctagtggaggagacagattaaaacttaattagaaaaactggctgggtacagtggctcatgcttgtaatcccagcactttgggaggctgaggcgggtggatcacctgaggtcaggagttcaagaccagcctggccaaaatggtaaaacctgtctctactaaaaatacaaaaatgagctgggcgtggtggtgcatgcctgtaatcccagctatcaggtggctgaggcaggagaatcacttgaaatgggaggtggaggttgcagtgagccgagaccgtgccactgcactccagcctgggtgacagagtgagactccatctcaaaaaaagaaaaaaaagaaaagaaactaattacacactgtgatggaggctgcaaagaacaccactaagaattcaaaatcagctgggtgcggtggctcacacctgtaatcccagcactttgggaggctgaggcaggtggatcacaaggtcaggagttcaagaccagcctggccaacatggtgaaaccccgtctctaccgaaaatacaacaaaattagcccggtgtggtggcaggtgcctgtaatcccagctacttaggaggctgaggcaggagaatcgcttgaaactgggaggcggaggtcgcagtgagccgagattcaccactgcactccagcccaggcgacagtctgagactccgtctcaaaaataaaacgattcaaaatcgaggcctgtggcatggtagggaggctgctttacgcgtgcctattattaaatgctcctggaggcatttaggtatttagatcagtctaaatatagctccattcagttcgtgcagatgacagttattgggcagtacctgtctgtgtaacacccagaaaacatgtctgtggaggggcccatggtcccgacagtaaatgcggtgagagggtcccatagagctggagttttcaagctttaggggttcccgtgctgcttgggacaggctgattcagagggtctgggtgaatgatttccaggtgattttaagactgtgctgagaaatagggcttttggggccttgtccttcaggatcaaagcatgatgctgtgtggcaatgcagaccacccaggaaccatcccaggagataagctctttgcacctcattgtctttttctgcttatgttggagcaggatgctgggggctgtcctgggatggggtgtgggacctcgtgctatttaaatacttttgcacttgaccttctgctgagtggagtggtggtttgccatcagctcagttccagtggagctgaagagacatctggtttgagtagttttagggccaccatggatatctcttcaatgcaggattggctctttccatctgctctttcattcatttgtttttgacagatagtattaaatgtttaccatgttccaggcactgtgtgaggctctgaaaatacaggggtgagcaaatccagatatcctccctgccatcatgaagtttggagtctatgagataggaccccctccctatggagaagccaccaatgcagtacagggtgacctggggccagagacaggacaaatgtcacctcctgcctccatgagatactctcactagtcatattgtgggcaagaatgtggcttacacccctagggttaacaggatgctacccaagctcatggaggaagttgaatcttaagttcccttgaaactttctaccttggtggcttttctataattttcttttttctttttctttttttttttttttttgagactgagttttgctcttgttgcccaggctggagtgcggtggcaccatcttggctcaccgcaacctctgcctcctgggttcaagtgattctcctgcctcagcctcccgagtagctgggattgcaggcatgtcccaccatgcccagctaatttttgtatttttagtagagatggggtttctccatgttggtcaggctggtttcgaactcccaacctcaggtgatccgcccacctcagccttccaaagtgctgggattacaggcatgagccactgcgtctggccttctataattttctggtagtcacgatggaaacaaacaaaacaccttagaaccagagatcgaccccctcaagcaatacatcaattcccttcacaagaaacgtcggggctacatgagtatctgtgttgaatgcggtctgaaatgatcctatggattttcccggctggttgccactactgtacaacattcagtgcccacatccatctgtgccattaagcttttttgagacatgagagatgcctcttccctgctgtatgacatgcatttgggaagttggaaagaaatgacaaaatcagggagaaaacatccaagcttcttacctgtagatagaatcagccctcacttggtgcttattaccagttattcaagaacaataacaacaacaaaattagtagacatccaagaagcacatattaggaccaaagatagcatcaactgtatttgaaggaactgtagtttgcgcattttatgacatttttataaagtactgtaattctttcattgaggggctatgtgatggagacagactaactcattttgttatttgcattaaaattattttgggtctctgttcaaatgagtttggagaatgcttgacttgttggtctgtgtaaatgtgtatatatatatacctgaatacaggaacatcggagacctattcactcccacacactctgctatagtttgcgtgcttttgtggacacccctcatgaacaggctggcgctctaggacgctctgtgttcactgatgatgaagaaacctagaactccaagcctgtttgtaaacacactaaacacagtggcctagatagaaactgtatcgtagtttaaaatctgcctcgcgggatgttactaaactcgctaatagtttaaaggttacttacaatagagcaagttggacaattttgtggtgttggggaaatgttagggcaaggcctagaggttcattttgaatcttggtttgtgactttagggtagttagaaactttctacttaatgtacctttaaaatagtccattttctatgttttgtataatctgaaactgtacatggaaaataaagtttaaaaccagaaaaaaaaattgcttcaacagtgtttggacggaacagatccggggactctnttccagccttcgaccgncctncgatttnctntccgnttgcacctccgggaccatcttntcggccatctcctgcttntgggacctgcaacaccggttttgtggntagntccttcttgncaacaaccatgagctcccagatttgtagaattattcacccgacgtggaagcagccgcaccctggtctt

SEQ ID NO: 61162 - DNA, 3818 bp, Homo sapiens
  misc_feature (3633)..(3633): n is a, c, g, or t
  misc_feature (3650)..(3650): n is a, c, g, or t
  misc_feature (3654)..(3654): n is a, c, g, or t
  misc_feature (3661)..(3661): n is a, c, g, or t
  misc_feature (3664)..(3664): n is a, c, g, or t
  misc_feature (3669)..(3669): n is a, c, g, or t
  misc_feature (3691)..(3691): n is a, c, g, or t
  misc_feature (3709)..(3709): n is a, c, g, or t
  misc_feature (3736)..(3736): n is a, c, g, or t
  misc_feature (3740)..(3740): n is a, c, g, or t
  misc_feature (3750)..(3750): n is a, c, g, or t
ggcgggatcggggaaggaggggccccgccgcctagagggtggagggagggcgcgcagtcccagcccagagcttcaaaacagcccggcggcctcgcctcgcacccccagccagtccgtcgatccagctgccagcgcagccgccagcgccggcacatcccgctctgggctttaaacgtgacccctcgcctcgactcgccctgccctgtgaaaatgttggtgcttcttgctttcatcatcgccttccacatcacctctgcagccttgctgttcattgccaccgtcgacaatgcctggtgggtaggagatgagttttttgcagatgtctggagaatatgtaccaacaacacgaattgcacagtcatcaatgacagctttcaagagtactccacgctgcaggcggtccaggccaccatgatcctctccaccattctctgctgcatcgccttcttcatcttcgtgctccagctcttccgcctgaagcagggagagaggtttgtcctaacctccatcatccagctaatgtcatgtctgtgtgtcatgattgcggcctccatttatacagacaggcgtgaagacattcacgacaaaaacgcgaaattctatcccgtgaccagagaaggcagctacggctactcctacatcctggcgtgggtggccttcgcctgcaccttcatcagcggcatgatgtacctgatactgaggaagcgcaaatagagttccggagctgggttgcttctgctgcagtacagaatccacattcagataaccattttgtatataatcattattttttgaggtttttctagcaaacgtattgtttcctttaaaagccaaaaaaaaaaaaaaaaacaaaacaaaaaaaagaaaaaagaaaaaaaaattccaaaagagagaagagtttttgcattcttgagatcagagaatagactatgaaggctggtattcagaactgctgcccactcaaaagtctcaacaagacacaagcaaaaatccagcaatgctcaaatccaaaagcactcggcaggacatttcttaaccatggggctgtgatgggaggagaggagaggctgggaaagccgggtctctggggacgtgcttcctatgggtttcagctggcccaagcccctcccgaatctctctgctagtggtgggtggaagagggtgaggtggggtataggagaagaatgacagcttcctgagaggtttcacccaagttccaagtgagaagcaggtgtagtccctggcattctgtctgtatccaaaccagagcccagccatccctccggtatcggggtgggtcagaaaaagtctcacctcaatttgccgacagtgtcacctgcttgccttaggaatggtcatccttaacctgcgtgccagatttagactcgtctttaggcaaaacctacagcgccccccccctcaccccagacctacagaatcagagtcttcaagggatggggccagggaatctgcatttctaacgcgctccctgggcaacgcttcagatgcgttgaagttggggaccacggtgcctgggccaggtcagcagagctgcctcgtaaatgctggggtatcgtcatgtggagatggggaggtgaatgcaacccccacagcaggccaaaaccttggcctccatcgccacagctgtctacatctagggccccaaaactccattcctgagccatgtgaactcatagacaccttcagggtgtggggtacagcctccttcccatcttatcccagaaggcctctcccttcttgtccagcccttcatgctacacctggctggcctctcacccctatttctagagcctcagaggacccatccaccattcattcattcattcattcattcattcattcattcattcatcaacataaatcataacttgcatgcatgtgccaggcacaggggataccctctagagacaatctcctcctagggctcatggcctagtggaggagacagattaaaacttaattagaaaaactggctgggtacagtggctcatgcttgtaatcccagcactttgggaggctgaggcgggtggatcacctgaggtcaggagttcaagaccagcctggccaaaatggtaaaacctgtctctactaaaaatacaaaaatgagctgggcgtggtggtgcatgcctgtaatcccagctatcaggtggctgaggcaggagaatcacttgaaatgggaggtggaggttgcagtgagccgagaccgtgccactgcactccagcctgggtgacagagtgagactccatctcaaaaaaagaaaaaaaagaaaagaaactaattacacactgtgatggaggctgcaaagaacaccactaagaattcaaaatcagctgggtgcggtggctcacacctgtaatcccagcactttgggaggctgaggcaggtggatcacaaggtcaggctggtttcgaactcccaacctcaggtgatccgcccacctcagccttccaaagtgctgggattacaggcatgagccactgcgtctggccttctataattttctggtagtcacgatggaaacaaacaaaacaccttagaaccagagatcgaccccctcaagcaatacatcaattcccttcacaagaaacgtcggggctacatgagtatctgtgttgaatgcggtctgaaatgatcctatggattttcccggctggttgccactactgtacaacattcagtgcccacatccatctgtgccattaagcttttttgagacatgagagatgcctcttccctgctgtatgacatgcatttgggaagttggaaagaaatgacaaaatcagggagaaaacatccaagcttcttacctgtagatagaatcagccctcacttggtgcttattaccagttattcaagaacaataacaacaacaaaattagtagacatccaagaagcacatattaggaccaaagatagcatcaactgtatttgaaggaactgtagtttgcgcattttatgacatttttataaagtactgtaattctttcattgaggggctatgtgatggagacagactaactcattttgttatttgcattaaaattattttgggtctctgttcaaatgagtttggagaatgcttgacttgttggtctgtgtaaatgtgtatatatatatacctgaatacaggaacatcggagacctattcactcccacacactctgctatagtttgcgtgcttttgtggacacccctcatgaacaggctggcgctctaggacgctctgtgttcactgatgatgaagaaacctagaactccaagcctgtttgtaaacacactaaacacagtggcctagatagaaactgtatcgtagtttaaaatctgcctcgcgggatgttactaaactcgctaatagtttaaaggttacttacaatagagcaagttggacaattttgtggtgttggggaaatgttagggcaaggcctagaggttcattttgaatcttggtttgtgactttagggtagttagaaactttctacttaatgtacctttaaaatagtccattttctatgttttgtataatctgaaactgtacatggaaaataaagtttaaaaccagaaaaaaaaattgcttcaacagtgtttggacggaacagatccggggactctnttccagccttcgaccgncctncgatttnctntccgnttgcacctccgggaccatcttntcggccatctcctgcttntgggacctgcaacaccggttttgtggntagntccttcttgncaacaaccatgagctcccagatttgtagaattattcacccgacgtggaagcagccgcaccctggtctt

SEQ ID NO: 61163 - DNA, 3689 bp, Homo sapiens
  misc_feature (3504)..(3504): n is a, c, g, or t
  misc_feature (3521)..(3521): n is a, c, g, or t
  misc_feature (3525)..(3525): n is a, c, g, or t
  misc_feature (3532)..(3532): n is a, c, g, or t
  misc_feature (3535)..(3535): n is a, c, g, or t
  misc_feature (3540)..(3540): n is a, c, g, or t
  misc_feature (3562)..(3562): n is a, c, g, or t
  misc_feature (3580)..(3580): n is a, c, g, or t
  misc_feature (3607)..(3607): n is a, c, g, or t
  misc_feature (3611)..(3611): n is a, c, g, or t
  misc_feature (3621)..(3621): n is a, c, g, or t
ggcgggatcggggaaggaggggccccgccgcctagagggtggagggagggcgcgcagtcccagcccagagcttcaaaacagcccggcggcctcgcctcgcacccccagccagtccgtcgatccagctgccagcgcagccgccagcgccggcacatcccgctctgggctttaaacgtgacccctcgcctcgactcgccctgccctgtgaaaatgttggtgcttcttgctttcatcatcgccttccacatcacctctgcagccttgctgttcattgccaccgtcgacaatgcctggtgggtaggagatgagttttttgcagatgtctggagaatatgtaccaacaacacgaattgcacagtcatcaatgacagctttcaagagtactccacgctgcaggcggtccaggccaccatgatcctctccaccattctctgctgcatcgccttcttcatcttcgtgctccagctcttccgcctgaagcagggagagaggtttgtcctaacctccatcatccagctaatgtcatgtctgtgtgtcatgattgcggcctccatttatacagacaggcgtgaagacattcacgacaaaaacgcgaaattctatcccgtgaccagagaaggcagctacggctactcctacatcctggcgtgggtggccttcgcctgcaccttcatcagcggcatgatgtacctgatactgaggaagcgcaaatagagttccggagctgggttgcttctgctgcagtacagaatccacattcagataaccattttgtatataatcattattttttgaggtttttctagcaaacgtattgtttcctttaaaagccaaaaaaaaaaaaaaaaacaaaacaaaaaaaagaaaaaagaaaaaaaaattccaaaagagagaagagtttttgcattcttgagatcagagaatagactatgaaggctggtattcagaactgctgcccactcaaaagtctcaacaagacacaagcaaaaatccagcaatgctcaaatccaaaagcactcggcaggacatttcttaaccatggggctgtgatgggaggagaggagaggctgggaaagccgggtctctggggacgtgcttcctatgggtttcagctggcccaagcccctcccgaatctctctgctagtggtgggtggaagagggtgaggtggggtataggagaagaatgacagcttcctgagaggtttcacccaagttccaagtgagaagcaggtgtagtccctggcattctgtctgtatccaaaccagagcccagccatccctccggtatcggggtgggtcagaaaaagtctcacctcaatttgccgacagtgtcacctgcttgccttaggaatggtcatccttaacctgcgtgccagatttagactcgtctttaggcaaaacctacagcgccccccccctcaccccagacctacagaatcagagtcttcaagggatggggccagggaatctgcatttctaacgcgctccctgggcaacgcttcagatgcgttgaagttggggaccacggtgcctgggccaggtcagcagagctgcctcgtaaatgctggggtatcgtcatgtggagatggggaggtgaatgcaacccccacagcaggccaaaaccttggcctccatcgccacagctgtctacatctagggccccaaaactccattcctgagccatgtgaactcatagacaccttcagggtgtggggtacagcctccttcccatcttatcccagaaggcctctcccttcttgtccagcccttcatgctacacctggctggcctctcacccctatttctagagcctcagaggacccatccaccattcattcattcattcattcattcattcattcattcattcatcaacataaatcataacttgcatgcatgtgccaggcacaggggataccctctagagacaatctcctcctagggctcatggcctagtggaggagacagattaaaacttaattagaaaaactggctgggtacagtggctcatgcttgtaatcccagcactttgggaggctgaggcgggtggatcacctgaggtcaggagttcaagaccagcctggccaaaatggtaaaacctgtctctactaaaaatacaaaaatgagctgggcgtggtggtgcatgcctgtaatcccagctatcaggtggctgaggcaggagaatcacttgaaatgggaggtggaggttgcagtgagccgagaccgtgccactgcactccagcctgggtgacagagtgagactccatctcaaaaaaagaaaaaaaagaaaagaaactaattacacactgtgatggaggctgcaaagaacaccactaagaattcaaaatcagctggacaggcatgagccactgcgtctggccttctataattttctggtagtcacgatggaaacaaacaaaacaccttagaaccagagatcgaccccctcaagcaatacatcaattcccttcacaagaaacgtcggggctacatgagtatctgtgttgaatgcggtctgaaatgatcctatggattttcccggctggttgccactactgtacaacattcagtgcccacatccatctgtgccattaagcttttttgagacatgagagatgcctcttccctgctgtatgacatgcatttgggaagttggaaagaaatgacaaaatcagggagaaaacatccaagcttcttacctgtagatagaatcagccctcacttggtgcttattaccagttattcaagaacaataacaacaacaaaattagtagacatccaagaagcacatattaggaccaaagatagcatcaactgtatttgaaggaactgtagtttgcgcattttatgacatttttataaagtactgtaattctttcattgaggggctatgtgatggagacagactaactcattttgttatttgcattaaaattattttgggtctctgttcaaatgagtttggagaatgcttgacttgttggtctgtgtaaatgtgtatatatatatacctgaatacaggaacatcggagacctattcactcccacacactctgctatagtttgcgtgcttttgtggacacccctcatgaacaggctggcgctctaggacgctctgtgttcactgatgatgaagaaacctagaactccaagcctgtttgtaaacacactaaacacagtggcctagatagaaactgtatcgtagtttaaaatctgcctcgcgggatgttactaaactcgctaatagtttaaaggttacttacaatagagcaagttggacaattttgtggtgttggggaaatgttagggcaaggcctagaggttcattttgaatcttggtttgtgactttagggtagttagaaactttctacttaatgtacctttaaaatagtccattttctatgttttgtataatctgaaactgtacatggaaaataaagtttaaaaccagaaaaaaaaattgcttcaacagtgtttggacggaacagatccggggactctnttccagccttcgaccgncctncgatttnctntccgnttgcacctccgggaccatcttntcggccatctcctgcttntgggacctgcaacaccggttttgtggntagntccttcttgncaacaaccatgagctcccagatttgtagaattattcacccgacgtggaagcagccgcaccctggtctt

SEQ ID NO: 61164 - DNA, 4556 bp, Homo sapiens
ggcgggatcggggaaggaggggccccgccgcctagagggtggagggagggcgcgcagtcccagcccagagcttcaaaacagcccggcggcctcgcctcgcacccccagccagtccgtcgatccagctgccagcgcagccgccagcgccggcacatcccgctctgggctttaaacgtgacccctcgcctcgactcgccctgccctgtgaaaatgttggtgcttcttgctttcatcatcgccttccacatcacctctgcagccttgctgttcattgccaccgtcgacaatgcctggtgggtaggagatgagttttttgcagatgtctggagaatatgtaccaacaacacgaattgcacagtcatcaatgacagctttcaagagtactccacgctgcaggcggtccaggccaccatgatcctctccaccattctctgctgcatcgccttcttcatcttcgtgctccagctcttccgcctgaagcagggagagaggtttgtcctaacctccatcatccagctaatgtcatgtctgtgtgtcatgattgcggcctccatttatacagacaggcgtgaagacattcacgacaaaaacgcgaaattctatcccgtgaccagagaaggcagctacggctactcctacatcctggcgtgggtggccttcgcctgcaccttcatcagcggcatgatgtacctgatactgaggaagcgcaaatagagttccggagctgggttgcttctgctgcagtacagaatccacattcagataaccattttgtatataatcattattttttgaggtttttctagcaaacgtattgtttcctttaaaagccaaaaaaaaaaaaaaaaacaaaacaaaaaaaagaaaaaagaaaaaaaaattccaaaagagagaagagtttttgcattcttgagatcagagaatagactatgaaggctggtattcagaactgctgcccactcaaaagtctcaacaagacacaagcaaaaatccagcaatgctcaaatccaaaagcactcggcaggacatttcttaaccatggggctgtgatgggaggagaggagaggctgggaaagccgggtctctggggacgtgcttcctatgggtttcagctggcccaagcccctcccgaatctctctgctagtggtgggtggaagagggtgaggtggggtataggagaagaatgacagcttcctgagaggtttcacccaagttccaagtgagaagcaggtgtagtccctggcattctgtctgtatccaaaccagagcccagccatccctccggtatcggggtgggtcagaaaaagtctcacctcaatttgccgacagtgtcacctgcttgccttaggaatggtcatccttaacctgcgtgccagatttagactcgtctttaggcaaaacctacagcgccccccccctcaccccagacctacagaatcagagtcttcaagggatggggccagggaatctgcatttctaacgcgctccctgggcaacgcttcagatgcgttgaagttggggaccacggtgcctgggccaggtcagcagagctgcctcgtaaatgctggggtatcgtcatgtggagatggggaggtgaatgcaacccccacagcaggccaaaaccttggcctccatcgccacagctgtctacatctagggccccaaaactccattcctgagccatgtgaactcatagacaccttcagggtgtggggtacagcctccttcccatcttatcccagaaggcctctcccttcttgtccagcccttcatgctacacctggctggcctctcacccctatttctagagcctcagaggacccatccaccattcattcattcattcattcattcattcattcattcattcatcaacataaatcataacttgcatgcatgtgccaggcacaggggataccctctagagacaatctcctcctagggctcatggcctagtggaggagacagattaaaacttaattagaaaaactggctgggtacagtggctcatgcttgtaatcccagcactttgggaggctgaggcgggtggatcacctgaggtcaggagttcaagaccagcctggccaaaatggtaaaacctgtctctactaaaaatacaaaaatgagctgggcgtggtggtgcatgcctgtaatcccagctatcaggtggctgaggcaggagaatcacttgaaatgggaggtggaggttgcagtgagccgagaccgtgccactgcactccagcctgggtgacagagtgagactccatctcaaaaaaagaaaaaaaagaaaagaaactaattacacactgtgatggaggctgcaaagaacaccactaagaattcaaaatcagctgggtgcggtggctcacacctgtaatcccagcactttgggaggctgaggcaggtggatcacaaggtcaggagttcaagaccagcctggccaacatggtgaaaccccgtctctaccgaaaatacaacaaaattagcccggtgtggtggcaggtgcctgtaatcccagctacttaggaggctgaggcaggagaatcgcttgaaactgggaggcggaggtcgcagtgagccgagattcaccactgcactccagcccaggcgacagtctgagactccgtctcaaaaataaaacgattcaaaatcgaggcctgtggcatggtagggaggctgctttacgcgtgcctattattaaatgctcctggaggcatttaggtatttagatcagtctaaatatagctccattcagttcgtgcagatgacagttattgggcagtacctgtctgtgtaacacccagaaaacatgtctgtggaggggcccatggtcccgacagtaaatgcggtgagagggtcccatagagctggagttttcaagctttaggggttcccgtgctgcttgggacaggctgattcagagggtctgggtgaatgatttccaggtgattttaagactgtgctgagaaatagggcttttggggccttgtccttcaggatcaaagcatgatgctgtgtggcaatgcagaccacccaggaaccatcccaggagataagctctttgcacctcattgtctttttctgcttatgttggagcaggatgctgggggctgtcctgggatggggtgtgggacctcgtgctatttaaatacttttgcacttgaccttctgctgagtggagtggtggtttgccatcagctcagttccagtggagctgaagagacatctggtttgagtagttttagggccaccatggatatctcttcaatgcaggattggctctttccatctgctctttcattcatttgtttttgacagatagtattaaatgtttaccatgttccaggcactgtgtgaggctctgaaaatacaggggtgagcaaatccagatatcctccctgccatcatgaagtttggagtctatgagataggaccccctccctatggagaagccaccaatgcagtacagggtgacctggggccagagacaggacaaatgtcacctcctgcctccatgagatactctcactagtcatattgtgggcaagaatgtggcttacacccctagggttaacaggatgctacccaagctcatggaggaagttgaatcttaagttcccttgaaactttctaccttggtggcttttctataattttcttttttctttttctttttttttttttttttgagactgagttttgctcttgttgcccaggctggagtgcggtggcaccatcttggctcaccgcaacctctgcctcctgggttcaagtgattctcctgcctcagcctcccgagtagctgggattgcaggcatgtcccaccatgcccagctaatttttgtatttttagtagagatggggtttctccatgttggtcaggctggtttcgaactcccaacctcaggtgatccgcccacctcagccttccaaagtgctgggattacaggcatgagccactgcgtctggccttctataattttctggtagtcacgatggaaacaaacaaaacaccttagaaccagagatcgaccccctcaagcaatacatcaattcccttcacaagaaacgtcggggctacatgagtatctgtgttgaatgcggtctgaaatgatcctatggattttcccggctggttgccactactgtacaacattcagtgcccacatccatctgtgccattaagcttttttgagacatgagagatgcctcttccctgctgtatgacatgcatttgggaagttggaaagaaatgacaaaatcagggagaaaacatccaagcttcttacctgtagatagaatcagccctcacttggtgcttattaccagttattcaagaacaataacaacaacaaaattagtagacatccaagaagcacatattaggaccaaagatagcatcaactgtatttgaaggaactgtagtttgcgcattttatgacatttttataaagtactgtaattctttcattgaggggctatgtgatggagacagactaactcattttgttatttgcattaaaattattttgggtctctgttcaaatgagtttgg

SEQ ID NO: 61165 - DNA, 3145 bp, Homo sapiens
  misc_feature (2960)..(2960): n is a, c, g, or t
  misc_feature (2977)..(2977): n is a, c, g, or t
  misc_feature (2981)..(2981): n is a, c, g, or t
  misc_feature (2988)..(2988): n is a, c, g, or t
  misc_feature (2991)..(2991): n is a, c, g, or t
  misc_feature (2996)..(2996): n is a, c, g, or t
  misc_feature (3018)..(3018): n is a, c, g, or t
  misc_feature (3036)..(3036): n is a, c, g, or t
  misc_feature (3063)..(3063): n is a, c, g, or t
  misc_feature (3067)..(3067): n is a, c, g, or t
  misc_feature (3077)..(3077): n is a, c, g, or t
ggcgggatcggggaaggaggggccccgccgcctagagggtggagggagggcgcgcagtcccagcccagagcttcaaaacagcccggcggcctcgcctcgcacccccagccagtccgtcgatccagctgccagcgcagccgccagcgccggcacatcccgctctgggctttaaacgtgacccctcgcctcgactcgccctgccctgtgaaaatgttggtgcttcttgctttcatcatcgccttccacatcacctctgcagccttgctgttcattgccaccgtcgacaatgcctggtgggtaggagatgagttttttgcagatgtctggagaatatgtaccaacaacacgaattgcacagtcatcaatgacagctttcaagagtactccacgctgcaggcggtccaggccaccatgatcctctccaccattctctgctgcatcgccttcttcatcttcgtgctccagctcttccgcctgaagcagggagagaggtttgtcctaacctccatcatccagctaatgtcatgtctgtgtgtcatgattgcggcctccatttatacagacaggcgtgaagacattcacgacaaaaacgcgaaattctatcccgtgaccagagaaggcagctacggctactcctacatcctggcgtgggtggccttcgcctgcaccttcatcagcggcatgatgtacctgatactgaggaagcgcaaatagagttccggagctgggttgcttctgctgcagtacagaatccacattcagataaccattttgtatataatcattattttttgaggtttttctagcaaacgtattgtttcctttaaaagccaaaaaaaaaaaaaaaaacaaaacaaaaaaaagaaaaaagaaaaaaaaattccaaaagagagaagagtttttgcattcttgagatcagagaatagactatgaaggctggtattcagaactgctgcccactcaaaagtctcaacaagacacaagcaaaaatccagcaatgctcaaatccaaaagcactcggcaggacatttcttaaccatggggctgtgatgggaggagaggagaggctgggaaagccgggtctctggggacgtgcttcctatgggtttcagctggcccaagcccctcccgaatctctctgctagtggtgggtggaagagggtgaggtggggtataggagaagaatgacagcttcctgagaggtttcacccaagttccaagtgagaagcaggtgtagtccctggcattctgtctgtatccaaaccagagcccagccatccctccggtatcggggtgggtcagaaaaagtctcacctcaatttgccgacagtgtcacctgcttgccttaggaatggtcatccttaacctgcgtgccagatttagactcgtctttaggcaaaacctacagcgccccccccctcaccccagacctacagaatcagagtcttcaagggatggggccagggaatctgcatttctaacgcgctccctgggcaacgcttcagatgcgttgaagttggggaccacggtgcctgggccaggtcagcagagctgcctcgtaaatgctggggtatcgtcatgtggagatggggaggtgaatgcaacccccacagcaggccaaaaccttggcctccatcgccacagctgtctacatctagggccccaaaactccattcctgagccatgtgaactcatagacaccttcagggtgtggggtacagcctccttcccatcttatcccagaaggcctctcccttcttgtccagcccttcatgctacacctggctggcctctcacccctatttctagagcacaggcatgagccactgcgtctggccttctataattttctggtagtcacgatggaaacaaacaaaacaccttagaaccagagatcgaccccctcaagcaatacatcaattcccttcacaagaaacgtcggggctacatgagtatctgtgttgaatgcggtctgaaatgatcctatggattttcccggctggttgccactactgtacaacattcagtgcccacatccatctgtgccattaagcttttttgagacatgagagatgcctcttccctgctgtatgacatgcatttgggaagttggaaagaaatgacaaaatcagggagaaaacatccaagcttcttacctgtagatagaatcagccctcacttggtgcttattaccagttattcaagaacaataacaacaacaaaattagtagacatccaagaagcacatattaggaccaaagatagcatcaactgtatttgaaggaactgtagtttgcgcattttatgacatttttataaagtactgtaattctttcattgaggggctatgtgatggagacagactaactcattttgttatttgcattaaaattattttgggtctctgttcaaatgagtttggagaatgcttgacttgttggtctgtgtaaatgtgtatatatatatacctgaatacaggaacatcggagacctattcactcccacacactctgctatagtttgcgtgcttttgtggacacccctcatgaacaggctggcgctctaggacgctctgtgttcactgatgatgaagaaacctagaactccaagcctgtttgtaaacacactaaacacagtggcctagatagaaactgtatcgtagtttaaaatctgcctcgcgggatgttactaaactcgctaatagtttaaaggttacttacaatagagcaagttggacaattttgtggtgttggggaaatgttagggcaaggcctagaggttcattttgaatcttggtttgtgactttagggtagttagaaactttctacttaatgtacctttaaaatagtccattttctatgttttgtataatctgaaactgtacatggaaaataaagtttaaaaccagaaaaaaaaattgcttcaacagtgtttggacggaacagatccggggactctnttccagccttcgaccgncctncgatttnctntccgnttgcacctccgggaccatcttntcggccatctcctgcttntgggacctgcaacaccggttttgtggntagntccttcttgncaacaaccatgagctcccagatttgtagaattattcacccgacgtggaagcagccgcaccctggtctt

SEQ ID NO: 61166 - DNA, 4706 bp, Homo sapiens
ggcgggatcggggaaggaggggccccgccgcctagagggtggagggagggcgcgcagtcccagcccagagcttcaaaacagcccggcggcctcgcctcgcacccccagccagtccgtcgatccagctgccagcgcagccgccagcgccggcacatcccgctctgggctttaaacgtgacccctcgcctcgactcgccctgccctgtgaaaatgttggtgcttcttgctttcatcatcgccttccacatcacctctgcagccttgctgttcattgccaccgtcgacaatgcctggtgggtaggagatgagttttttgcagatgtctggagaatatgtaccaacaacacgaattgcacagtcatcaatgacagctttcaagagtactccacgctgcaggcggtccaggccaccatgatcctctccaccattctctgctgcatcgccttcttcatcttcgtgctccagctcttccgcctgaagcagggagagaggtttgtcctaacctccatcatccagctaatgtcatgtctgtgtgtcatgattgcggcctccatttatacagacaggcgtgaagacattcacgacaaaaacgcgaaattctatcccgtgaccagagaaggcagctacggctactcctacatcctggcgtgggtggccttcgcctgcaccttcatcagcggcatgatgtacctgatactgaggaagcgcaaatagagttccggagctgggttgcttctgctgcagtacagaatccacattcagataaccattttgtatataatcattattttttgaggtttttctagcaaacgtattgtttcctttaaaagccaaaaaaaaaaaaaaaaacaaaacaaaaaaaagaaaaaagaaaaaaaaattccaaaagagagaagagtttttgcattcttgagatcagagaatagactatgaaggctggtattcagaactgctgcccactcaaaagtctcaacaagacacaagcaaaaatccagcaatgctcaaatccaaaagcactcggcaggacatttcttaaccatggggctgtgatgggaggagaggagaggctgggaaagccgggtctctggggacgtgcttcctatgggtttcagctggcccaagcccctcccgaatctctctgctagtggtgggtggaagagggtgaggtggggtataggagaagaatgacagcttcctgagaggtttcacccaagttccaagtgagaagcaggtgtagtccctggcattctgtctgtatccaaaccagagcccagccatccctccggtatcggggtgggtcagaaaaagtctcacctcaatttgccgacagtgtcacctgcttgccttaggaatggtcatccttaacctgcgtgccagatttagactcgtctttaggcaaaacctacagcgccccccccctcaccccagacctacagaatcagagtcttcaagggatggggccagggaatctgcatttctaacgcgctccctgggcaacgcttcagatgcgttgaagttggggaccacggtgcctgggccaggtcagcagagctgcctcgtaaatgctggggtatcgtcatgtggagatggggaggtgaatgcaacccccacagcaggccaaaaccttggcctccatcgccacagctgtctacatctagggccccaaaactccattcctgagccatgtgaactcatagacaccttcagggtgtggggtacagcctccttcccatcttatcccagaaggcctctcccttcttgtccagcccttcatgctacacctggctggcctctcacccctatttctagagcctcagaggacccatccaccattcattcattcattcattcattcattcattcattcattcatcaacataaatcataacttgcatgcatgtgccaggcacaggggataccctctagagacaatctcctcctagggctcatggcctagtggaggagacagattaaaacttaattagaaaaactggctgggtacagtggctcatgcttgtaatcccagcactttgggaggctgaggcgggtggatcacctgaggtcaggagttcaagaccagcctggccaaaatggtaaaacctgtctctactaaaaatacaaaaatgagctgggcgtggtggtgcatgcctgtaatcccagctatcaggtggctgaggcaggagaatcacttgaaatgggaggtggaggttgcagtgagccgagaccgtgccactgcactccagcctgggtgacagagtgagactccatctcaaaaaaagaaaaaaaagaaaagaaactaattacacactgtgatggaggctgcaaagaacaccactaagaattcaaaatcagctgggtgcggtggctcacacctgtaatcccagcactttgggaggctgaggcaggtggatcacaaggtcaggagttcaagaccagcctggccaacatggtgaaaccccgtctctaccgaaaatacaacaaaattagcccggtgtggtggcaggtgcctgtaatcccagctacttaggaggctgaggcaggagaatcgcttgaaactgggaggcggaggtcgcagtgagccgagattcaccactgcactccagcccaggcgacagtctgagactccgtctcaaaaataaaacgattcaaaatcgaggcctgtggcatggtagggaggctgctttacgcgtgcctattattaaatgctcctggaggcatttaggtatttagatcagtctaaatatagctccattcagttcgtgcagatgacagttattgggcagtacctgtctgtgtaacacccagaaaacatgtctgtggaggggcccatggtcccgacagtaaatgcggtgagagggtcccatagagctggagttttcaagctttaggggttcccgtgctgcttgggacaggctgattcagagggtctgggtgaatgatttccaggtgattttaagactgtgctgagaaatagggcttttggggccttgtccttcaggatcaaagcatgatgctgtgtggcaatgcagaccacccaggaaccatcccaggagataagctctttgcacctcattgtctttttctgcttatgttggagcaggatgctgggggctgtcctgggatggggtgtgggacctcgtgctatttaaatacttttgcacttgaccttctgctgagtggagtggtggtttgccatcagctcagttccagtggagctgaagagacatctggtttgagtagttttagggccaccatggatatctcttcaatgcaggattggctctttccatctgctctttcattcatttgtttttgacagatagtattaaatgtttaccatgttccaggcactgtgtgaggctctgaaaatacaggggtgagcaaatccagatatcctccctgccatcatgaagtttggagtctatgagataggaccccctccctatggagaagccaccaatgcagtacagggtgacctggggccagagacaggacaaatgtcacctcctgcctccatgagatactctcactagtcatattgtgggcaagaatgtggcttacacccctagggttaacaggatgctacccaagctcatggaggaagttgaatcttaagttcccttgaaactttctaccttggtggcttttctataattttcttttttctttttctttttttttttttttttgagactgagttttgctcttgttgcccaggctggagtgcggtggcaccatcttggctcaccgcaacctctgcctcctgggttcaagtgattctcctgcctcagcctcccgagtagctgggattgcaggcatgtcccaccatgcccagctaatttttgtatttttagtagagatggggtttctccatgttggtcaggctggtttcgaactcccaacctcaggtgatccgcccacctcagccttccaaagtgctgggattacaggcatgagccactgcgtctggccttctataattttctggtagtcacgatggaaacaaacaaaacaccttagaaccagagatcgaccccctcaagcaatacatcaattcccttcacaagaaacgtcggggctacatgagtatctgtgttgaatgcggtctgaaatgatcctatggattttcccggctggttgccactactgtacaacattcagtgcccacatccatctgtgccattaagcttttttgagacatgagagatgcctcttccctgctgtatgacatgcatttgggaagttggaaagaaatgacaaaatcagggagaaaacatccaagcttcttacctgtagatagaatcagccctcacttggtgcttattaccagttattcaagaacaataacaacaacaaaattagtagacatccaagaagcacatattaggaccaaagatagcatcaactgtatttgaaggaactgtagtttgcgcattttatgacatttttataaagtactgtaattctttcattgaggggctatgtgatggagacagactaactcattttgttatttgcattaaaattattttgggtctctgttcaaatgagtttggttcttcggcgtgtgcatgcacacgcggaaaaaccaacactacctgatgccccttccccaatttggggactttttgataatatgaatatatctgtatattttaccctatggtgctgaggcctgtgatcggtatggtgactcggtgtgtgca

SEQ ID NO: 61167 - DNA, 3494 bp, Homo sapiens
ggcgggatcggggaaggaggggccccgccgcctagagggtggagggagggcgcgcagtcccagcccagagcttcaaaacagcccggcggcctcgcctcgcacccccagccagtccgtcgatccagctgccagcgcagccgccagcgccggcacatcccgctctgggctttaaacgtgacccctcgcctcgactcgccctgccctgtgaaaatgttggtgcttcttgctttcatcatcgccttccacatcacctctgcagccttgctgttcattgccaccgtcgacaatgcctggtgggtaggagatgagttttttgcagatgtctggagaatatgtaccaacaacacgaattgcacagtcatcaatgacagctttcaagagtactccacgctgcaggcggtccaggccaccatgatcctctccaccattctctgctgcatcgccttcttcatcttcgtgctccagctcttccgcctgaagcagggagagaggtttgtcctaacctccatcatccagctaatgtcatgtctgtgtgtcatgattgcggcctccatttatacagacaggcgtgaagacattcacgacaaaaacgcgaaattctatcccgtgaccagagaaggcagctacggctactcctacatcctggcgtgggtggccttcgcctgcaccttcatcagcggcatgatgtacctgatactgaggaagcgcaaatagagttccggagctgggttgcttctgctgcagtacagaatccacattcagataaccattttgtatataatcattattttttgaggtttttctagcaaacgtattgtttcctttaaaagccaaaaaaaaaaaaaaaaacaaaacaaaaaaaagaaaaaagaaaaaaaaattccaaaagagagaagagtttttgcattcttgagatcagagaatagactatgaaggctggtattcagaactgctgcccactcaaaagtctcaacaagacacaagcaaaaatccagcaatgctcaaatccaaaagcactcggcaggacatttcttaaccatggggctgtgatgggaggagaggagaggctgggaaagccgggtctctggggacgtgcttcctatgggtttcagctggcccaagcccctcccgaatctctctgctagtggtgggtggaagagggtgaggtggggtataggagaagaatgacagcttcctgagaggtttcacccaagttccaagtgagaagcaggtgtagtccctggcattctgtctgtatccaaaccagagcccagccatccctccggtatcggggtgggtcagaaaaagtctcacctcaatttgccgacagtgtcacctgcttgccttaggaatggtcatccttaacctgcgtgccagatttagactcgtctttaggcaaaacctacagcgccccccccctcaccccagacctacagaatcagagtcttcaagggatggggccagggaatctgcatttctaacgcgctccctgggcaacgcttcagatgcgttgaagttggggaccacggtgcctgggccaggtcagcagagctgcctcgtaaatgctggggtatcgtcatgtggagatggggaggtgaatgcaacccccacagcaggccaaaaccttggcctccatcgccacagctgtctacatctagggccccaaaactccattcctgagccatgtgaactcatagacaccttcagggtgtggggtacagcctccttcccatcttatcccagaaggcctctcccttcttgtccagcccttcatgctacacctggctggcctctcacccctatttctagagcctcagaggacccatccaccattcattcattcattcattcattcattcattcattcattcatcaacataaatcataacttgcatgcatgtgccaggcacaggggataccctctagagacaatctcctcctagggctcatggcctagtggaggagacagattaaaacttaattagaaaaactggctgggtacagtggctcatgcttgtaatcccagcactttgggaggctgaggcgggtggatcacctgaggtcaggagttcaagaccagcctggccaaaatggtaaaacctgtctctactaaaaatacaaaaatgagctgggcgtggtggtgcatgcctgtaatcccagctatcaggtggctgaggcaggagaatcacttgaaatgggaggtggaggttgcagtgagccgagaccgtgccactgcactccagcctgggtgacagagtgagactccatctcaaaaaaagaaaaaaaagaaaagaaactaattacacactgtgatggaggctgcaaagaacaccactaagaattcaaaatcagctgggtgcggtggctcacacctgtaatcccagcactttgggaggctgaggcaggtggatcacaaggtcaggagttcaagaccagcctggccaacatggtgaaaccccgtctctaccgaaaatacaacaaaattagcccggtgtggtggcaggtgcctgtaatcccagctacttaggaggctgaggcaggagaatcgcttgaaactgggaggcggaggtcgcagtgagccgagattcaccactgcactccagcccaggcgacagtctgagactccgtctcaaaaataaaacgattcaaaatcgaggcctgtggcatggtagggaggctgctttacgcgtgcctattattaaatgctcctggaggcatttaggtatttagatcagtctaaatatagctccattcagttcgtgcagatgacagttattgggcagtacctgtctgtgtaacacccagaaaacatgtctgtggaggggcccatggtcccgacagtaaatgcggtgagagggtcccatagagctggagttttcaagctttaggggttcccgtgctgcttgggacaggctgattcagagggtctgggtgaatgatttccaggtgattttaagactgtgctgagaaatagggcttttggggccttgtccttcaggatcaaagcatgatgctgtgtggcaatgcagaccacccaggaaccatcccaggagataagctctttgcacctcattgtctttttctgcttatgttggagcaggatgctgggggctgtcctgggatggggtgtgggacctcgtgctatttaaatacttttgcacttgaccttctgctgagtggagtggtggtttgccatcagctcagttccagtggagctgaagagacatctggtttgagtagttttagggccaccatggatatctcttcaatgcaggattggctctttccatctgctctttcattcatttgtttttgacagatagtattaaatgtttaccatgttccaggcactgtgtgaggctctgaaaatacaggggtgagcaaatccagatatcctccctgccatcatgaagtttggagtctatgagataggaccccaaaagagcaaagaccccaaaagagcaaagaccccaaaagagcaaagaccccaaaag

SEQ ID NO: 61168 - DNA, 680 bp, Homo sapiens
tccagatcgtctattttgtgagtaacttggaaatgttaaggtattctgtaacagcttgaagaaacaatagacagctcacttaagcatgaatgtacctagatatattatatttaccctccatacacataaccaggatgactggctttggcagctggtaccaagaatagtaggaagccaactatttatgataagaattggtccatactgggaccctccctttcacccccttgtacttatgctcacctcctggctctcccttgttattgctcacttgcaatgtgtcttagtcattaagaaaattacatgtgtttttatgagaagctgtatattacagtaattaagggcatgtgctcggaggttagagagtgcttggattggaatcctaaatctgaataaccttgggcaaattacttaagatggggataaagatagtgtctatctcatcctgctgttattcttatttactgaaacaactggaaaagagcacctcagacaacactcagcacacagtatccaataagtgttcactacacctgcatctgcctgcctgtttctactgtgtcctccctgcaggataaaaaacctgtttccttctttcaggacttcagaactccatacctactgcttagatttaccaaatcagaaccacatcttttacttttggtttcttggtatttaaa

SEQ ID NO: 61169 - DNA, 269 bp, Homo sapiens
agtttcatacataatgccaaacttttttttcacagtggttataccaatttgcactctcaccagcagttgtcctatagccttgacaacacttggaattgttaggtttttaaattttgccatggtgagtgtgaaaagtggtggttatttttttgtttggttattattatttatttaatgagagattgggtcttgccacactgcccaggctggtcttgaactcttgggctcaagtgatcctcccaccttggtctcctaaagtgctgggatta

SEQ ID NO: 61170 - DNA, 300 bp, Homo sapiens
agggtcagtctccgagaaaaaacaaaaacaaaaacaaaaacaggcagcccgcagaaaacccagaaacaaccgaaccggggcagttttacattgctttgggttttttgagggggcggggtgagggggtacgagacaagtccccaagttttctttgcttttttttttcctttgctttttcttcttttatttttttatttgtttgcattttttttcccctcctggtagaagtgcgctttccacctaccagaccctgaaagaaagtgtcaggagccggtgcaaaacccagtttaagttcaagaa

SEQ ID NO: 61171 - DNA, 654 bp, Homo sapiens
ttatgtggggtggtggtagttaaacagtaagtacagttacgtgaatctagcttttctggtgtccccaagcgttcaaacagcttttttggtaaaatgaatcctgggaaactaaaagtacccctaccttttgcgtttcctgctgcctcagtccctccagtttgagttagttttcctctagaggctttggagggaaagttttcctcttgccacactcaccttgaagcaggacgtaatggattgccgtggctttcactatgcatcttgtctcaatacaggccttcgggggacaggcctgcgacattacccagtctacaaaggcagattgaatatgaaagcctcaaccatcacatcaagccacagatcaatcatagccaccacacagagaaaattaccatttggcaacatccatcatctttacaagtgctacccacatctaactccacctgagccatcattgttgccgcttacttctatcttcagtgaggctggaagtcaacaaaagggtcttattccctttattgggagaggagaggagagtagcacagaaacgcctttctgaggggtaactgtctttccaatcctggattcccttgttgtcaactccctcttcacgcctcattttatgaaatcaataaagaactgaagctcttcttg

SEQ ID NO: 61172 - DNA, 783 bp, Homo sapiens
cgccagcacctaggctggtcttccctgggtgcctgcttgagcacgtggcccaaaacagccgttgcatggggcactcagaacccaccacaccctcgccccttcccagcccgccaccctgtggctgaggccctgtgccttgagcaagctgctgcccctcctcctcctggtccagttctgcccacacctgggtgcccacctcccctccctgtggtctccaggagctgcccccaacatgccctgggcagcagtgctcatcgtagccccgtctgtggcctggacaggctctgaccactcctgcgttggcacagcttcctcgggaggctcctgccaacaccactcggcacggtgggctcaacacggcagcggcaacgggtgggagtacttgcctctgcctggcccgaatggcggttttccatttggatttggggatgagcagccaatgagcctatctcattcccgttaacgtgagagaaacatccagacgctatcctcaggtctcacacacccccgccgtgctctgcaccacatctggcaggggcacccccgactgtatgctgggcatcagctcccaggcccgagcgcctcacctcacactggggattggagccctcaggccctagagacactggcttgagaaacttttgagatggagtctcgctctgttgcccaggctggagtgcagtggcatgatctcagttcacagcagcctctgcctcctgcgggttctggaaattcttgtgcctcagcctcctgagtagctggaattacaggcgtgtgccacca

SEQ ID NO: 61173 - DNA, 498 bp, Homo sapiens
tacctccttggggccaccgttaagtgcagcagcagaaggggtctcgtgatccgggacacggggatgagcaagcatgcagagaaaccaacactagtcaggcagtcaagcattcaggaagcgggaggaagattttggaggtgaaggggaaagtgggatagagcggggaatcctctatggggatttctattgccagacagagctcttgtctcctcatcaagacaaagtctccttggagaagggatatcgatggctgcttaaacagggggaagagagagagcttagttgggtgttgcactgaattcagtgagggaggtgatcccaatgtatggcctggctaaggagtttccttaccccgagttgcatgagggggcttgtgattctcagatacggtgtttttaccttttactttttcctctttttaccaattacaaccttatagagcggctagcaatggcagtactagtaggaagataactagacctcactaagcctgcgtgt

SEQ ID NO: 61174 - DNA, 167 bp, Homo sapiens
cgccgatgccgctacccgctccgggcccctggcaaacccactgcttttcccctcctcccagcgcccgcgctgcccgccctgggcccgctgtcgcaggtgcaacggtaccaccaccccagctgtgaggctgccatcaacacccacatcagcctggagctccacgcatc

SEQ ID NO: 61175 - DNA, 338 bp, Homo sapiens
acccacacccaccatctccctttctctgccatcccttagaagctagagttcaaagcctgttcccttttccttcttgaacaatatctctggggtagcacctccttcccttggaacctcctgaagctcacgccaaggcctcgctcctgagcgcccagcccagccgtcctcacagcgggtcccatacctgccgcctcagtgccacctgcactggtgagagatgcgcctcagaccccagggacccagggattctccctagggcttgagaattacagacctcacaggaacaccagtgactgagctcttgtcttaaattgaaataaaattcacacaacatcaca

SEQ ID NO: 61176 - DNA, 335 bp, Homo sapiens
ctcaaaaagctgcataggccaggtgtggtggctcatgcctgtaatgagctcattccaggtgggctcattcccaacactttgggaagctgaagtgggcggatcacttgaggtgaggagttcaagaccagcctggccaacatggtgaaaccctgtctctactaaaaatacaagaaaaaaattagctgggcgtggtgctgcacccctgtaatcccaactacttgggaggttgaggcaggaaaatcctttgaacccaggaggcagaggttgcagtgagccgagccgaggtctcgccactgtactcctgcctgagtgacagcgtgagactgcatctcaaa

SEQ ID NO: 61177 - DNA, 240 bp, Homo sapiens
tcgagaaagtttcaatgtgattagattaaaattaaaagaatccataaaaatggaacaaagaagaagaggaatgaaattacttttactttaaatagcattgttatcacataaaacatgtatcttacaaattcatgggatagcccataaatgggactacagcaacaatggtaggagagtccatccttcttcaaaagcaacccagcaggaattttctgttcaaaatatttttcctgtcatact

SEQ ID NO: 61178 - DNA, 351 bp, Homo sapiens
ttctactctcttcttgcttagatgatttctgagaataagtcagatgtgattcttatcacagctcctctatagggaagggttttttccatgttgtttctcttaacattttttcttttactttgattttctgaagtttgagtatgatatgaataggtgtctcttttgtttttggcatttatactgcttggtgctctctgacctccacagattcctgaagatctttggtttggtgtctgatatttgtttgagaaaaattcttcatcattattgctttaagtattgcctctgtttcttgatctctttcttttcctcctggtatttccattaagcatatattataccttttgtagt

SEQ ID NO: 61179 - DNA, 393 bp, Homo sapiens
catctatagtccatacatatctataatggacagaaatatgagaatgaataagcaaagatacttatgtacaccaataataaagtaagaaaggtaaaaaaattcatgtaataagaaaaaataacaacccagaaatttaagaattaagtagtagtcaaatctaattggaataactcacctatataaaaaacaagaggaaggaaactttatacataggtctggaaaatatcacaactatgttcccagaagaatgtttatctccacagcatccaacctagtgtcatgcacacagttgggactcagccactgttgcctgattgataatgaagacagtcactgtgatcaacccaacagtaattgaacgttcatttttaataaggtcagtgtaaaatctgt

SEQ ID NO: 61180 - DNA, 8301 bp, Homo sapiens
cttagtgactcaagtgttccccttttcttggggatgagtaaactgaggctcattaaagagcttgtgaccaaacaacacaggtgccccagagaaaggtcgggcctggaaactacaaaggattgtgttaattttgtgtttaggaagaaagaggtaatgggtaggaatcaatgtaaacttattcataggccacaccaaaccaggaattcttgtcgtgattgcacttggtagagttaacacacgtgcacattacggaaacgttggtgaccaacaggcgtttcagcgagctttcgcacacctcatgggcctttgtgggctgctggagagatgttggctgcaccatgacccagatggagttttaacattgaatgcggagaacactaattatgcctatcaagttccaaacttccataaatgtgaaatctgtctactatcttttccaaaagaatcccagtttcaacgccacatgagggatcacgagcgaaatgacaagccacatcgatgtgaccagtgcccccaaacatttaatgttgaattcaacctgacacttcataaatgcacccacagcggggaagatcctacctgccctgtgtgtaacaagaaattctccagagtggctagtctcaaagcgcatattatgctacatgaaaaggaagagaatctcatctgttctgagtgtggggatgagtttactctgcagagtcagctggccgtgcacatggaggagcaccgccaggagctggctggaacccggcagcatgcctgcaaggcctgcaagaaagagttcgagacctcctcggagctgaaggaacacatgaagactcattacaaaattagggtatcaagtacaaggtcttataaccggaatatcgacagaagtggattcacgtattcgtgtccgcactgtggaaagacgtttcaaaagccaagccagttaacgcgacacattaggatacacacaggtgaaaggccgttcaaatgtagtgaatgtggaaaggcttttaaccagaagggggcactgcagacccacatgatcaagcacacaggtgaaaaaccccatgcctgtgccttctgtcctgccgccttctctcagaaagggaatcttcagtcgcacgtgcagcgagtccactcagaggtcaagaatggtcctacctataactgtacagaatgtagttgtgtatttaaaagtttaggcagcttaaacacgcatatcagcaagatgcatatgggtgggccacagaattcaacaagttctacagagactgctcatgttttaacggccacactttttcagacgttacctcttcaacagacggaagcccaagccacgtcggcctcaagccagccgagctcccaggcggtgagcgacgtcatccagcagctcctggagctctcagagccggcgccggtggagtcggggcagtccccgcagcctgggcagcagctgagcatcacagtgggcatcaaccaggacattttacagcaagccttagaaaacagtgggctgtcttcaattccagctgcagcacatcctaatgactcctgccatgccaagacctctgcaccacacgctcaaaacccagatgtttccagcgtttcaaatgagcagacggaccccacagacgcagagcaagaaaaagaacaggaaagcccggagaaactggataaaaaagaaaaaaaaatgataaagaagaagtcaccgtttctacctggctccatccgcgaggagaacggcgtgcgctggcatgtgtgtccctactgcgccaaggagttccgcaagcccagcgacctggtccgccacatccgcatccacacccacgagaagcccttcaagtgcccgcagtgcttccgcgccttcgccgtgaagagcacgctgacagcgcacatcaagacgcacaccggcatcaaggcgttcaagtgccagtactgcatgaagagcttctccacctctggcagcctcaaggtgcacattcgcctgcacacaggagttagaccttttgcttgtcctcactgtgacaaaaaatttcgaacctcaggccataggaagactcacattgcttcccactttaaacatacggaattaaggaaaatgaggcaccagcgtaaacctgcaaaggtccgtgttggcaagacgaatgttccagtccctgatattcctttgcaggaaccaatcctcataactgacttaggtctcatccagcccattccaaaaaaccagtttttccaaagctatttcaataataattttgtcaatgaagcagatagaccatacaagtgtttttactgtcatcgtgcatataaaaaatcttgccaccttaaacaacacatcagatcccatacaggtgaaaaaccttttaaatgttctcagtgtggaagaggctttgtttctgcaggcgtgctcaaagcacacatcagaacacacacaggactgaaatctttcaagtgtctgatatgtaatggggctttcactactggtggcagcttacggcgacacatgggtatccacaacgaccttcgtccctatatgtgtccctattgccaaaaaacatttaagacttcactaaattgcaaaaagcacatgaaaacccacagatatgagcttgcccagcagctccaacagcatcagcaggcagcctcgatagatgacagcactgtagaccagcagagcatgcaggcctccactcaaatgcaggtggagatcgagagcgacgagctgccgcagacggcagaggtggtcgcagcgaaccccgaggccatgctggacctggagcctcagcatgtggtgggcacggaggaagcagggctgggccagcagttggcagatcagcccctggaagcagatgaagatgggtttgtggctccacaggaccctctgcgagggcacgtagaccagtttgaagagcagagccctgcgcaacagtccttcgaaccagcagggctaccccaaggttttacagtgactgatacgtaccatcagcagcctcagtttccacctgtccaacagctacaggattccagcacacttgagtctcaggccctctccacaagcttccaccagcagagcttgctgcaggctcccagctctgatgggatgaatgtaacaactcgcttgattcaggagtcatcccaagaggaactggacctgcaggcacaaggttcccagtttctggaggacaacgaggaccagagcaggcgctcttacaggtgtgactattgcaacaaaggctttaagaagtccagccacctgaagcagcatgtgcggtcgcacaccggggaaaagccctacaagtgcaagctctgtggacgcggctttgtttcctctggggtcctcaagtcccacgagaagacacacacaggagtgaaggcgttcagctgcagtgtgtgcaatgcttccttcaccaccaatggcagcctcacccggcacatggccacacatatgagcatgaagccttataagtgtccgttttgtgaggagggtttccgaactacagtgcattgtaaaaagcacatgaagagacaccaaacagtcccctctgctgtgtcagccactggagagacagaaggaggagacatttgtatggaggaagaggaagaacattctgacagaaatgcatcacggaagtctcgtcctgaggtcatcactttcacggaggaggagacagcccagttagccaagatccggccgcaggagagcgccacggtgtcagagaaggtcctggtgcagtccgcggcagaaaaggaccgcatcagtgagctgagggacaagcaggcggagctgcaggacgagcccaagcacgccaactgctgcacatactgccccaagagcttcaagaaacctagcgacctggtgaggcatgttcgaatccatactggagaaaagccatacaaatgtgatgaatgtggaaagagttttactgtgaaatccactctcgattgtcatgtgaagactcacacaggtcagaagctcttcagctgtcacgtctgcagcaacgccttctccacgaagggaagtctgaaggtccacatgcgcctgcacacgggagccaagcccttcaaatgcccgcattgcgagctgcgtttccgtacctcgggtagaagaaagacacacatgcagtttcattataaaccagacccaaagaaggccagaaagcctatgactcgaagctcatcggaaggactgcagcctgtaaacctcctcaactcctcctctactgacccaaacgtgtttatcatgaacaactctgttctaacaggacagtttgatcagaatctgctgcaaccaggactggtgggccaagctattctccctgcctctgtgtcagctgggggtgacctgaccgtgtctctgacagatgggagcctggctaccctagaaggcatccagttacagttggctgctaacttggttggaccaaatgtacagatttctggaatcgatgctgccagcattaataacattacgttgcagattgatccaagcattctgcagcagacgctacagcagggcaacctattggctcagcagctcacgggggagcctggcctggccccacagaacagctctctccagacatcggacagcacggtccctgccagtgttgtcatccagcccatctcaggcctgtccttacagcccacagtgacctctgcgaacctgaccataggcccgctgtctgagcaggattcagtgctgaccactaacagcagtgggacccaagacctcactcaagtgatgacttcgcaaggtctagtgtccccctccggcggtccccacgagatcaccctgaccattaacaactccagcctgagccaggtcctggcacaggccgctgggcccactgccacgtcttcctcggggtctccacaggaaattaccctgactatctccggttccaggtctgtgcagcacagtgtgggaccccaggagtgtggatctgtggaggcattgtatttggagaactccagcgacaaaacttaacactacaagcggaagccttccttcaacaacaccgacgtctccatcggccatctcgactcagaacctggtcatgtcctcgtcgggcgtgggaggtgacgctagtgtcacgctgacgctggccgatactcagggtatgctatctggaggcctggacactgtcacactcaacatcacctctcagggtcagcagttcccagcgctcctcacggatccctctctctcgggccagggtggagcaggctcgccgcaagtcatactagtgagccacacgccacagtcagcgtctgctgcttgtgaagaaatagcctaccaggtagctggcgtctctgggaacctggccccgggcaaccagccagagaaggagggccgggcgcaccagtgcctggagtgtgaccgcgccttctcatcggcggcggtgctcatgcaccacagcaaggaggtgcatggccgggagcgcatccacggctgccccgtgtgcaggaaggccttcaagcgcgccacgcacctcaaggagcacatgcagacacaccaggccggcccctctttgagctcccagaagccaagagtgtttaaatgtgacacttgtgagaaggcatttgccaaaccaagccagctggagcgccacagccgcatacacacaggggagcggccgttccattgcacgctttgtgagaaagccttcaaccagaagagtgcgctgcaggtgcacatgaagaagcacacgggggagcggccctacaagtgtgcctactgcgtcatgggcttcacgcagaagagcaacatgaagctgcacatgaagcgggcgcacagctatgctggagctctgcaggagtctgcaggtcacccggagcaggatggggaggagctgagccggaccctccacctggaggaggtggtgcaggaggctgccggcgagtggcaggccctcacccacgtcttctgatgcgagttggaagtacacctttaagaatgtttctgaagttacgttttgtgaagagcaaagcacttggaatctctgttttaaagcttcaagtgttaaaaatgctacaatagttttttatctataaaattatctaaagaatcattgtctttcagagactcataggaaaaaaaaactgggaaaagtgtcaccgcattgttctcttttgtctacaaatcactgaactcaggtactactgtaggcagtttcctcctcagtctcctccgtggctagtgtgtctagttcacgaagcaattaactgggtcttactatcattgtagtgtgatttctttgtattagcaaagacaaaaacgctaacatggaaaaagtatgtcagattttccttcatgtttctggttataagaagcatagcttacaaagcaagcgtaagattgaggcatgaagttcagaaaaaaaagtgttataacacacagggaagttttttccactcttttctctgtgcattttgaaaattagtcaaaatggactcttttcagtctaccataagttaatataactgataccttgagagatggctggaccaattctctccatgacatgtttaatcattagttacaagaatgcagtatctggggcgtcaacatggggactcgagtaaacctgacccaccaataaggattcagctgtccacacgggctggcgacacacttaccgcatcaatctgtgttcaggtccagggttacataattgcagaagcacaagccatacatcgcaggtaggaaaccacagaaccgtctgcaaggagcaagcaacggtggccctgtccaccccagcaaataagaagcatatctgtagcttaaggccacgaatccgtaaaaaccccatgactttctcttcgtgcataaacagatgtatttttgatttcagggaattctttagtatcgtcaatggtgccacataaaacatgtcccaaaccaaatcccacccgtgctgggcagagtgcgtgcacgccattcctacagcattccaaagatggaaggttctttacttcatgttaatttttcctttgaaattatttatatgttctatatataaatacatatgtacatagatatatgggcctctgtgtggctgaacagtatattttgtaaatataagtactagtcctaattgcagaaagagcgtcagtttcacctccccacgagcacttcagatcagtattgtattcattttattcataaatggatatctttttcattgtcatataaagctgggttttatttttttttcctgaaaaataattgcctttattttctctcgttgcctccttggtttcagaagagagtagttttattataaatattgtatggactttgtatattaagagaggagctcatttcagattcctaaagaaatagacattttactgttattttgaaagggcatcttttgatttttttgttgttgttgttcacttttggcatatgtatataagtaatattgacggtgatatgaaaacttttgttatgtgaagatatttaagtcagaaaattgttaaataatattacttcttttccaaactgctttgtgtattgtatatttttttaagaaaaagaaaagccttatttgacttatgcttgtgatactggacttcttaccaatccggaggtttccttccttgaatgtcagtgtgtaaacctggctgtagccgcatatgcagaataactgtaattgtgctagagttttaaaggttctgcttttaatgcactttttattttataattttgtattgaaatattttagaaatgttgattaattttggtgaaaaaatatccccaaagtggaaattattggaattttaaacttttgttcttgctgggttatttattttgattttagcattaaatgtcatctcaggatatctctaaaaggggttgtttaattcctaattgtatagaaagctagtttggtgaattgtattggttaattgactgtttaaggccttaacaggtgaatctagagcctacttttattttggttaaagaaaaagaaaatatcaataattcaattttgtgtcttttctcaatttattagcaaacacaagacattttatgtattatttcgatttacttcctaattataaaagctgcttttttgcagaacattccttgaaaatataaggttttgaaaagacataattttacttgaatctttgtggggtacaggttgatctttatattttactggttgttttaaaaattctagaaaagagatttctaggcctcatgtataaccagggttttgaggataaagaactgtatttttagaactatctcatcatagcatatctgctttggaataactataaataaaagatgaagttagg

SEQ ID NO: 61181 - DNA, 8199 bp, Homo sapiens
cacatggtttaagaagcatcattatggcttttgtgtgttttggtgtgtgtggctgtgaagcctcaggaatttagtttaagcttctgaaaagcccaccaatatgtatttagaattctgttgtcccatatcttagtcatctcaatgtttctcatttctaactttaaaacatgtcaattaaaaaaattcagtatatcattaatttcgtctaaaatgtcacataaatctctgacataatttggtttttaaacaataaccaataatttggttttatttatgtgatgagaataacaactggtatttattgtctatacttatgcaattttatagatggagttttaacattgaatgcggagaacactaattatgcctatcaagttccaaacttccataaatgtgaaatctgtctactatcttttccaaaagaatcccagtttcaacgccacatgagggatcacgagcgaaatgacaagccacatcgatgtgaccagtgcccccaaacatttaatgttgaattcaacctgacacttcataaatgcacccacagcggggaagatcctacctgccctgtgtgtaacaagaaattctccagagtggctagtctcaaagcgcatattatgctacatgaaaaggaagagaatctcatctgttctgagtgtggggatgagtttactctgcagagtcagctggccgtgcacatggaggagcaccgccaggagctggctggaacccggcagcatgcctgcaaggcctgcaagaaagagttcgagacctcctcggagctgaaggaacacatgaagactcattacaaaattagggtatcaagtacaaggtcttataaccggaatatcgacagaagtggattcacgtattcgtgtccgcactgtggaaagacgtttcaaaagccaagccagttaacgcgacacattaggatacacacaggtgaaaggccgttcaaatgtagtgaatgtggaaaggcttttaaccagaagggggcactgcagacccacatgatcaagcacacaggtgaaaaaccccatgcctgtgccttctgtcctgccgccttctctcagaaagggaatcttcagtcgcacgtgcagcgagtccactcagaggtcaagaatggtcctacctataactgtacagaatgtagttgtgtatttaaaagtttaggcagcttaaacacgcatatcagcaagatgcatatgggtgggccacagaattcaacaagttctacagagactgctcatgttttaacggccacactttttcagacgttacctcttcaacagacggaagcccaagccacgtcggcctcaagccagccgagctcccaggcggtgagcgacgtcatccagcagctcctggagctctcagagccggcgccggtggagtcggggcagtccccgcagcctgggcagcagctgagcatcacagtgggcatcaaccaggacattttacagcaagccttagaaaacagtgggctgtcttcaattccagctgcagcacatcctaatgactcctgccatgccaagacctctgcaccacacgctcaaaacccagatgtttccagcgtttcaaatgagcagacggaccccacagacgcagagcaagaaaaagaacaggaaagcccggagaaactggataaaaaagaaaaaaaaatgataaagaagaagtcaccgtttctacctggctccatccgcgaggagaacggcgtgcgctggcatgtgtgtccctactgcgccaaggagttccgcaagcccagcgacctggtccgccacatccgcatccacacccacgagaagcccttcaagtgcccgcagtgcttccgcgccttcgccgtgaagagcacgctgacagcgcacatcaagacgcacaccggcatcaaggcgttcaagtgccagtactgcatgaagagcttctccacctctggcagcctcaaggtgcacattcgcctgcacacaggagttagaccttttgcttgtcctcactgtgacaaaaaatttcgaacctcaggccataggaagactcacattgcttcccactttaaacatacggaattaaggaaaatgaggcaccagcgtaaacctgcaaaggtccgtgttggcaagacgaatgttccagtccctgatattcctttgcaggaaccaatcctcataactgacttaggtctcatccagcccattccaaaaaaccagtttttccaaagctatttcaataataattttgtcaatgaagcagatagaccatacaagtgtttttactgtcatcgtgcatataaaaaatcttgccaccttaaacaacacatcagatcccatacaggtgaaaaaccttttaaatgttctcagtgtggaagaggctttgtttctgcaggcgtgctcaaagcacacatcagaacacacacaggactgaaatctttcaagtgtctgatatgtaatggggctttcactactggtggcagcttacggcgacacatgggtatccacaacgaccttcgtccctatatgtgtccctattgccaaaaaacatttaagacttcactaaattgcaaaaagcacatgaaaacccacagatatgagcttgcccagcagctccaacagcatcagcaggcagcctcgatagatgacagcactgtagaccagcagagcatgcaggcctccactcaaatgcaggtggagatcgagagcgacgagctgccgcagacggcagaggtggtcgcagcgaaccccgaggccatgctggacctggagcctcagcatgtggtgggcacggaggaagcagggctgggccagcagttggcagatcagcccctggaagcagatgaagatgggtttgtggctccacaggaccctctgcgagggcacgtagaccagtttgaagagcagagccctgcgcaacagtccttcgaaccagcagggctaccccaaggttttacagtgactgatacgtaccatcagcagcctcagtttccacctgtccaacagctacaggattccagcacacttgagtctcaggccctctccacaagcttccaccagcagagcttgctgcaggctcccagctctgatgggatgaatgtaacaactcgcttgattcaggagtcatcccaagaggaactggacctgcaggcacaaggttcccagtttctggaggacaacgaggaccagagcaggcgctcttacaggtgtgactattgcaacaaaggctttaagaagtccagccacctgaagcagcatgtgcggtcgcacaccggggaaaagccctacaagtgcaagctctgtggacgcggctttgtttcctctggggtcctcaagtcccacgagaagacacacacaggagtgaaggcgttcagctgcagtgtgtgcaatgcttccttcaccaccaatggcagcctcacccggcacatggccacacatatgagcatgaagccttataagtgtccgttttgtgaggagggtttccgaactacagtgcattgtaaaaagcacatgaagagacaccaaacagtcccctctgctgtgtcagccactggagagacagaaggaggagacatttgtatggaggaagaggaagaacattctgacagaaatgcatcacggaagtctcgtcctgaggtcatcactttcacggaggaggagacagcccagttagccaagatccggccgcaggagagcgccacggtgtcagagaaggtcctggtgcagtccgcggcagaaaaggaccgcatcagtgagctgagggacaagcaggcggagctgcaggacgagcccaagcacgccaactgctgcacatactgccccaagagcttcaagaaacctagcgacctggtgaggcatgttcgaatccatactggagaaaagccatacaaatgtgatgaatgtggaaagagttttactgtgaaatccactctcgattgtcatgtgaagactcacacaggtcagaagctcttcagctgtcacgtctgcagcaacgccttctccacgaagggaagtctgaaggtccacatgcgcctgcacacgggagccaagcccttcaaatgcccgcattgcgagctgcgtttccgtacctcgggtagaagaaagacacacatgcagtttcattataaaccagacccaaagaaggccagaaagcctatgactcgaagctcatcggaaggactgcagcctgtaaacctcctcaactcctcctctactgacccaaacgtgtttatcatgaacaactctgttctaacaggacagtttgatcagaatctgctgcaaccaggactggtgggccaagctattctccctgcctctgtgtcagctgggggtgacctgaccgtgtctctgacagatgggagcctggctaccctagaaggcatccagttacagttggctgctaacttggttggaccaaatgtacagatttctggaatcgatgctgccagcattaataacattacgttgcagattgatccaagcattctgcagcagacgctacagcagggcaacctattggctcagcagctcacgggggagcctggcctggccccacagaacagctctctccagacatcggacagcacggtccctgccagtgttgtcatccagcccatctcaggcctgtccttacagcccacagtgacctctgcgaacctgaccataggcccgctgtctgagcaggattcagtgctgaccactaacagcagtgggacccaagacctcactcaagtgatgacttcgcaaggtctagtgtccccctccggcggtccccacgagatcaccctgaccattaacaactccagcctgagccaggtcctggcacaggccgctgggcccactgccacgtcttcctcggggtctccacaggaaattaccctgactatctccgaacttaacactacaagcggaagccttccttcaacaacaccgacgtctccatcggccatctcgactcagaacctggtcatgtcctcgtcgggcgtgggaggtgacgctagtgtcacgctgacgctggccgatactcagggtatgctatctggaggcctggacactgtcacactcaacatcacctctcagggtcagcagttcccagcgctcctcacggatccctctctctcgggccagggtggagcaggctcgccgcaagtcatactagtgagccacacgccacagtcagcgtctgctgcttgtgaagaaatagcctaccaggtagctggcgtctctgggaacctggccccgggcaaccagccagagaaggagggccgggcgcaccagtgcctggagtgtgaccgcgccttctcatcggcggcggtgctcatgcaccacagcaaggaggtgcatggccgggagcgcatccacggctgccccgtgtgcaggaaggccttcaagcgcgccacgcacctcaaggagcacatgcagacacaccaggccggcccctctttgagctcccagaagccaagagtgtttaaatgtgacacttgtgagaaggcatttgccaaaccaagccagctggagcgccacagccgcatacacacaggggagcggccgttccattgcacgctttgtgagaaagccttcaaccagaagagtgcgctgcaggtgcacatgaagaagcacacgggggagcggccctacaagtgtgcctactgcgtcatgggcttcacgcagaagagcaacatgaagctgcacatgaagcgggcgcacagctatgctggagctctgcaggagtctgcaggtcacccggagcaggatggggaggagctgagccggaccctccacctggaggaggtggtgcaggaggctgccggcgagtggcaggccctcacccacgtcttctgatgcgagttggaagtacacctttaagaatgtttctgaagttacgttttgtgaagagcaaagcacttggaatctctgttttaaagcttcaagtgttaaaaatgctacaatagttttttatctataaaattatctaaagaatcattgtctttcagagactcataggaaaaaaaaactgggaaaagtgtcaccgcattgttctcttttgtctacaaatcactgaactcaggtactactgtaggcagtttcctcctcagtctcctccgtggctagtgtgtctagttcacgaagcaattaactgggtcttactatcattgtagtgtgatttctttgtattagcaaagacaaaaacgctaacatggaaaaagtatgtcagattttccttcatgtttctggttataagaagcatagcttacaaagcaagcgtaagattgaggcatgaagttcagaaaaaaaagtgttataacacacagggaagttttttccactcttttctctgtgcattttgaaaattagtcaaaatggactcttttcagtctaccataagttaatataactgataccttgagagatggctggaccaattctctccatgacatgtttaatcattagttacaagaatgcagtatctggggcgtcaacatggggactcgagtaaacctgacccaccaataaggattcagctgtccacacgggctggcgacacacttaccgcatcaatctgtgttcaggtccagggttacataattgcagaagcacaagccatacatcgcaggtaggaaaccacagaaccgtctgcaaggagcaagcaacggtggccctgtccaccccagcaaataagaagcatatctgtagcttaaggccacgaatccgtaaaaaccccatgactttctcttcgtgcataaacagatgtatttttgatttcagggaattctttagtatcgtcaatggtgccacataaaacatgtcccaaaccaaatcccacccgtgctgggcagagtgcgtgcacgccattcctacagcattccaaagatggaaggttctttacttcatgttaatttttcctttgaaattatttatatgttctatatataaatacatatgtacatagatatatgggcctctgtgtggctgaacagtatattttgtaaatataagtactagtcctaattgcagaaagagcgtcagtttcacctccccacgagcacttcagatcagtattgtattcattttattcataaatggatatctttttcattgtcatataaagctgggttttatttttttttcctgaaaaataattgcctttattttctctcgttgcctccttggtttcagaagagagtagttttattataaatattgtatggactttgtatattaagagaggagctcatttcagattcctaaagaaatagacattttactgttattttgaaagggcatcttttgatttttttgttgttgttgttcacttttggcatatgtatataagtaatattgacggtgatatgaaaacttttgttatgtgaagatatttaagtcagaaaattgttaaataatattacttcttttccaaactgctttgtgtattgtatatttttttaagaaaaagaaaagccttatttgacttatgcttgtgatactggacttcttaccaatccggaggtttccttccttgaatgtcagtgtgtaaacctggctgtagccgcatatgcagaataactgtaattgtgctagagttttaaaggttctgcttttaatgcactttttattttataattttgtattgaaatattttagaaatgttgattaattttggtgaaaaaatatccccaaagtggaaattattggaattttaaacttttgttcttgctgggttatttattttgattttagcattaaatgtcatctcaggatatctctaaaaggggttgtttaattcctaattgtatagaaagctagtttggtgaattgtattggttaattgactgtttaaggccttaacaggtgaatctagagcctacttttattttggttaaagaaaaagaaaatatcaataattcaattttgtgtcttttctcaatttattagcaaacacaagacattttatgtattatttcgatttacttcctaattataaaagctgcttttttgcagaacattccttgaaaatataaggttttgaaaagacataattttacttgaatctttgtggggtacaggttgatctttatattttactggttgttttaaaaattctagaaaagagatttctaggcctcatgtataaccagggttttgaggataaagaactgtatttttagaactatctcatcatagcatatctgctttggaataactataaataaaagatgaagttagg

SEQ ID NO: 61182 - DNA, 8116 bp, Homo sapiens
cacatggtttaagaagcatcattatggcttttgtgtgttttggtgtgtgtggctgtgaagcctcaggaatttagtttaagcttctgaaaagcccaccaatatgtatttagaattctgttgtcccatatcttagtcatctcaatgtttctcatttctaactttaaaacatgtcaattaaaaaaattcagtatatcattaatttcgtctaaaatgtcacataaatctctgacataatttggtttttaaacaataaccaataatttggttttatttatgtgatgagaataacaactggtatttattgtctatacttatgcaattttatagatggagttttaacattgaatgcggagaacactaattatgcctatcaagttccaaacttccataaatgtgaaatctgtctactatcttttccaaaagaatcccagtttcaacgccacatgagggatcacgagcgaaatgacaagccacatcgatgtgaccagtgcccccaaacatttaatgttgaattcaacctgacacttcataaatgcacccacagcggggaagatcctacctgccctgtgtgtaacaagaaattctccagagtggctagtctcaaagcgcatattatgctacatgaaaaggaagagaatctcatctgttctgagtgtggggatgagtttactctgcagagtcagctggccgtgcacatggaggagcaccgccaggagctggctggaacccggcagcatgcctgcaaggcctgcaagaaagagttcgagacctcctcggagctgaaggaacacatgaagactcattacaaaattagggtatcaagtacaaggtcttataaccggaatatcgacagaagtggattcacgtattcgtgtccgcactgtggaaagacgtttcaaaagccaagccagttaacgcgacacattaggatacacacaggtgaaaggccgttcaaatgtagtgaatgtggaaaggcttttaaccagaagggggcactgcagacccacatgatcaagcacacaggtgaaaaaccccatgcctgtgccttctgtcctgccgccttctctcagaaagggaatcttcagtcgcacgtgcagcgagtccactcagaggtcaagaatggtcctacctataactgtacagaatgtagttgtgtatttaaaagtttaggcagcttaaacacgcatatcagcaagatgcatatgggtgggccacagaattcaacaagttctacagagactgctcatgttttaacggccacactttttcagacgttacctcttcaacagacggaagcccaagccacgtcggcctcaagccagccgagctcccaggcggtgagcgacgtcatccagcagctcctggagctctcagagccggcgccggtggagtcggggcagtccccgcagcctgggcagcagctgagcatcacagtgggcatcaaccaggacattttacagcaagccttagaaaacagtgggctgtcttcaattccagctgcagcacatcctaatgactcctgccatgccaagacctctgcaccacacgctcaaaacccagatgtttccagcgtttcaaatgagcagacggaccccacagacgcagagcaagaaaaagaacaggaaagcccggagaaactggataaaaaagaaaaaaaaatgataaagaagaagtcaccgtttctacctggctccatccgcgaggagaacggcgtgcgctggcatgtgtgtccctactgcgccaaggagttccgcaagcccagcgacctggtccgccacatccgcatccacacccacgagaagcccttcaagtgcccgcagtgcttccgcgccttcgccgtgaagagcacgctgacagcgcacatcaagacgcacaccggcatcaaggcgttcaagtgccagtactgcatgaagagcttctccacctctggcagcctcaaggtgcacattcgcctgcacacaggagttagaccttttgcttgtcctcactgtgacaaaaaatttcgaacctcaggccataggaagactcacattgcttcccactttaaacatacggaattaaggaaaatgaggcaccagcgtaaacctgcaaaggtccgtgttggcaagacgaatgttccagtccctgatattcctttgcaggaaccaatcctcataactgacttaggtctcatccagcccattccaaaaaaccagtttttccaaagctatttcaataataattttgtcaatgaagcagatagaccatacaagtgtttttactgtcatcgtgcatataaaaaatcttgccaccttaaacaacacatcagatcccatacaggtgaaaaaccttttaaatgttctcagtgtggaagaggctttgtttctgcaggcgtgctcaaagcacacatcagaacacacacaggactgaaatctttcaagtgtctgatatgtaatggggctttcactactggtggcagcttacggcgacacatgggtatccacaacgaccttcgtccctatatgtgtccctattgccaaaaaacatttaagacttcactaaattgcaaaaagcacatgaaaacccacagatatgagcttgcccagcagctccaacagcatcagcaggcagcctcgatagatgacagcactgtagaccagcagagcatgcaggcctccactcaaatgcaggtggagatcgagagcgacgagctgccgcagacggcagaggtggtcgcagcgaaccccgaggccatgctggacctggagcctcagcatgtggtgggcacggaggaagcagggctgggccagcagttggcagatcagcccctggaagcagatgaagatgggtttgtggctccacaggaccctctgcgagggcacgtagaccagtttgaagagcagagccctgcgcaacagtccttcgaaccagcagggctaccccaaggttttacagtgactgatacgtaccatcagcagcctcagtttccacctgtccaacagctacaggattccagcacacttgagtctcaggccctctccacaagcttccaccagcagagcttgctgcaggctcccagctctgatgggatgaatgtaacaactcgcttgattcaggagtcatcccaagaggaactggacctgcaggcacaaggttcccagtttctggaggacaacgaggaccagagcaggcgctcttacaggtgtgactattgcaacaaaggctttaagaagtccagccacctgaagcagcatgtgcggtcgcacaccggggaaaagccctacaagtgcaagctctgtggacgcggctttgtttcctctggggtcctcaagtcccacgagaagacacacacaggagtgaaggcgttcagctgcagtgtgtgcaatgcttccttcaccaccaatggcagcctcacccggcacatggccacacatatgagcatgaagccttataagtgtccgttttgtgaggagggtttccgaactacagtgcattgtaaaaagcacatgaagagacaccaaacagtcccctctgctgtgtcagccactggagagacagaaggaggagacatttgtatggaggaagaggaagaacattctgacagaaatgcatcacggaagtctcgtcctgaggtcatcactttcacggaggaggagacagcccagttagccaagatccggccgcaggagagcgccacggtgtcagagaaggtcctggtgcagtccgcggcagaaaaggaccgcatcagtgagctgagggacaagcaggcggagctgcaggacgagcccaagcacgccaactgctgcacatactgccccaagagcttcaagaaacctagcgacctggtgaggcatgttcgaatccatactggagaaaagccatacaaatgtgatgaatgtggaaagagttttactgtgaaatccactctcgattgtcatgtgaagactcacacaggtcagaagctcttcagctgtcacgtctgcagcaacgccttctccacgaagggaagtctgaaggtccacatgcgcctgcacacgggagccaagcccttcaaatgcccgcattgcgagctgcgtttccgtacctcgggtagaagaaagacacacatgcagtttcattataaaccagacccaaagaaggccagaaagcctatgactcgaagctcatcggaaggactgcagcctgtaaacctcctcaactcctcctctactgacccaaacgtgtttatcatgaacaactctgttctaacaggacagtttgatcagaatctgctgcaaccaggactggtgggccaagctattctccctgcctctgtgtcagctgggggtgacctgaccgtgtctctgacagatgggagcctggctaccctagaaggcatccagttacagttggctgctaacttggttggaccaaatgtacagatttctggaatcgatgctgccagcattaataacattacgttgcagattgatccaagcattctgcagcagacgctacagcagggcaacctattggctcagcagctcacgggggagcctggcctggccccacagaacagctctctccagacatcggacagcacggtccctgccagtgttgtcatccagcccatctcaggcctgtccttacagcccacagtgacctctgcgaacctgaccataggcccgctgtctgagcaggattcagtgctgaccactaacagcagtgggacccaagacctcactcaagtgatgacttcgcaaggtctagtgtccccctccggcggtccccacgagatcaccctgaccattaacaactccagcctgagccaggtcctggcacaggccgctgggcccactgccacgtcttcctcggggtctccacaggaaattaccctgactatctccgaacttaacactacaagcggaagccttccttcaacaacaccgacgtctccatcggccatctcgactcagaacctggtcatgtcctcgtcgggcgtgggaggtgacgctagtgtcacgctgacgctggccgatactcagggtatgctatctggaggcctggacactgtcacactcaacatcacctctcagggtcagcagttcccagcgctcctcacggatccctctctctcgggccagggtggagcaggctcgccgcaagtcatactagtgagccacacgccacagtcagcgtctgctgcttgtgaagaaatagcctaccaggtagctggcgtctctgggaacctggccccgggcaaccagccagagaaggagggccgggcgcaccagtgcctggagtgtgaccgcgccttctcatcggcggcggtgctcatgcaccacagcaaggaggtgcatggccgggagcgcatccacggctgccccgtgtgcaggaaggccttcaagcgcgccacgcacctcaaggagcacatgcagacacaccaggccggcccctctttgagctcccagaagccaagagtgtttaaatgtgacacttgtgagaaggcatttgccaaaccaagccagctggagcgccacagccgcatacacacaggggagcggccgttccattgcacgctttgtgagaaagccttcaaccagaagagtgcgctgcaggtgcacatgaagaagcacacgggggagcggccctacaagtgtgcctactgcgtcatgggcttcacgcagaagagcaacatgaagctgcacatgaagcgggcgcacagctatgctggaggctgccggcgagtggcaggccctcacccacgtcttctgatgcgagttggaagtacacctttaagaatgtttctgaagttacgttttgtgaagagcaaagcacttggaatctctgttttaaagcttcaagtgttaaaaatgctacaatagttttttatctataaaattatctaaagaatcattgtctttcagagactcataggaaaaaaaaactgggaaaagtgtcaccgcattgttctcttttgtctacaaatcactgaactcaggtactactgtaggcagtttcctcctcagtctcctccgtggctagtgtgtctagttcacgaagcaattaactgggtcttactatcattgtagtgtgatttctttgtattagcaaagacaaaaacgctaacatggaaaaagtatgtcagattttccttcatgtttctggttataagaagcatagcttacaaagcaagcgtaagattgaggcatgaagttcagaaaaaaaagtgttataacacacagggaagttttttccactcttttctctgtgcattttgaaaattagtcaaaatggactcttttcagtctaccataagttaatataactgataccttgagagatggctggaccaattctctccatgacatgtttaatcattagttacaagaatgcagtatctggggcgtcaacatggggactcgagtaaacctgacccaccaataaggattcagctgtccacacgggctggcgacacacttaccgcatcaatctgtgttcaggtccagggttacataattgcagaagcacaagccatacatcgcaggtaggaaaccacagaaccgtctgcaaggagcaagcaacggtggccctgtccaccccagcaaataagaagcatatctgtagcttaaggccacgaatccgtaaaaaccccatgactttctcttcgtgcataaacagatgtatttttgatttcagggaattctttagtatcgtcaatggtgccacataaaacatgtcccaaaccaaatcccacccgtgctgggcagagtgcgtgcacgccattcctacagcattccaaagatggaaggttctttacttcatgttaatttttcctttgaaattatttatatgttctatatataaatacatatgtacatagatatatgggcctctgtgtggctgaacagtatattttgtaaatataagtactagtcctaattgcagaaagagcgtcagtttcacctccccacgagcacttcagatcagtattgtattcattttattcataaatggatatctttttcattgtcatataaagctgggttttatttttttttcctgaaaaataattgcctttattttctctcgttgcctccttggtttcagaagagagtagttttattataaatattgtatggactttgtatattaagagaggagctcatttcagattcctaaagaaatagacattttactgttattttgaaagggcatcttttgatttttttgttgttgttgttcacttttggcatatgtatataagtaatattgacggtgatatgaaaacttttgttatgtgaagatatttaagtcagaaaattgttaaataatattacttcttttccaaactgctttgtgtattgtatatttttttaagaaaaagaaaagccttatttgacttatgcttgtgatactggacttcttaccaatccggaggtttccttccttgaatgtcagtgtgtaaacctggctgtagccgcatatgcagaataactgtaattgtgctagagttttaaaggttctgcttttaatgcactttttattttataattttgtattgaaatattttagaaatgttgattaattttggtgaaaaaatatccccaaagtggaaattattggaattttaaacttttgttcttgctgggttatttattttgattttagcattaaatgtcatctcaggatatctctaaaaggggttgtttaattcctaattgtatagaaagctagtttggtgaattgtattggttaattgactgtttaaggccttaacaggtgaatctagagcctacttttattttggttaaagaaaaagaaaatatcaataattcaattttgtgtcttttctcaatttattagcaaacacaagacattttatgtattatttcgatttacttcctaattataaaagctgcttttttgcagaacattccttgaaaatataaggttttgaaaagacataattttacttgaatctttgtggggtacaggttgatctttatattttactggttgttttaaaaattctagaaaagagatttctaggcctcatgtataaccagggttttgaggataaagaactgtatttttagaactatctcatcatagcatatctgctttggaataactataaataaaagatgaagttagg

SEQ ID NO: 61183 - DNA, 7658 bp, Homo sapiens
agaggaactctcatacactaagcaacatgatagtatcacgagcgaagtgacaagccacatcgatgtgaccagtgcccccaaacatttaatgttgaattcaacctgacacttcataaatgcacccacagcggggaagatcctacctgccctgtgtgtaacaagaaattctccagagtggctagtctcaaagcgcatattatgctacatgaaaaggaagagaatctcatctgttctgagtgtggggatgagtttactctgcagagtcagctggccgtgcacatggaggagcaccgccaggagctggctggaacccggcagcatgcctgcaaggcctgcaagaaagagttcgagacctcctcggagctgaaggaacacatgaagactcattacaaaattaggtgaaaggccgttcaaatgtagtgaatgtggaaaggcttttaaccagaagggggcactgcagacccacatgatcaagcacacaggtgaaaaaccccatgcctgtgccttctgtcctgccgccttctctcagaaagggaatcttcagtcgcacgtgcagcgagtccactcagaggtcaagaatggtcctacctataactgtacagaatgtagttgtgtatttaaaagtttaggcagcttaaacacgcatatcagcaagatgcatatgggtgggccacagaattcaacaagttctacagagactgctcatgttttaacggccacactttttcagacgttacctcttcaacagacggaagcccaagccacgtcggcctcaagccagccgagctcccaggcggtgagcgacgtcatccagcagctcctggagctctcagagccggcgccggtggagtcggggcagtccccgcagcctgggcagcagctgagcatcacagtgggcatcaaccaggacattttacagcaagccttagaaaacagtgggctgtcttcaattccagctgcagcacatcctaatgactcctgccatgccaagacctctgcaccacacgctcaaaacccagatgtttccagcgtttcaaatgagcagacggaccccacagacgcagagcaagaaaaagaacaggaaagcccggagaaactggataaaaaagaaaaaaaaatgataaagaagaagtcaccgtttctacctggctccatccgcgaggagaacggcgtgcgctggcatgtgtgtccctactgcgccaaggagttccgcaagcccagcgacctggtccgccacatccgcatccacacccacgagaagcccttcaagtgcccgcagtgcttccgcgccttcgccgtgaagagcacgctgacagcgcacatcaagacgcacaccggcatcaaggcgttcaagtgccagtactgcatgaagagcttctccacctctggcagcctcaaggtgcacattcgcctgcacacaggagttagaccttttgcttgtcctcactgtgacaaaaaatttcgaacctcaggccataggaagactcacattgcttcccactttaaacatacggaattaaggaaaatgaggcaccagcgtaaacctgcaaaggtccgtgttggcaagacgaatgttccagtccctgatattcctttgcaggaaccaatcctcataactgacttaggtctcatccagcccattccaaaaaaccagtttttccaaagctatttcaataataattttgtcaatgaagcagatagaccatacaagtgtttttactgtcatcgtgcatataaaaaatcttgccaccttaaacaacacatcagatcccatacaggtgaaaaaccttttaaatgttctcagtgtggaagaggctttgtttctgcaggcgtgctcaaagcacacatcagaacacacacaggactgaaatctttcaagtgtctgatatgtaatggggctttcactactggtggcagcttacggcgacacatgggtatccacaacgaccttcgtccctatatgtgtccctattgccaaaaaacatttaagacttcactaaattgcaaaaagcacatgaaaacccacagatatgagcttgcccagcagctccaacagcatcagcaggcagcctcgatagatgacagcactgtagaccagcagagcatgcaggcctccactcaaatgcaggtggagatcgagagcgacgagctgccgcagacggcagaggtggtcgcagcgaaccccgaggccatgctggacctggagcctcagcatgtggtgggcacggaggaagcagggctgggccagcagttggcagatcagcccctggaagcagatgaagatgggtttgtggctccacaggaccctctgcgagggcacgtagaccagtttgaagagcagagccctgcgcaacagtccttcgaaccagcagggctaccccaaggttttacagtgactgatacgtaccatcagcagcctcagtttccacctgtccaacagctacaggattccagcacacttgagtctcaggccctctccacaagcttccaccagcagagcttgctgcaggctcccagctctgatgggatgaatgtaacaactcgcttgattcaggagtcatcccaagaggaactggacctgcaggcacaaggttcccagtttctggaggacaacgaggaccagagcaggcgctcttacaggtgtgactattgcaacaaaggctttaagaagtccagccacctgaagcagcatgtgcggtcgcacaccggggaaaagccctacaagtgcaagctctgtggacgcggctttgtttcctctggggtcctcaagtcccacgagaagacacacacaggagtgaaggcgttcagctgcagtgtgtgcaatgcttccttcaccaccaatggcagcctcacccggcacatggccacacatatgagcatgaagccttataagtgtccgttttgtgaggagggtttccgaactacagtgcattgtaaaaagcacatgaagagacaccaaacagtcccctctgctgtgtcagccactggagagacagaaggaggagacatttgtatggaggaagaggaagaacattctgacagaaatgcatcacggaagtctcgtcctgaggtcatcactttcacggaggaggagacagcccagttagccaagatccggccgcaggagagcgccacggtgtcagagaaggtcctggtgcagtccgcggcagaaaaggaccgcatcagtgagctgagggacaagcaggcggagctgcaggacgagcccaagcacgccaactgctgcacatactgccccaagagcttcaagaaacctagcgacctggtgaggcatgttcgaatccatactggagaaaagccatacaaatgtgatgaatgtggaaagagttttactgtgaaatccactctcgattgtcatgtgaagactcacacaggtcagaagctcttcagctgtcacgtctgcagcaacgccttctccacgaagggaagtctgaaggtccacatgcgcctgcacacgggagccaagcccttcaaatgcccgcattgcgagctgcgtttccgtacctcgggtagaagaaagacacacatgcagtttcattataaaccagacccaaagaaggccagaaagcctatgactcgaagctcatcggaaggactgcagcctgtaaacctcctcaactcctcctctactgacccaaacgtgtttatcatgaacaactctgttctaacaggacagtttgatcagaatctgctgcaaccaggactggtgggccaagctattctccctgcctctgtgtcagctgggggtgacctgaccgtgtctctgacagatgggagcctggctaccctagaaggcatccagttacagttggctgctaacttggttggaccaaatgtacagatttctggaatcgatgctgccagcattaataacattacgttgcagattgatccaagcattctgcagcagacgctacagcagggcaacctattggctcagcagctcacgggggagcctggcctggccccacagaacagctctctccagacatcggacagcacggtccctgccagtgttgtcatccagcccatctcaggcctgtccttacagcccacagtgacctctgcgaacctgaccataggcccgctgtctgagcaggattcagtgctgaccactaacagcagtgggacccaagacctcactcaagtgatgacttcgcaaggtctagtgtccccctccggcggtccccacgagatcaccctgaccattaacaactccagcctgagccaggtcctggcacaggccgctgggcccactgccacgtcttcctcggggtctccacaggaaattaccctgactatctccgaacttaacactacaagcggaagccttccttcaacaacaccgacgtctccatcggccatctcgactcagaacctggtcatgtcctcgtcgggcgtgggaggtgacgctagtgtcacgctgacgctggccgatactcagggtatgctatctggaggcctggacactgtcacactcaacatcacctctcagggtcagcagttcccagcgctcctcacggatccctctctctcgggccagggtggagcaggctcgccgcaagtcatactagtgagccacacgccacagtcagcgtctgctgcttgtgaagaaatagcctaccaggtagctggcgtctctgggaacctggccccgggcaaccagccagagaaggagggccgggcgcaccagtgcctggagtgtgaccgcgccttctcatcggcggcggtgctcatgcaccacagcaaggaggtgcatggccgggagcgcatccacggctgccccgtgtgcaggaaggccttcaagcgcgccacgcacctcaaggagcacatgcagacacaccaggccggcccctctttgagctcccagaagccaagagtgtttaaatgtgacacttgtgagaaggcatttgccaaaccaagccagctggagcgccacagccgcatacacacaggggagcggccgttccattgcacgctttgtgagaaagccttcaaccagaagagtgcgctgcaggtgcacatgaagaagcacacgggggagcggccctacaagtgtgcctactgcgtcatgggcttcacgcagaagagcaacatgaagctgcacatgaagcgggcgcacagctatgctggagctctgcaggagtctgcaggtcacccggagcaggatggggaggagctgagccggaccctccacctggaggaggtggtgcaggaggctgccggcgagtggcaggccctcacccacgtcttctgatgcgagttggaagtacacctttaagaatgtttctgaagttacgttttgtgaagagcaaagcacttggaatctctgttttaaagcttcaagtgttaaaaatgctacaatagttttttatctataaaattatctaaagaatcattgtctttcagagactcataggaaaaaaaaactgggaaaagtgtcaccgcattgttctcttttgtctacaaatcactgaactcaggtactactgtaggcagtttcctcctcagtctcctccgtggctagtgtgtctagttcacgaagcaattaactgggtcttactatcattgtagtgtgatttctttgtattagcaaagacaaaaacgctaacatggaaaaagtatgtcagattttccttcatgtttctggttataagaagcatagcttacaaagcaagcgtaagattgaggcatgaagttcagaaaaaaaagtgttataacacacagggaagttttttccactcttttctctgtgcattttgaaaattagtcaaaatggactcttttcagtctaccataagttaatataactgataccttgagagatggctggaccaattctctccatgacatgtttaatcattagttacaagaatgcagtatctggggcgtcaacatggggactcgagtaaacctgacccaccaataaggattcagctgtccacacgggctggcgacacacttaccgcatcaatctgtgttcaggtccagggttacataattgcagaagcacaagccatacatcgcaggtaggaaaccacagaaccgtctgcaaggagcaagcaacggtggccctgtccaccccagcaaataagaagcatatctgtagcttaaggccacgaatccgtaaaaaccccatgactttctcttcgtgcataaacagatgtatttttgatttcagggaattctttagtatcgtcaatggtgccacataaaacatgtcccaaaccaaatcccacccgtgctgggcagagtgcgtgcacgccattcctacagcattccaaagatggaaggttctttacttcatgttaatttttcctttgaaattatttatatgttctatatataaatacatatgtacatagatatatgggcctctgtgtggctgaacagtatattttgtaaatataagtactagtcctaattgcagaaagagcgtcagtttcacctccccacgagcacttcagatcagtattgtattcattttattcataaatggatatctttttcattgtcatataaagctgggttttatttttttttcctgaaaaataattgcctttattttctctcgttgcctccttggtttcagaagagagtagttttattataaatattgtatggactttgtatattaagagaggagctcatttcagattcctaaagaaatagacattttactgttattttgaaagggcatcttttgatttttttgttgttgttgttcacttttggcatatgtatataagtaatattgacggtgatatgaaaacttttgttatgtgaagatatttaagtcagaaaattgttaaataatattacttcttttccaaactgctttgtgtattgtatatttttttaagaaaaagaaaagccttatttgacttatgcttgtgatactggacttcttaccaatccggaggtttccttccttgaatgtcagtgtgtaaacctggctgtagccgcatatgcagaataactgtaattgtgctagagttttaaaggttctgcttttaatgcactttttattttataattttgtattgaaatattttagaaatgttgattaattttggtgaaaaaatatccccaaagtggaaattattggaattttaaacttttgttcttgctgggttatttattttgattttagcattaaatgtcatctcaggatatctctaaaaggggttgtttaattcctaattgtatagaaagctagtttggtgaattgtattggttaattgactgtttaaggccttaacaggtgaatctagagcctacttttattttggttaaagaaaaagaaaatatcaataattcaattttgtgtcttttctcaatttattagcaaacacaagacattttatgtattatttcgatttacttcctaattataaaagctgcttttttgcagaacattccttgaaaatataaggttttgaaaagacataattttacttgaatctttgtggggtacaggttgatctttatattttactggttgttttaaaaattctagaaaagagatttctaggcctcatgtataaccagggttttgaggataaagaactgtatttttagaactatctcatcatagcatatctgctttggaataactataaataaaagatgaagttagg

SEQ ID NO: 61184 - DNA, 7188 bp, Homo sapiens
gcggcctgtgctcagtagctgtggcttctccatgcactgcctcgttagcatcttttgcccatttctctttgacttgcaaatctttttccatccttttagagttctttgttattcttggtgcttaccctctgtcagacttcagagtaacaaccgtcttctcccctctcgcagctcgcccctgagttaactcaggggcgagctgccagaattcaacaagttctacagagactgctcatgttttaacggccacactttttcagacgttacctcttcaacagacggaagcccaagccacgtcggcctcaagccagccgagctcccaggcggtgagcgacgtcatccagcagctcctggagctctcagagccggcgccggtggagtcggggcagtccccgcagcctgggcagcagctgagcatcacagtgggcatcaaccaggacattttacagcaagccttagaaaacagtgggctgtcttcaattccagctgcagcacatcctaatgactcctgccatgccaagacctctgcaccacacgctcaaaacccagatgtttccagcgtttcaaatgagcagacggaccccacagacgcagagcaagaaaaagaacaggaaagcccggagaaactggataaaaaagaaaaaaaaatgataaagaagaagtcaccgtttctacctggctccatccgcgaggagaacggcgtgcgctggcatgtgtgtccctactgcgccaaggagttccgcaagcccagcgacctggtccgccacatccgcatccacacccacgagaagcccttcaagtgcccgcagtgcttccgcgccttcgccgtgaagagcacgctgacagcgcacatcaagacgcacaccggcatcaaggcgttcaagtgccagtactgcatgaagagcttctccacctctggcagcctcaaggtgcacattcgcctgcacacaggagttagaccttttgcttgtcctcactgtgacaaaaaatttcgaacctcaggccataggaagactcacattgcttcccactttaaacatacggaattaaggaaaatgaggcaccagcgtaaacctgcaaaggtccgtgttggcaagacgaatgttccagtccctgatattcctttgcaggaaccaatcctcataactgacttaggtctcatccagcccattccaaaaaaccagtttttccaaagctatttcaataataattttgtcaatgaagcagatagaccatacaagtgtttttactgtcatcgtgcatataaaaaatcttgccaccttaaacaacacatcagatcccatacaggtgaaaaaccttttaaatgttctcagtgtggaagaggctttgtttctgcaggcgtgctcaaagcacacatcagaacacacacaggactgaaatctttcaagtgtctgatatgtaatggggctttcactactggtggcagcttacggcgacacatgggtatccacaacgaccttcgtccctatatgtgtccctattgccaaaaaacatttaagacttcactaaattgcaaaaagcacatgaaaacccacagatatgagcttgcccagcagctccaacagcatcagcaggcagcctcgatagatgacagcactgtagaccagcagagcatgcaggcctccactcaaatgcaggtggagatcgagagcgacgagctgccgcagacggcagaggtggtcgcagcgaaccccgaggccatgctggacctggagcctcagcatgtggtgggcacggaggaagcagggctgggccagcagttggcagatcagcccctggaagcagatgaagatgggtttgtggctccacaggaccctctgcgagggcacgtagaccagtttgaagagcagagccctgcgcaacagtccttcgaaccagcagggctaccccaaggttttacagtgactgatacgtaccatcagcagcctcagtttccacctgtccaacagctacaggattccagcacacttgagtctcaggccctctccacaagcttccaccagcagagcttgctgcaggctcccagctctgatgggatgaatgtaacaactcgcttgattcaggagtcatcccaagaggaactggacctgcaggcacaaggttcccagtttctggaggacaacgaggaccagagcaggcgctcttacaggtgtgactattgcaacaaaggctttaagaagtccagccacctgaagcagcatgtgcggtcgcacaccggggaaaagccctacaagtgcaagctctgtggacgcggctttgtttcctctggggtcctcaagtcccacgagaagacacacacaggagtgaaggcgttcagctgcagtgtgtgcaatgcttccttcaccaccaatggcagcctcacccggcacatggccacacatatgagcatgaagccttataagtgtccgttttgtgaggagggtttccgaactacagtgcattgtaaaaagcacatgaagagacaccaaacagtcccctctgctgtgtcagccactggagagacagaaggaggagacatttgtatggaggaagaggaagaacattctgacagaaatgcatcacggaagtctcgtcctgaggtcatcactttcacggaggaggagacagcccagttagccaagatccggccgcaggagagcgccacggtgtcagagaaggtcctggtgcagtccgcggcagaaaaggaccgcatcagtgagctgagggacaagcaggcggagctgcaggacgagcccaagcacgccaactgctgcacatactgccccaagagcttcaagaaacctagcgacctggtgaggcatgttcgaatccatactggagaaaagccatacaaatgtgatgaatgtggaaagagttttactgtgaaatccactctcgattgtcatgtgaagactcacacaggtcagaagctcttcagctgtcacgtctgcagcaacgccttctccacgaagggaagtctgaaggtccacatgcgcctgcacacgggagccaagcccttcaaatgcccgcattgcgagctgcgtttccgtacctcgggtagaagaaagacacacatgcagtttcattataaaccagacccaaagaaggccagaaagcctatgactcgaagctcatcggaaggactgcagcctgtaaacctcctcaactcctcctctactgacccaaacgtgtttatcatgaacaactctgttctaacaggacagtttgatcagaatctgctgcaaccaggactggtgggccaagctattctccctgcctctgtgtcagctgggggtgacctgaccgtgtctctgacagatgggagcctggctaccctagaaggcatccagttacagttggctgctaacttggttggaccaaatgtacagatttctggaatcgatgctgccagcattaataacattacgttgcagattgatccaagcattctgcagcagacgctacagcagggcaacctattggctcagcagctcacgggggagcctggcctggccccacagaacagctctctccagacatcggacagcacggtccctgccagtgttgtcatccagcccatctcaggcctgtccttacagcccacagtgacctctgcgaacctgaccataggcccgctgtctgagcaggattcagtgctgaccactaacagcagtgggacccaagacctcactcaagtgatgacttcgcaaggtctagtgtccccctccggcggtccccacgagatcaccctgaccattaacaactccagcctgagccaggtcctggcacaggccgctgggcccactgccacgtcttcctcggggtctccacaggaaattaccctgactatctccgaacttaacactacaagcggaagccttccttcaacaacaccgacgtctccatcggccatctcgactcagaacctggtcatgtcctcgtcgggcgtgggaggtgacgctagtgtcacgctgacgctggccgatactcagggtatgctatctggaggcctggacactgtcacactcaacatcacctctcagggtcagcagttcccagcgctcctcacggatccctctctctcgggccagggtggagcaggctcgccgcaagtcatactagtgagccacacgccacagtcagcgtctgctgcttgtgaagaaatagcctaccaggtagctggcgtctctgggaacctggccccgggcaaccagccagagaaggagggccgggcgcaccagtgcctggagtgtgaccgcgccttctcatcggcggcggtgctcatgcaccacagcaaggaggtgcatggccgggagcgcatccacggctgccccgtgtgcaggaaggccttcaagcgcgccacgcacctcaaggagcacatgcagacacaccaggccggcccctctttgagctcccagaagccaagagtgtttaaatgtgacacttgtgagaaggcatttgccaaaccaagccagctggagcgccacagccgcatacacacaggggagcggccgttccattgcacgctttgtgagaaagccttcaaccagaagagtgcgctgcaggtgcacatgaagaagcacacgggggagcggccctacaagtgtgcctactgcgtcatgggcttcacgcagaagagcaacatgaagctgcacatgaagcgggcgcacagctatgctggagctctgcaggagtctgcaggtcacccggagcaggatggggaggagctgagccggaccctccacctggaggaggtggtgcaggaggctgccggcgagtggcaggccctcacccacgtcttctgatgcgagttggaagtacacctttaagaatgtttctgaagttacgttttgtgaagagcaaagcacttggaatctctgttttaaagcttcaagtgttaaaaatgctacaatagttttttatctataaaattatctaaagaatcattgtctttcagagactcataggaaaaaaaaactgggaaaagtgtcaccgcattgttctcttttgtctacaaatcactgaactcaggtactactgtaggcagtttcctcctcagtctcctccgtggctagtgtgtctagttcacgaagcaattaactgggtcttactatcattgtagtgtgatttctttgtattagcaaagacaaaaacgctaacatggaaaaagtatgtcagattttccttcatgtttctggttataagaagcatagcttacaaagcaagcgtaagattgaggcatgaagttcagaaaaaaaagtgttataacacacagggaagttttttccactcttttctctgtgcattttgaaaattagtcaaaatggactcttttcagtctaccataagttaatataactgataccttgagagatggctggaccaattctctccatgacatgtttaatcattagttacaagaatgcagtatctggggcgtcaacatggggactcgagtaaacctgacccaccaataaggattcagctgtccacacgggctggcgacacacttaccgcatcaatctgtgttcaggtccagggttacataattgcagaagcacaagccatacatcgcaggtaggaaaccacagaaccgtctgcaaggagcaagcaacggtggccctgtccaccccagcaaataagaagcatatctgtagcttaaggccacgaatccgtaaaaaccccatgactttctcttcgtgcataaacagatgtatttttgatttcagggaattctttagtatcgtcaatggtgccacataaaacatgtcccaaaccaaatcccacccgtgctgggcagagtgcgtgcacgccattcctacagcattccaaagatggaaggttctttacttcatgttaatttttcctttgaaattatttatatgttctatatataaatacatatgtacatagatatatgggcctctgtgtggctgaacagtatattttgtaaatataagtactagtcctaattgcagaaagagcgtcagtttcacctccccacgagcacttcagatcagtattgtattcattttattcataaatggatatctttttcattgtcatataaagctgggttttatttttttttcctgaaaaataattgcctttattttctctcgttgcctccttggtttcagaagagagtagttttattataaatattgtatggactttgtatattaagagaggagctcatttcagattcctaaagaaatagacattttactgttattttgaaagggcatcttttgatttttttgttgttgttgttcacttttggcatatgtatataagtaatattgacggtgatatgaaaacttttgttatgtgaagatatttaagtcagaaaattgttaaataatattacttcttttccaaactgctttgtgtattgtatatttttttaagaaaaagaaaagccttatttgacttatgcttgtgatactggacttcttaccaatccggaggtttccttccttgaatgtcagtgtgtaaacctggctgtagccgcatatgcagaataactgtaattgtgctagagttttaaaggttctgcttttaatgcactttttattttataattttgtattgaaatattttagaaatgttgattaattttggtgaaaaaatatccccaaagtggaaattattggaattttaaacttttgttcttgctgggttatttattttgattttagcattaaatgtcatctcaggatatctctaaaaggggttgtttaattcctaattgtatagaaagctagtttggtgaattgtattggttaattgactgtttaaggccttaacaggtgaatctagagcctacttttattttggttaaagaaaaagaaaatatcaataattcaattttgtgtcttttctcaatttattagcaaacacaagacattttatgtattatttcgatttacttcctaattataaaagctgcttttttgcagaacattccttgaaaatataaggttttgaaaagacataattttacttgaatctttgtggggtacaggttgatctttatattttactggttgttttaaaaattctagaaaagagatttctaggcctcatgtataaccagggttttgaggataaagaactgtatttttagaactatctcatcatagcatatctgctttggaataactataaataaaagatgaagttagg

SEQ ID NO: 61185 - DNA, 3395 bp, Homo sapiens
cacatggtttaagaagcatcattatggcttttgtgtgttttggtgtgtgtggctgtgaagcctcaggaatttagtttaagcttctgaaaagcccaccaatatgtatttagaattctgttgtcccatatcttagtcatctcaatgtttctcatttctaactttaaaacatgtcaattaaaaaaattcagtatatcattaatttcgtctaaaatgtcacataaatctctgacataatttggtttttaaacaataaccaataatttggttttatttatgtgatgagaataacaactggtatttattgtctatacttatgcaattttatagatggagttttaacattgaatgcggagaacactaattatgcctatcaagttccaaacttccataaatgtgaaatctgtctactatcttttccaaaagaatcccagtttcaacgccacatgagggatcacgagcgaaatgacaagccacatcgatgtgaccagtgcccccaaacatttaatgttgaattcaacctgacacttcataaatgcacccacagcggggaagatcctacctgccctgtgtgtaacaagaaattctccagagtggctagtctcaaagcgcatattatgctacatgaaaaggaagagaatctcatctgttctgagtgtggggatgagtttactctgcagagtcagctggccgtgcacatggaggagcaccgccaggagctggctggaacccggcagcatgcctgcaaggcctgcaagaaagagttcgagacctcctcggagctgaaggaacacatgaagactcattacaaaattagggtatcaagtacaaggtcttataaccggaatatcgacagaagtggattcacgtattcgtgtccgcactgtggaaagacgtttcaaaagccaagccagttaacgcgacacattaggatacacacaggtgaaaggccgttcaaatgtagtgaatgtggaaaggcttttaaccagaagggggcactgcagacccacatgatcaagcacacaggtgaaaaaccccatgcctgtgccttctgtcctgccgccttctctcagaaagggaatcttcagtcgcacgtgcagcgagtccactcagaggtcaagaatggtcctacctataactgtacagaatgtagttgtgtatttaaaagtttaggcagcttaaacacgcatatcagcaagatgcatatgggtgggccacagaattcaacaagttctacagagactgctcatgttttaacggccacactttttcagacgttacctcttcaacagacggaagcccaagccacgtcggcctcaagccagccgagctcccaggcggtgagcgacgtcatccagcagctcctggagctctcagagccggcgccggtggagtcggggcagtccccgcagcctgggcagcagctgagcatcacagtgggcatcaaccaggacattttacagcaagccttagaaaacagtgggctgtcttcaattccagctgcagcacatcctaatgactcctgccatgccaagacctctgcaccacacgctcaaaacccagatgtttccagcgtttcaaatgagcagacggaccccacagacgcagagcaagaaaaagaacaggaaagcccggagaaactggataaaaaagaaaaaaaaatgataaagaagaagtcaccgtttctacctggctccatccgcgaggagaacggcgtgcgctggcatgtgtgtccctactgcgccaaggagttccgcaagcccagcgacctggtccgccacatccgcatccacacccacgagaagcccttcaagtgcccgcagtgcttccgcgccttcgccgtgaagagcacgctgacagcgcacatcaagacgcacaccggcatcaaggcgttcaagtgccagtactgcatgaagagcttctccacctctggcagcctcaaggtgcacattcgcctgcacacaggagttagaccttttgcttgtcctcactgtgacaaaaaatttcgaacctcaggccataggaagactcacattgcttcccactttaaacatacggaattaaggaaaatgaggcaccagcgtaaacctgcaaaggtccgtgttggcaagacgaatgttccagtccctgatattcctttgcaggaaccaatcctcataactgacttaggtctcatccagcccattccaaaaaaccagtttttccaaagctatttcaataataattttgtcaatgaagcagatagaccatacaagtgtttttactgtcatcgtgcatataaaaaatcttgccaccttaaacaacacatcagatcccatacaggtgaaaaaccttttaaatgttctcagtgtggaagaggctttgtttctgcaggcgtgctcaaagcacacatcagaacacacacaggactgaaatctttcaagtgtctgatatgtaatggggctttcactactggtggcagcttacggcgacacatgggtatccacaacgaccttcgtccctatatgtgtccctattgccaaaaaacatttaagacttcactaaattgcaaaaagcacatgaaaacccacagatatgagcttgcccagcagctccaacagcatcagcaggcagcctcgatagatgacagcactgtagaccagcagagcatgcaggcctccactcaaatgcaggtggagatcgagagcgacgagctgccgcagacggcagaggtggtcgcagcgaaccccgaggccatgctggacctggagcctcagcatgtggtgggcacggaggaagcagggctgggccagcagttggcagatcagcccctggaagcagatgaagatgggtttgtggctccacaggaccctctgcgagggcacgtagaccagtttgaagagcagagccctgcgcaacagtccttcgaaccagcagggctaccccaaggttttacagtgactgatacgtaccatcagcagcctcagtttccacctgtccaacagctacaggattccagcacacttgagtctcaggccctctccacaagcttccaccagcagagcttgctgcaggctcccagctctgatgggatgaatgtaacaactcgcttgattcaggagtcatcccaagaggaactggacctgcaggcacaaggttcccagtttctggaggacaacgaggaccagagcaggcgctcttacaggtgtgactattgcaacaaaggctttaagaagtccagccacctgaagcagcatgtgcggtcgcacaccggggaaaagccctacaagtgcaagctctgtggacgcggctttgtttcctctggggtcctcaagtcccacgagaagacacacacaggctataattgatgatgatgttcagataactgaagacacaataaatgacattcagacatcaga

SEQ ID NO: 61186 - DNA, 2054 bp, Homo sapiens
cacatggtttaagaagcatcattatggcttttgtgtgttttggtgtgtgtggctgtgaagcctcaggaatttagtttaagcttctgaaaagcccaccaatatgtatttagaattctgttgtcccatatcttagtcatctcaatgtttctcatttctaactttaaaacatgtcaattaaaaaaattcagtatatcattaatttcgtctaaaatgtcacataaatctctgacataatttggtttttaaacaataaccaataatttggttttatttatgtgatgagaataacaactggtatttattgtctatacttatgcaattttatagatggagttttaacattgaatgcggagaacactaattatgcctatcaagttccaaacttccataaatgtgaaatctgtctactatcttttccaaaagaatcccagtttcaacgccacatgagggatcacgagcgaaatgacaagccacatcgatgtgaccagtgcccccaaacatttaatgttgaattcaacctgacacttcataaatgcacccacagcggggaagatcctacctgccctgtgtgtaacaagaaattctccagagtggctagtctcaaagcgcatattatgctacatgaaaaggaagagaatctcatctgttctgagtgtggggatgagtttactctgcagagtcagctggccgtgcacatggaggagcaccgccaggagctggctggaacccggcagcatgcctgcaaggcctgcaagaaagagttcgagacctcctcggagctgaaggaacacatgaagactcattacaaaattagggtatcaagtacaaggtcttataaccggaatatcgacagaagtggattcacgtattcgtgtccgcactgtggaaagacgtttcaaaagccaagccagttaacgcgacacattaggatacacacaggtgaaaggccgttcaaatgtagtgaatgtggaaaggcttttaaccagaagggggcactgcagacccacatgatcaagcacacaggtgaaaaaccccatgcctgtgccttctgtcctgccgccttctctcagaaagggaatcttcagtcgcacgtgcagcgagtccactcagaggtcaagaatggtcctacctataactgtacagaatgtagttgtgtatttaaaagtttaggcagcttaaacacgcatatcagcaagatgcatatgggtgggccacagaattcaacaagttctacagagactgctcatgttttaacggccacactttttcagacgttacctcttcaacagacggaagcccaagccacgtcggcctcaagccagccgagctcccaggcggtgagcgacgtcatccagcagctcctggagctctcagagccggcgccggtggagtcggggcagtccccgcagcctgggcagcagctgagcatcacagtgggcatcaaccaggacattttacagcaagccttagaaaacagtgggctgtcttcaattccagctgcagcacatcctaatgactcctgccatgccaagacctctgcaccacacgctcaaaacccagatgtttccagcgtttcaaatgagcagacggaccccacagacgcagagcaagaaaaagaacaggaaagcccggagaaactggataaaaaagaaaaaaaaatgataaagaagaagtcaccgtttctacctggctccatccgcgaggagaacggcgtgcgctggcatgtgtgtccctactgcgccaaggagttccgcaagcccagcgacctggtccgccacatccgcatccacacccacgagaagcccttcaagtgcccgcagtgcttccgcgccttcgccgtgaagagcacgctgacagcgcacatcaagacgcacaccggcatcaaggcgttcaagtgccagtactgcatgaagagcttctccacctctggcagcctcaaggtgcacattcgcctgcacacaggtatggcctcagggctgggcccacacgggcactggccacgggggccacacacattactgcgcacatataccaaacacaggtatggcacacag

SEQ ID NO: 61187 - DNA, 1121 bp, Homo sapiens
agaggaactctcatacactaagcaacatgatagtatcacgagcgaagtgacaagccacatcgatgtgaccagtgcccccaaacatttaatgttgaattcaacctgacacttcataaatgcacccacagcggggaagatcctacctgccctgtgtgtaacaagaaattctccagagtggctagtctcaaagcgcatattatgctacatgaaaaggaagagaatctcatctgttctgagtgtggggatgagtttactctgcagagtcagctggccgtgcacatggaggagcaccgccaggagctggctggaacccggcagcatgcctgcaaggcctgcaagaaagagttcgagacctcctcggagctgaaggaacacatgaagactcattacaaaattaggtgaaaggccgttcaaatgtagtgaatgtggaaaggcttttaaccagaagggggcactgcagacccacatgatcaagcacacaggtgaaaaaccccatgcctgtgccttctgtcctgccgccttctctcagaaagggaatcttcagtcgcacgtgcagcgagtccactcagaggtcaagaatggtcctacctataactgtacagaatgtagttgtgtatttaaaagtttaggcagcttaaacacgcatatcagcaagatgcatatgggtgggccacagaattcaacaagttctacagagactgctcatgttttaacggccacactttttcagacgttacctcttcaacagacggaagcccaagccacgtcggcctcaagccagccgagctcccaggcggtgagcgacgtcatccagcagctcctggagctctcagagccggcgccggtggagtcggggcagtccccgcagcctgggcagcagctgagcatcacagtgggcatcaaccaggacattttacagctgcagcacatcctaatgactcctgccatgccaagacctctgcaccacacgctcaaaacccagatgtttccagcgtttcaaatgagcagacggaccccacagacgcagagcaagaaaaagaacaggaaagcccggagaaactggataaaaatagagtcaccgtttctacctggctccatccgcgaggagaacgtgtgtgtct

SEQ ID NO: 61188 - DNA, 370 bp, Homo sapiens
ctccggcggtccccacgagatcaccctgaccattaacaactccagcctgagccaggtcctggcacaggccgctgggcccactgccacgtcttcctcggggtctccacaggaaattaccctgactatctccggttagtaagttataattttaaacatcttttcaccctgcaatttaagtactgtatatcttactatctcttttcctacaatactctgctgtgcataaagcccgtgctcaatatgtatttataatttatgggagaaattgaagtttagtgaaaataatgtattctaattcagatctggcaccagaaatgaaaaattatagtttctcatgtcacttccagtttgagtacagtcagttatttaa

SEQ ID NO: 61189 - DNA, 8219 bp, Homo sapiens
cttagtgactcaagtgttccccttttcttggggatgagtaaactgaggctcattaaagagcttgtgaccaaacaacacaggtgccccagagaaaggtcgggcctggaaactacaaaggattgtgttaattttgtgtttaggaagaaagaggtaatgggtaggaatcaatgtaaacttattcataggccacaccaaaccaggaattcttgtcgtgattgcacttggtagagttaacacacgtgcacattacggaaacgttggtgaccaacaggcgtttcagcgagctttcgcacacctcatgggcctttgtgggctgctggagagatgttggctgcaccatgacccagatggagttttaacattgaatgcggagaacactaattatgcctatcaagttccaaacttccataaatgtgaaatctgtctactatcttttccaaaagaatcccagtttcaacgccacatgagggatcacgagcgaaatgacaagccacatcgatgtgaccagtgcccccaaacatttaatgttgaattcaacctgacacttcataaatgcacccacagcggggaagatcctacctgccctgtgtgtaacaagaaattctccagagtggctagtctcaaagcgcatattatgctacatgaaaaggaagagaatctcatctgttctgagtgtggggatgagtttactctgcagagtcagctggccgtgcacatggaggagcaccgccaggagctggctggaacccggcagcatgcctgcaaggcctgcaagaaagagttcgagacctcctcggagctgaaggaacacatgaagactcattacaaaattagggtatcaagtacaaggtcttataaccggaatatcgacagaagtggattcacgtattcgtgtccgcactgtggaaagacgtttcaaaagccaagccagttaacgcgacacattaggatacacacaggtgaaaggccgttcaaatgtagtgaatgtggaaaggcttttaaccagaagggggcactgcagacccacatgatcaagcacacaggtgaaaaaccccatgcctgtgccttctgtcctgccgccttctctcagaaagggaatcttcagtcgcacgtgcagcgagtccactcagaggtcaagaatggtcctacctataactgtacagaatgtagttgtgtatttaaaagtttaggcagcttaaacacgcatatcagcaagatgcatatgggtgggccacagaattcaacaagttctacagagactgctcatgttttaacggccacactttttcagacgttacctcttcaacagacggaagcccaagccacgtcggcctcaagccagccgagctcccaggcggtgagcgacgtcatccagcagctcctggagctctcagagccggcgccggtggagtcggggcagtccccgcagcctgggcagcagctgagcatcacagtgggcatcaaccaggacattttacagcaagccttagaaaacagtgggctgtcttcaattccagctgcagcacatcctaatgactcctgccatgccaagacctctgcaccacacgctcaaaacccagatgtttccagcgtttcaaatgagcagacggaccccacagacgcagagcaagaaaaagaacaggaaagcccggagaaactggataaaaaagaaaaaaaaatgataaagaagaagtcaccgtttctacctggctccatccgcgaggagaacggcgtgcgctggcatgtgtgtccctactgcgccaaggagttccgcaagcccagcgacctggtccgccacatccgcatccacacccacgagaagcccttcaagtgcccgcagtgcttccgcgccttcgccgtgaagagcacgctgacagcgcacatcaagacgcacaccggcatcaaggcgttcaagtgccagtactgcatgaagagcttctccacctctggcagcctcaaggtgcacattcgcctgcacacaggagttagaccttttgcttgtcctcactgtgacaaaaaatttcgaacctcaggccataggaagactcacattgcttcccactttaaacatacggaattaaggaaaatgaggcaccagcgtaaacctgcaaaggtccgtgttggcaagacgaatgttccagtccctgatattcctttgcaggaaccaatcctcataactgacttaggtctcatccagcccattccaaaaaaccagtttttccaaagctatttcaataataattttgtcaatgaagcagatagaccatacaagtgtttttactgtcatcgtgcatataaaaaatcttgccaccttaaacaacacatcagatcccatacaggtgaaaaaccttttaaatgttctcagtgtggaagaggctttgtttctgcaggcgtgctcaaagcacacatcagaacacacacaggactgaaatctttcaagtgtctgatatgtaatggggctttcactactggtggcagcttacggcgacacatgggtatccacaacgaccttcgtccctatatgtgtccctattgccaaaaaacatttaagacttcactaaattgcaaaaagcacatgaaaacccacagatatgagcttgcccagcagctccaacagcatcagcaggcagcctcgatagatgacagcactgtagaccagcagagcatgcaggcctccactcaaatgcaggtggagatcgagagcgacgagctgccgcagacggcagaggtggtcgcagcgaaccccgaggccatgctggacctggagcctcagcatgtggtgggcacggaggaagcagggctgggccagcagttggcagatcagcccctggaagcagatgaagatgggtttgtggctccacaggaccctctgcgagggcacgtagaccagtttgaagagcagagccctgcgcaacagtccttcgaaccagcagggctaccccaaggttttacagtgactgatacgtaccatcagcagcctcagtttccacctgtccaacagctacaggattccagcacacttgagtctcaggccctctccacaagcttccaccagcagagcttgctgcaggctcccagctctgatgggatgaatgtaacaactcgcttgattcaggagtcatcccaagaggaactggacctgcaggcacaaggttcccagtttctggaggacaacgaggaccagagcaggcgctcttacaggtgtgactattgcaacaaaggctttaagaagtccagccacctgaagcagcatgtgcggtcgcacaccggggaaaagccctacaagtgcaagctctgtggacgcggctttgtttcctctggggtcctcaagtcccacgagaagacacacacaggagtgaaggcgttcagctgcagtgtgtgcaatgcttccttcaccaccaatggcagcctcacccggcacatggccacacatatgagcatgaagccttataagtgtccgttttgtgaggagggtttccgaactacagtgcattgtaaaaagcacatgaagagacaccaaacagtcccctctgctgtgtcagccactggagagacagaaggaggagacatttgtatggaggaagaggaagaacattctgacagaaatgcatcacggaagtctcgtcctgaggtcatcactttcacggaggaggagacagcccagttagccaagatccggccgcaggagagcgccacggtgtcagagaaggtcctggtgcagtccgcggcagaaaaggaccgcatcagtgagctgagggacaagcaggcggagctgcaggacgagcccaagcacgccaactgctgcacatactgccccaagagcttcaagaaacctagcgacctggtgaggcatgttcgaatccatactggagaaaagccatacaaatgtgatgaatgtggaaagagttttactgtgaaatccactctcgattgtcatgtgaagactcacacaggtcagaagctcttcagctgtcacgtctgcagcaacgccttctccacgaagggaagtctgaaggtccacatgcgcctgcacacgggagccaagcccttcaaatgcccgcattgcgagctgcgtttccgtacctcgggtagaagaaagacacacatgcagtttcattataaaccagacccaaagaaggccagaaagcctatgactcgaagctcatcggaaggactgcagcctgtaaacctcctcaactcctcctctactgacccaaacgtgtttatcatgaacaactctgttctaacaggacagtttgatcagaatctgctgcaaccaggactggtgggccaagctattctccctgcctctgtgtcagctgggggtgacctgaccgtgtctctgacagatgggagcctggctaccctagaaggcatccagttacagttggctgctaacttggttggaccaaatgtacagatttctggaatcgatgctgccagcattaataacattacgttgcagattgatccaagcattctgcagcagacgctacagcagggcaacctattggctcagcagctcacgggggagcctggcctggccccacagaacagctctctccagacatcggacagcacggtccctgccagtgttgtcatccagcccatctcaggcctgtccttacagcccacagtgacctctgcgaacctgaccataggcccgctgtctgagcaggattcagtgctgaccactaacagcagtgggacccaagacctcactcaagtgatgacttcgcaaggtctagtgtccccctccggcggtccccacgagatcaccctgaccattaacaactccagcctgagccaggtcctggcacaggccgctgggcccactgccacgtcttcctcggggtctccacaggaaattaccctgactatctccgaacttaacactacaagcggaagccttccttcaacaacaccgacgtctccatcggccatctcgactcagaacctggtcatgtcctcgtcgggcgtgggaggtgacgctagtgtcacgctgacgctggccgatactcagggtatgctatctggaggcctggacactgtcacactcaacatcacctctcagggtcagcagttcccagcgctcctcacggatccctctctctcgggccagggtggagcaggctcgccgcaagtcatactagtgagccacacgccacagtcagcgtctgctgcttgtgaagaaatagcctaccaggtagctggcgtctctgggaacctggccccgggcaaccagccagagaaggagggccgggcgcaccagtgcctggagtgtgaccgcgccttctcatcggcggcggtgctcatgcaccacagcaaggaggtgcatggccgggagcgcatccacggctgccccgtgtgcaggaaggccttcaagcgcgccacgcacctcaaggagcacatgcagacacaccaggccggcccctctttgagctcccagaagccaagagtgtttaaatgtgacacttgtgagaaggcatttgccaaaccaagccagctggagcgccacagccgcatacacacaggggagcggccgttccattgcacgctttgtgagaaagccttcaaccagaagagtgcgctgcaggtgcacatgaagaagcacacgggggagcggccctacaagtgtgcctactgcgtcatgggcttcacgcagaagagcaacatgaagctgcacatgaagcgggcgcacagctatgctggagctctgcaggagtctgcaggtcacccggagcaggatggggaggagctgagccggaccctccacctggaggaggtggtgcaggaggctgccggcgagtggcaggccctcacccacgtcttctgatgcgagttggaagtacacctttaagaatgtttctgaagttacgttttgtgaagagcaaagcacttggaatctctgttttaaagcttcaagtgttaaaaatgctacaatagttttttatctataaaattatctaaagaatcattgtctttcagagactcataggaaaaaaaaactgggaaaagtgtcaccgcattgttctcttttgtctacaaatcactgaactcaggtactactgtaggcagtttcctcctcagtctcctccgtggctagtgtgtctagttcacgaagcaattaactgggtcttactatcattgtagtgtgatttctttgtattagcaaagacaaaaacgctaacatggaaaaagtatgtcagattttccttcatgtttctggttataagaagcatagcttacaaagcaagcgtaagattgaggcatgaagttcagaaaaaaaagtgttataacacacagggaagttttttccactcttttctctgtgcattttgaaaattagtcaaaatggactcttttcagtctaccataagttaatataactgataccttgagagatggctggaccaattctctccatgacatgtttaatcattagttacaagaatgcagtatctggggcgtcaacatggggactcgagtaaacctgacccaccaataaggattcagctgtccacacgggctggcgacacacttaccgcatcaatctgtgttcaggtccagggttacataattgcagaagcacaagccatacatcgcaggtaggaaaccacagaaccgtctgcaaggagcaagcaacggtggccctgtccaccccagcaaataagaagcatatctgtagcttaaggccacgaatccgtaaaaaccccatgactttctcttcgtgcataaacagatgtatttttgatttcagggaattctttagtatcgtcaatggtgccacataaaacatgtcccaaaccaaatcccacccgtgctgggcagagtgcgtgcacgccattcctacagcattccaaagatggaaggttctttacttcatgttaatttttcctttgaaattatttatatgttctatatataaatacatatgtacatagatatatgggcctctgtgtggctgaacagtatattttgtaaatataagtactagtcctaattgcagaaagagcgtcagtttcacctccccacgagcacttcagatcagtattgtattcattttattcataaatggatatctttttcattgtcatataaagctgggttttatttttttttcctgaaaaataattgcctttattttctctcgttgcctccttggtttcagaagagagtagttttattataaatattgtatggactttgtatattaagagaggagctcatttcagattcctaaagaaatagacattttactgttattttgaaagggcatcttttgatttttttgttgttgttgttcacttttggcatatgtatataagtaatattgacggtgatatgaaaacttttgttatgtgaagatatttaagtcagaaaattgttaaataatattacttcttttccaaactgctttgtgtattgtatatttttttaagaaaaagaaaagccttatttgacttatgcttgtgatactggacttcttaccaatccggaggtttccttccttgaatgtcagtgtgtaaacctggctgtagccgcatatgcagaataactgtaattgtgctagagttttaaaggttctgcttttaatgcactttttattttataattttgtattgaaatattttagaaatgttgattaattttggtgaaaaaatatccccaaagtggaaattattggaattttaaacttttgttcttgctgggttatttattttgattttagcattaaatgtcatctcaggatatctctaaaaggggttgtttaattcctaattgtatagaaagctagtttggtgaattgtattggttaattgactgtttaaggccttaacaggtgaatctagagcctacttttattttggttaaagaaaaagaaaatatcaataattcaattttgtgtcttttctcaatttattagcaaacacaagacattttatgtattatttcgatttacttcctaattataaaagctgcttttttgcagaacattccttgaaaatataaggttttgaaaagacataattttacttgaatctttgtggggtacaggttgatctttatattttactggttgttttaaaaattctagaaaagagatttctaggcctcatgtataaccagggttttgaggataaagaactgtatttttagaactatctcatcatagcatatctgctttggaataactataaataaaagatgaagttagg

SEQ ID NO: 61190 - DNA, 8340 bp, Homo sapiens
cacatggtttaagaagcatcattatggcttttgtgtgttttggtgtgtgtggctgtgaagcctcaggaatttagtttaagcttctgaaaagcccaccaatatgtatttagaattctgttgtcccatatcttagtcatctcaatgtttctcatttctaactttaaaacatgtcaattaaaaaaattcagtatatcattaatttcgtctaaaatgtcacataaatctctgacataatttggtttttaaacaataaccaataatttggttttatttatgtgatgagaataacaactggtatttattgtctatacttatgcaattttatagatggagttttaacattgaatgcggagaacactaattatgcctatcaagttccaaacttccataaatgtgaaatctgtctactatcttttccaaaagaatcccagtttcaacgccacatgagggatcacgagcgaaatgacaagccacatcgatgtgaccagtgcccccaaacatttaatgttgaattcaacctgacacttcataaatgcacccacagcggggaagatcctacctgccctgtgtgtaacaagaaattctccagagtggctagtctcaaagcgcatattatgctacatgaaaaggaagagaatctcatctgttctgagtgtggggatgagtttactctgcagagtcagctggccgtgcacatggaggagcaccgccaggagctggctggaacccggcagcatgcctgcaaggcctgcaagaaagagttcgagacctcctcggagctgaaggaacacatgaagactcattacaaaattagggtatcaagtacaaggtcttataaccggaatatcgacagaagtggattcacgtattcgtgtccgcactgtggaaagacgtttcaaaagccaagccagttaacgcgacacattaggatacacacaggtgaaaggccgttcaaatgtagtgaatgtggaaaggcttttaaccagaagggggcactgcagacccacatgatcaagcacacaggtgaaaaaccccatgcctgtgccttctgtcctgccgccttctctcagaaagggaatcttcagtcgcacgtgcagcgagtccactcagaggtcaagaatggtcctacctataactgtacagaatgtagttgtgtatttaaaagtttaggcagcttaaacacgcatatcagcaagatgcatatgggtgggccacagaattcaacaagttctacagagactgctcatgttttaacggccacactttttcagacgttacctcttcaacagacggaagcccaagccacgtcggcctcaagccagccgagctcccaggcggtgagcgacgtcatccagcagctcctggagctctcagagccggcgccggtggagtcggggcagtccccgcagcctgggcagcagctgagcatcacagtgggcatcaaccaggacattttacagcaagccttagaaaacagtgggctgtcttcaattccagctgcagcacatcctaatgactcctgccatgccaagacctctgcaccacacgctcaaaacccagatgtttccagcgtttcaaatgagcagacggaccccacagacgcagagcaagaaaaagaacaggaaagcccggagaaactggataaaaaagaaaaaaaaatgataaagaagaagtcaccgtttctacctggctccatccgcgaggagaacggcgtgcgctggcatgtgtgtccctactgcgccaaggagttccgcaagcccagcgacctggtccgccacatccgcatccacacccacgagaagcccttcaagtgcccgcagtgcttccgcgccttcgccgtgaagagcacgctgacagcgcacatcaagacgcacaccggcatcaaggcgttcaagtgccagtactgcatgaagagcttctccacctctggcagcctcaaggtgcacattcgcctgcacacaggagttagaccttttgcttgtcctcactgtgacaaaaaatttcgaacctcaggccataggaagactcacattgcttcccactttaaacatacggaattaaggaaaatgaggcaccagcgtaaacctgcaaaggtccgtgttggcaagacgaatgttccagtccctgatattcctttgcaggaaccaatcctcataactgacttaggtctcatccagcccattccaaaaaaccagtttttccaaagctatttcaataataattttgtcaatgaagcagatagaccatacaagtgtttttactgtcatcgtgcatataaaaaatcttgccaccttaaacaacacatcagatcccatacaggtgaaaaaccttttaaatgttctcagtgtggaagaggctttgtttctgcaggcgtgctcaaagcacacatcagaacacacacaggactgaaatctttcaagtgtctgatatgtaatggggctttcactactggtggcagcttacggcgacacatgggtatccacaacgaccttcgtccctatatgtgtccctattgccaaaaaacatttaagacttcactaaattgcaaaaagcacatgaaaacccacagatatgagcttgcccagcagctccaacagcatcagcaggcagcctcgatagatgacagcactgtagaccagcagagcatgcaggcctccactcaaatgcaggtggagatcgagagcgacgagctgccgcagacggcagaggtggtcgcagcgaaccccgaggccatgctggacctggagcctcagcatgtggtgggcacggaggaagcagggctgggccagcagttggcagatcagcccctggaagcagatgaagatgggtttgtggctccacaggaccctctgcgagggcacgtagaccagtttgaagagcagagccctgcgcaacagtccttcgaaccagcagggctaccccaaggttttacagtgactgatacgtaccatcagcagcctcagtttccacctgtccaacagctacaggattccagcacacttgagtctcaggccctctccacaagcttccaccagcagagcttgctgcaggctcccagctctgatgggatgaatgtaacaactcgcttgattcaggagtcatcccaagaggaactggacctgcaggcacaaggttcccagtttctggaggacaacgaggaccagagcaggcgctcttacaggtgtgactattgcaacaaaggctttaagaagtccagccacctgaagcagcatgtgcggtcgcacaccggggaaaagccctacaagtgcaagctctgtggacgcggctttgtttcctctggggtcctcaagtcccacgagaagacacacacaggagtgaaggcgttcagctgcagtgtgtgcaatgcttccttcaccaccaatggcagcctcacccggcacatggccacacatatgagcatgaagccttataagtgtccgttttgtgaggagggtttccgaactacagtgcattgtaaaaagcacatgaagagacaccaaacagtcccctctgctgtgtcagccactggagagacagaaggaggagacatttgtatggaggaagaggaagaacattctgacagaaatgcatcacggaagtctcgtcctgaggtcatcactttcacggaggaggagacagcccagttagccaagatccggccgcaggagagcgccacggtgtcagagaaggtcctggtgcagtccgcggcagaaaaggaccgcatcagtgagctgagggacaagcaggcggagctgcaggacgagcccaagcacgccaactgctgcacatactgccccaagagcttcaagaaacctagcgacctggtgaggcatgttcgaatccatactggagaaaagccatacaaatgtgatgaatgtggaaagagttttactgtgaaatccactctcgattgtcatgtgaagactcacacaggtcagaagctcttcagctgtcacgtctgcagcaacgccttctccacgaagggaagtctgaaggtccacatgcgcctgcacacgggagccaagcccttcaaatgcccgcattgcgagctgcgtttccgtacctcgggtagaagaaagacacacatgcagtttcattataaaccagacccaaagaaggccagaaagcctatgactcgaagctcatcggaaggactgcagcctgtaaacctcctcaactcctcctctactgacccaaacgtgtttatcatgaacaactctgttctaacaggacagtttgatcagaatctgctgcaaccaggactggtgggccaagctattctccctgcctctgtgtcagctgggggtgacctgaccgtgtctctgacagatgggagcctggctaccctagaaggcatccagttacagttggctgctaacttggttggaccaaatgtacagatttctggaatcgatgctgccagcattaataacattacgttgcagattgatccaagcattctgcagcagacgctacagcagggcaacctattggctcagcagctcacgggggagcctggcctggccccacagaacagctctctccagacatcggacagcacggtccctgccagtgttgtcatccagcccatctcaggcctgtccttacagcccacagtgacctctgcgaacctgaccataggcccgctgtctgagcaggattcagtgctgaccactaacagcagtgggacccaagacctcactcaagtgatgacttcgcaaggtctagtgtccccctccggcggtccccacgagatcaccctgaccattaacaactccagcctgagccaggtcctggcacaggccgctgggcccactgccacgtcttcctcggggtctccacaggaaattaccctgactatctccgaacttaacactacaagcggaagccttccttcaacaacaccgacgtctccatcggccatctcgactcagaacctggtcatgtcctcgtcgggcgtgggaggtgacgctagtgtcacgctgacgctggccgatactcagggtatgctatctggaggcctggacactgtcacactcaacatcacctctcagggtcagcagttcccagcgctcctcacggatccctctctctcgggccagggtggagcaggctcgccgcaagtcatactagtgagccacacgccacagtcagcgtctgctgcttgtgaagaaatagcctaccaggtagctggcgtctctgggaacctggccccgggcaaccagccagagaaggagggccgggcgcaccagtgcctggagtgtgaccgcgccttctcatcggcggcggtgctcatgcaccacagcaaggaggtgcatggccgggagcgcatccacggctgccccgtgtgcaggaaggccttcaagcgcgccacgcacctcaaggagcacatgcagacacaccaggccggcccctctttgagctcccagaagccaagagtgtttaaatgtgacacttgtgagaaggcatttgccaaaccaagccagctggagcgccacagccgcatacacacaggggagcggccgttccattgcacgctttgtgagaaagccttcaaccagaagagtgcgctgcaggtgcacatgaagaagcacacgggggagcggccctacaagtgtgcctactgcgtcatgggcttcacgcagaagagcaacatgaagctgcacatgaagcgggcgcacagctatgctggagctctgcaggagtctgcaggtcacccggagcaggatggggaggagctgagccggaccctccacctggaggaggtggtgcaggaggctgccggcgagtggcaggccctcacccacgtcttctgatgcgagttggaagtacacctttaagaatgtttctgaagttacgttttgtgaagagcaaagcacttggaatctctgttttaaagcttcaagtgttaaaaatgctacaatagttttttatctataaaattatctaaagaatcattgtctttcagagactcataggaaaaaaaaactgggaaaagtgtcaccgcattgttctcttttgtctacaaatcactgaactcaggtactactgtaggcagtttcctcctcagtctcctccgtggctagtgtgtctagttcacgaagcaattaactgggtcttactatcattgtagtgtgatttctttgtattagcaaagacaaaaacgctaacatggaaaaagtatgtcagattttccttcatgtttctggttataagaagcatagcttacaaagcaagcgtaagattgaggcatgaagttcagaaaaaaaagtgttataacacacagggaagttttttccactcttttctctgtgcattttgaaaattagtcaaaatggactcttttcagtctaccataagttaatataactgataccttgagagatggctggaccaattctctccatgacatgtttaatcattagttacaagaatgcagtatctggggcgtcaacatggggactcgagtaaacctgacccaccaataaggattcagctgtccacacgggctggcgacacacttaccgcatcaatctgtgttcaggtccagggttacataattgcagaagcacaagccatacatcgcaggtaggaaaccacagaaccgtctgcaaggagcaagcaacggtggccctgtccaccccagcaaataagaagcatatctgtagcttaaggccacgaatccgtaaaaaccccatgactttctcttcgtgcataaacagatgtatttttgatttcagggaattctttagtatcgtcaatggtgccacataaaacatgtcccaaaccaaatcccacccgtgctgggcagagtgcgtgcacgccattcctacagcattccaaagatggaaggttctttacttcatgttaatttttcctttgaaattatttatatgttctatatataaatacatatgtacatagatatatgggcctctgtgtggctgaacagtatattttgtaaatataagtactagtcctaattgcagaaagagcgtcagtttcacctccccacgagcacttcagatcagtattgtattcattttattcataaatggatatctttttcattgtcatataaagctgggttttatttttttttcctgaaaaataattgcctttattttctctcgttgcctccttggtttcagaagagagtagttttattataaatattgtatggactttgtatattaagagaggagctcatttcagattcctaaagaaatagacattttactgttattttgaaagggcatcttttgatttttttgttgttgttgttcacttttggcatatgtatataagtaatattgacggtgatatgaaaacttttgttatgtgaagatatttaagtcagaaaattgttaaataatattacttcttttccaaactgctttgtgtattgtatatttttttaagaaaaagaaaagccttatttgacttatgcttgtgatactggacttcttaccaatccggaggtttccttccttgaatgtcagtgtgtaaacctggctgtagccgcatatgcagaataactgtaattgtgctagagttttaaaggttctgcttttaatgcactttttattttataattttgtattgaaatattttagaaatgttgattaattttggtgaaaaaatatccccaaagtggaaattattggaattttaaacttttgttcttgctgggttatttattttgattttagcattaaatgtcatctcaggatatctctaaaaggggttgtttaattcctaattgtatagaaagctagtttggtgaattgtattggttaattgactgtttaaggccttaacaggtgaatctagagcctacttttattttggttaaagaaaaagaaaatatcaataattcaattttgtgtcttttctcaatttattagcaaacacaagacattttatgtattatttcgatttacttcctaattataaaagctgcttttttgcagaacattccttgaaaatataaggttttgaaaagacataattttacttgaatctttgtggggtacaggttgatctttatattttactggttgttttaaaaattctagaaaagagatttctaggcctcatgtataaccagggttttgaggataaagaactgtatttttagaactatctcatcatagcatatctgctttggaataactataaataaaagatgaagttaggaaatgtgattaatttttttcgtttgaaaatatttaagataaaacagtttggcatgtaaattaatttcaagttcagatatttttaagagaaaactttagtggtattttcctttacctctgtgaagttcagaggcgtttaccc

SEQ ID NO: 61191 - DNA, 7621 bp, Homo sapiens
agaggaactctcatacactaagcaacatgatagtatcacgagcgaagtgacaagccacatcgatgtgaccagtgcccccaaacatttaatgttgaattcaacctgacacttcataaatgcacccacagcggggaagatcctacctgccctgtgtgtaacaagaaattctccagagtggctagtctcaaagcgcatattatgctacatgaaaaggaagagaatctcatctgttctgagtgtggggatgagtttactctgcagagtcagctggccgtgcacatggaggagcaccgccaggagctggctggaacccggcagcatgcctgcaaggcctgcaagaaagagttcgagacctcctcggagctgaaggaacacatgaagactcattacaaaattaggtgaaaggccgttcaaatgtagtgaatgtggaaaggcttttaaccagaagggggcactgcagacccacatgatcaagcacacaggtgaaaaaccccatgcctgtgccttctgtcctgccgccttctctcagaaagggaatcttcagtcgcacgtgcagcgagtccactcagaggtcaagaatggtcctacctataactgtacagaatgtagttgtgtatttaaaagtttaggcagcttaaacacgcatatcagcaagatgcatatgggtgggccacagaattcaacaagttctacagagactgctcatgttttaacggccacactttttcagacgttacctcttcaacagacggaagcccaagccacgtcggcctcaagccagccgagctcccaggcggtgagcgacgtcatccagcagctcctggagctctcagagccggcgccggtggagtcggggcagtccccgcagcctgggcagcagctgagcatcacagtgggcatcaaccaggacattttacagctgcagcacatcctaatgactcctgccatgccaagacctctgcaccacacgctcaaaacccagatgtttccagcgtttcaaatgagcagacggaccccacagacgcagagcaagaaaaagaacaggaaagcccggagaaactggataaaaaagaaaaaaaaatgataaagaagaagtcaccgtttctacctggctccatccgcgaggagaacggcgtgcgctggcatgtgtgtccctactgcgccaaggagttccgcaagcccagcgacctggtccgccacatccgcatccacacccacgagaagcccttcaagtgcccgcagtgcttccgcgccttcgccgtgaagagcacgctgacagcgcacatcaagacgcacaccggcatcaaggcgttcaagtgccagtactgcatgaagagcttctccacctctggcagcctcaaggtgcacattcgcctgcacacaggagttagaccttttgcttgtcctcactgtgacaaaaaatttcgaacctcaggccataggaagactcacattgcttcccactttaaacatacggaattaaggaaaatgaggcaccagcgtaaacctgcaaaggtccgtgttggcaagacgaatgttccagtccctgatattcctttgcaggaaccaatcctcataactgacttaggtctcatccagcccattccaaaaaaccagtttttccaaagctatttcaataataattttgtcaatgaagcagatagaccatacaagtgtttttactgtcatcgtgcatataaaaaatcttgccaccttaaacaacacatcagatcccatacaggtgaaaaaccttttaaatgttctcagtgtggaagaggctttgtttctgcaggcgtgctcaaagcacacatcagaacacacacaggactgaaatctttcaagtgtctgatatgtaatggggctttcactactggtggcagcttacggcgacacatgggtatccacaacgaccttcgtccctatatgtgtccctattgccaaaaaacatttaagacttcactaaattgcaaaaagcacatgaaaacccacagatatgagcttgcccagcagctccaacagcatcagcaggcagcctcgatagatgacagcactgtagaccagcagagcatgcaggcctccactcaaatgcaggtggagatcgagagcgacgagctgccgcagacggcagaggtggtcgcagcgaaccccgaggccatgctggacctggagcctcagcatgtggtgggcacggaggaagcagggctgggccagcagttggcagatcagcccctggaagcagatgaagatgggtttgtggctccacaggaccctctgcgagggcacgtagaccagtttgaagagcagagccctgcgcaacagtccttcgaaccagcagggctaccccaaggttttacagtgactgatacgtaccatcagcagcctcagtttccacctgtccaacagctacaggattccagcacacttgagtctcaggccctctccacaagcttccaccagcagagcttgctgcaggctcccagctctgatgggatgaatgtaacaactcgcttgattcaggagtcatcccaagaggaactggacctgcaggcacaaggttcccagtttctggaggacaacgaggaccagagcaggcgctcttacaggtgtgactattgcaacaaaggctttaagaagtccagccacctgaagcagcatgtgcggtcgcacaccggggaaaagccctacaagtgcaagctctgtggacgcggctttgtttcctctggggtcctcaagtcccacgagaagacacacacaggagtgaaggcgttcagctgcagtgtgtgcaatgcttccttcaccaccaatggcagcctcacccggcacatggccacacatatgagcatgaagccttataagtgtccgttttgtgaggagggtttccgaactacagtgcattgtaaaaagcacatgaagagacaccaaacagtcccctctgctgtgtcagccactggagagacagaaggaggagacatttgtatggaggaagaggaagaacattctgacagaaatgcatcacggaagtctcgtcctgaggtcatcactttcacggaggaggagacagcccagttagccaagatccggccgcaggagagcgccacggtgtcagagaaggtcctggtgcagtccgcggcagaaaaggaccgcatcagtgagctgagggacaagcaggcggagctgcaggacgagcccaagcacgccaactgctgcacatactgccccaagagcttcaagaaacctagcgacctggtgaggcatgttcgaatccatactggagaaaagccatacaaatgtgatgaatgtggaaagagttttactgtgaaatccactctcgattgtcatgtgaagactcacacaggtcagaagctcttcagctgtcacgtctgcagcaacgccttctccacgaagggaagtctgaaggtccacatgcgcctgcacacgggagccaagcccttcaaatgcccgcattgcgagctgcgtttccgtacctcgggtagaagaaagacacacatgcagtttcattataaaccagacccaaagaaggccagaaagcctatgactcgaagctcatcggaaggactgcagcctgtaaacctcctcaactcctcctctactgacccaaacgtgtttatcatgaacaactctgttctaacaggacagtttgatcagaatctgctgcaaccaggactggtgggccaagctattctccctgcctctgtgtcagctgggggtgacctgaccgtgtctctgacagatgggagcctggctaccctagaaggcatccagttacagttggctgctaacttggttggaccaaatgtacagatttctggaatcgatgctgccagcattaataacattacgttgcagattgatccaagcattctgcagcagacgctacagcagggcaacctattggctcagcagctcacgggggagcctggcctggccccacagaacagctctctccagacatcggacagcacggtccctgccagtgttgtcatccagcccatctcaggcctgtccttacagcccacagtgacctctgcgaacctgaccataggcccgctgtctgagcaggattcagtgctgaccactaacagcagtgggacccaagacctcactcaagtgatgacttcgcaaggtctagtgtccccctccggcggtccccacgagatcaccctgaccattaacaactccagcctgagccaggtcctggcacaggccgctgggcccactgccacgtcttcctcggggtctccacaggaaattaccctgactatctccgaacttaacactacaagcggaagccttccttcaacaacaccgacgtctccatcggccatctcgactcagaacctggtcatgtcctcgtcgggcgtgggaggtgacgctagtgtcacgctgacgctggccgatactcagggtatgctatctggaggcctggacactgtcacactcaacatcacctctcagggtcagcagttcccagcgctcctcacggatccctctctctcgggccagggtggagcaggctcgccgcaagtcatactagtgagccacacgccacagtcagcgtctgctgcttgtgaagaaatagcctaccaggtagctggcgtctctgggaacctggccccgggcaaccagccagagaaggagggccgggcgcaccagtgcctggagtgtgaccgcgccttctcatcggcggcggtgctcatgcaccacagcaaggaggtgcatggccgggagcgcatccacggctgccccgtgtgcaggaaggccttcaagcgcgccacgcacctcaaggagcacatgcagacacaccaggccggcccctctttgagctcccagaagccaagagtgtttaaatgtgacacttgtgagaaggcatttgccaaaccaagccagctggagcgccacagccgcatacacacaggggagcggccgttccattgcacgctttgtgagaaagccttcaaccagaagagtgcgctgcaggtgcacatgaagaagcacacgggggagcggccctacaagtgtgcctactgcgtcatgggcttcacgcagaagagcaacatgaagctgcacatgaagcgggcgcacagctatgctggagctctgcaggagtctgcaggtcacccggagcaggatggggaggagctgagccggaccctccacctggaggaggtggtgcaggaggctgccggcgagtggcaggccctcacccacgtcttctgatgcgagttggaagtacacctttaagaatgtttctgaagttacgttttgtgaagagcaaagcacttggaatctctgttttaaagcttcaagtgttaaaaatgctacaatagttttttatctataaaattatctaaagaatcattgtctttcagagactcataggaaaaaaaaactgggaaaagtgtcaccgcattgttctcttttgtctacaaatcactgaactcaggtactactgtaggcagtttcctcctcagtctcctccgtggctagtgtgtctagttcacgaagcaattaactgggtcttactatcattgtagtgtgatttctttgtattagcaaagacaaaaacgctaacatggaaaaagtatgtcagattttccttcatgtttctggttataagaagcatagcttacaaagcaagcgtaagattgaggcatgaagttcagaaaaaaaagtgttataacacacagggaagttttttccactcttttctctgtgcattttgaaaattagtcaaaatggactcttttcagtctaccataagttaatataactgataccttgagagatggctggaccaattctctccatgacatgtttaatcattagttacaagaatgcagtatctggggcgtcaacatggggactcgagtaaacctgacccaccaataaggattcagctgtccacacgggctggcgacacacttaccgcatcaatctgtgttcaggtccagggttacataattgcagaagcacaagccatacatcgcaggtaggaaaccacagaaccgtctgcaaggagcaagcaacggtggccctgtccaccccagcaaataagaagcatatctgtagcttaaggccacgaatccgtaaaaaccccatgactttctcttcgtgcataaacagatgtatttttgatttcagggaattctttagtatcgtcaatggtgccacataaaacatgtcccaaaccaaatcccacccgtgctgggcagagtgcgtgcacgccattcctacagcattccaaagatggaaggttctttacttcatgttaatttttcctttgaaattatttatatgttctatatataaatacatatgtacatagatatatgggcctctgtgtggctgaacagtatattttgtaaatataagtactagtcctaattgcagaaagagcgtcagtttcacctccccacgagcacttcagatcagtattgtattcattttattcataaatggatatctttttcattgtcatataaagctgggttttatttttttttcctgaaaaataattgcctttattttctctcgttgcctccttggtttcagaagagagtagttttattataaatattgtatggactttgtatattaagagaggagctcatttcagattcctaaagaaatagacattttactgttattttgaaagggcatcttttgatttttttgttgttgttgttcacttttggcatatgtatataagtaatattgacggtgatatgaaaacttttgttatgtgaagatatttaagtcagaaaattgttaaataatattacttcttttccaaactgctttgtgtattgtatatttttttaagaaaaagaaaagccttatttgacttatgcttgtgatactggacttcttaccaatccggaggtttccttccttgaatgtcagtgtgtaaacctggctgtagccgcatatgcagaataactgtaattgtgctagagttttaaaggttctgcttttaatgcactttttattttataattttgtattgaaatattttagaaatgttgattaattttggtgaaaaaatatccccaaagtggaaattattggaattttaaacttttgttcttgctgggttatttattttgattttagcattaaatgtcatctcaggatatctctaaaaggggttgtttaattcctaattgtatagaaagctagtttggtgaattgtattggttaattgactgtttaaggccttaacaggtgaatctagagcctacttttattttggttaaagaaaaagaaaatatcaataattcaattttgtgtcttttctcaatttattagcaaacacaagacattttatgtattatttcgatttacttcctaattataaaagctgcttttttgcagaacattccttgaaaatataaggttttgaaaagacataattttacttgaatctttgtggggtacaggttgatctttatattttactggttgttttaaaaattctagaaaagagatttctaggcctcatgtataaccagggttttgaggataaagaactgtatttttagaactatctcatcatagcatatctgctttggaataactataaataaaagatgaagttagg

SEQ ID NO: 61192 - DNA, 3355 bp, Homo sapiens
cacatggtttaagaagcatcattatggcttttgtgtgttttggtgtgtgtggctgtgaagcctcaggaatttagtttaagcttctgaaaagcccaccaatatgtatttagaattctgttgtcccatatcttagtcatctcaatgtttctcatttctaactttaaaacatgtcaattaaaaaaattcagtatatcattaatttcgtctaaaatgtcacataaatctctgacataatttggtttttaaacaataaccaataatttggttttatttatgtgatgagaataacaactggtatttattgtctatacttatgcaattttatagatggagttttaacattgaatgcggagaacactaattatgcctatcaagttccaaacttccataaatgtgaaatctgtctactatcttttccaaaagaatcccagtttcaacgccacatgagggatcacgagcgaaatgacaagccacatcgatgtgaccagtgcccccaaacatttaatgttgaattcaacctgacacttcataaatgcacccacagcggggaagatcctacctgccctgtgtgtaacaagaaattctccagagtggctagtctcaaagcgcatattatgctacatgaaaaggaagagaatctcatctgttctgagtgtggggatgagtttactctgcagagtcagctggccgtgcacatggaggagcaccgccaggagctggctggaacccggcagcatgcctgcaaggcctgcaagaaagagttcgagacctcctcggagctgaaggaacacatgaagactcattacaaaattagggtatcaagtacaaggtcttataaccggaatatcgacagaagtggattcacgtattcgtgtccgcactgtggaaagacgtttcaaaagccaagccagttaacgcgacacattaggatacacacaggtgaaaggccgttcaaatgtagtgaatgtggaaaggcttttaaccagaagggggcactgcagacccacatgatcaagcacacaggtgaaaaaccccatgcctgtgccttctgtcctgccgccttctctcagaaagggaatcttcagtcgcacgtgcagcgagtccactcagaggtcaagaatggtcctacctataactgtacagaatgtagttgtgtatttaaaagtttaggcagcttaaacacgcatatcagcaagatgcatatgggtgggccacagaattcaacaagttctacagagactgctcatgttttaacggccacactttttcagacgttacctcttcaacagacggaagcccaagccacgtcggcctcaagccagccgagctcccaggcggtgagcgacgtcatccagcagctcctggagctctcagagccggcgccggtggagtcggggcagtccccgcagcctgggcagcagctgagcatcacagtgggcatcaaccaggacattttacagcaagccttagaaaacagtgggctgtcttcaattccagctgcagcacatcctaatgactcctgccatgccaagacctctgcaccacacgctcaaaacccagatgtttccagcgtttcaaatgagcagacggaccccacagacgcagagcaagaaaaagaacaggaaagcccggagaaactggataaaaaagaaaaaaaaatgataaagaagaagtcaccgtttctacctggctccatccgcgaggagaacggcgtgcgctggcatgtgtgtccctactgcgccaaggagttccgcaagcccagcgacctggtccgccacatccgcatccacacccacgagaagcccttcaagtgcccgcagtgcttccgcgccttcgccgtgaagagcacgctgacagcgcacatcaagacgcacaccggcatcaaggcgttcaagtgccagtactgcatgaagagcttctccacctctggcagcctcaaggtgcacattcgcctgcacacaggagttagaccttttgcttgtcctcactgtgacaaaaaatttcgaacctcaggccataggaagactcacattgcttcccactttaaacatacggaattaaggaaaatgaggcaccagcgtaaacctgcaaaggtccgtgttggcaagacgaatgttccagtccctgatattcctttgcaggaaccaatcctcataactgacttaggtctcatccagcccattccaaaaaaccagtttttccaaagctatttcaataataattttgtcaatgaagcagatagaccatacaagtgtttttactgtcatcgtgcatataaaaaatcttgccaccttaaacaacacatcagatcccatacaggtgaaaaaccttttaaatgttctcagtgtggaagaggctttgtttctgcaggcgtgctcaaagcacacatcagaacacacacaggactgaaatctttcaagtgtctgatatgtaatggggctttcactactggtggcagcttacggcgacacatgggtatccacaacgaccttcgtccctatatgtgtccctattgccaaaaaacatttaagacttcactaaattgcaaaaagcacatgaaaacccacagatatgagcttgcccagcagctccaacagcatcagcaggcagcctcgatagatgacagcactgtagaccagcagagcatgcaggcctccactcaaatgcaggtggagatcgagagcgacgagctgccgcagacggcagaggtggtcgcagcgaaccccgaggccatgctggacctggagcctcagcatgtggtgggcacggaggaagcagggctgggccagcagttggcagatcagcccctggaagcagatgaagatgggtttgtggctccacaggaccctctgcgagggcacgtagaccagtttgaagagcagagccctgcgcaacagtccttcgaaccagcagggctaccccaaggttttacagtgactgatacgtaccatcagcagcctcagtttccacctgtccaacagctacaggattccagcacacttgagtctcaggccctctccacaagcttccaccagcagagcttgctgcaggctcccagctctgatgggatgaatgtagtgagtatggacagaggggtgcatacatggcagtatttagcaggtgctatgttattcttcactgtcattattaaaaatttccttaagggaaattttaagaggcatgctcacttcttgtagcattaaggttactgcattacctgggaaatcctcagtgtttagtacacagggctttctttttccttaaaacattttaattttgcttaaaggtttcactgccatggtgtggccttgcatttgtgattaaaaaccaaaaattgactagagtgctatgtaat

SEQ ID NO: 61193 - DNA, 2582 bp, Homo sapiens
cacatggtttaagaagcatcattatggcttttgtgtgttttggtgtgtgtggctgtgaagcctcaggaatttagtttaagcttctgaaaagcccaccaatatgtatttagaattctgttgtcccatatcttagtcatctcaatgtttctcatttctaactttaaaacatgtcaattaaaaaaattcagtatatcattaatttcgtctaaaatgtcacataaatctctgacataatttggtttttaaacaataaccaataatttggttttatttatgtgatgagaataacaactggtatttattgtctatacttatgcaattttatagatggagttttaacattgaatgcggagaacactaattatgcctatcaagttccaaacttccataaatgtgaaatctgtctactatcttttccaaaagaatcccagtttcaacgccacatgagggatcacgagcgaaatgacaagccacatcgatgtgaccagtgcccccaaacatttaatgttgaattcaacctgacacttcataaatgcacccacagcggggaagatcctacctgccctgtgtgtaacaagaaattctccagagtggctagtctcaaagcgcatattatgctacatgaaaaggaagagaatctcatctgttctgagtgtggggatgagtttactctgcagagtcagctggccgtgcacatggaggagcaccgccaggagctggctggaacccggcagcatgcctgcaaggcctgcaagaaagagttcgagacctcctcggagctgaaggaacacatgaagactcattacaaaattagggtatcaagtacaaggtcttataaccggaatatcgacagaagtggattcacgtattcgtgtccgcactgtggaaagacgtttcaaaagccaagccagttaacgcgacacattaggatacacacaggtgaaaggccgttcaaatgtagtgaatgtggaaaggcttttaaccagaagggggcactgcagacccacatgatcaagcacacaggtgaaaaaccccatgcctgtgccttctgtcctgccgccttctctcagaaagggaatcttcagtcgcacgtgcagcgagtccactcagaggtcaagaatggtcctacctataactgtacagaatgtagttgtgtatttaaaagtttaggcagcttaaacacgcatatcagcaagatgcatatgggtgggccacagaattcaacaagttctacagagactgctcatgttttaacggccacactttttcagacgttacctcttcaacagacggaagcccaagccacgtcggcctcaagccagccgagctcccaggcggtgagcgacgtcatccagcagctcctggagctctcagagccggcgccggtggagtcggggcagtccccgcagcctgggcagcagctgagcatcacagtgggcatcaaccaggacattttacagcaagccttagaaaacagtgggctgtcttcaattccagctgcagcacatcctaatgactcctgccatgccaagacctctgcaccacacgctcaaaacccagatgtttccagcgtttcaaatgagcagacggaccccacagacgcagagcaagaaaaagaacaggaaagcccggagaaactggataaaaaagaaaaaaaaatgataaagaagaagtcaccgtttctacctggctccatccgcgaggagaacggcgtgcgctggcatgtgtgtccctactgcgccaaggagttccgcaagcccagcgacctggtccgccacatccgcatccacacccacgagaagcccttcaagtgcccgcagtgcttccgcgccttcgccgtgaagagcacgctgacagcgcacatcaagacgcacaccggcatcaaggcgttcaagtgccagtactgcatgaagagcttctccacctctggcagcctcaaggtgcacattcgcctgcacacaggagttagaccttttgcttgtcctcactgtgacaaaaaatttcgaacctcaggccataggaagactcacattgcttcccactttaaacatacggaattaaggaaaatgaggcaccagcgtaaacctgcaaaggtccgtgttggcaagacgaatgttccagtccctgatattcctttgcaggaaccaatcctcataactgacttaggtaagatggattgtagggcgtctttataatttattgagtactattttctttgacattttgtgaattgtgtacacacattatggtctctgtagttaaatagttttttaggcatagtattaatgaagtctgtgttaagccttgttttgctttatggactagtatgttttacagtcaagattaaaatctaagttgtatccaaactactgctcaaattgttttctcggattagagacaaataatgtgtaagtgaaaacagtagcgtgtaagtcctcattgaagaaacattgctacctcagtggaaccatcaaaagtgagaaggggtttttatgtgaaacacacagtgcacgttgttgttttcatctttaggttctttgtactgtgttacagattatttgggctactttaatctttggatt

SEQ ID NO: 61194 - DNA, 824 bp, Homo sapiens
agcacattgccttgtttcattttcatcatagtgttattctactcttattttgatagttagatagattttttaatttttaattattttccctccactaaaatataagatcaatgagaacaagaccattcctttgtcatttttgtggcacagggcctaaaataatgattggaatataataagcagttaataaatatttgttgaatgaaaaaaatcatacatattcttagaagtgcaggaacttattaacccacccagggatggttcatctatggtgaactgcactcaacactggatggatgataatttataggaatctagtaattaataccagtttatgtatagtggtagacacaaatagtataataaaactgtatatgcaatacatttttttgaacattattgtgtcaaaaccccacatttatcaaagagccattgaagagcacatggaaactgggaaaaagagagatgggtgctattaaaaaaacacttaatcctatactctggctatacgttgtcttgtctgacaagtacattagctagtaaatgtttcttcttggtactgagaattatgagaggcagtatgaaagacttggttttgctagtccaaccataaaatcaacttaaatgccagcccaattgatggtgggttacattctacacgtaggcaaacagaggaatattaagttggtcttgcaggttattaaaaaatgaaaaagtaaaaatagaagataaaagggatggtttcaaaaaaatctgaagcaatggataagtatttcttaaagcccattgatggaaatgcagatttcctaagatctgagaaaaaa

SEQ ID NO: 61195 - DNA, 436 bp, Homo sapiens
atgaatggctttcgtctctgccactgtgaccagttcatttgtgttgtccaaaactgatggcttatgacagaggttggctggtgtgaactggccaggttatctgtcttcttggttgtttaatgcatcttctatggtggatgcacagtggccagttagtaatacgcttagcattcttcagtcttagtatccatttaggtcttggtattcctatgctcaattttgatggcaaatggacaaatgtaggaaccctggcttgccttggagagacatggtgccaggggcttgaccctccagaaatgacagtctggatcactccatcaggtgagctatgcagactagtgtagatgttagccaaggacgaagagaatctatagtggcagtagaagagatagatgatgtgtatcggttgtggtcacaaaatcagctgcagaagtaa

SEQ ID NO: 61196 - DNA, 846 bp, Homo sapiens
cagtcgtgtacaactgacagtgccatcatttactgcctggctcaggtcacgttactctaaggctttatttatggtgttacgaagtgggagcacaggaaaaggacaagggtgtctgtcagggatggcactgtgttaaaaagtgggcgtgcaagggccgcattcccgggcagccgctgcaacctcagcccctgggcccttacctccgcagcctctcccagcatccagctacccagactccaaggccccaggcgagagccagctctcggtacctggagctccacaggtcccagaatcggggtggatcagagttcaaattctggttctgctactgtctaattgcgtgctgcagggactcaatctcttcatctgggaaatgggagtaataacccttggcaggaatgttgcgatcctctgggatgtcagaggtgttgatgaatgttagttcccgggacttcggaaagaggtcccgttggaagagatgtgaattggaattcacaccctatattaaaatctcctccaatcttcacctctgagacatggctgtctcaagactgttttgtttcccttcctggtggaattttgcacttttatgtcctgtgtagcagcaggtagtgtggctttgagaaaataaaatggccaccttgctccgctgttctttctttgtaaaaaaaaaaaaaaaaaaaaaaaaacggcatagcaatcttggcctttctagctgtgtgaccccaggccggtcaatccctcctcctctccaagcctcggattcctcccctgagaagtaaagaaaataactcctaaactgcctcccgaggcttgctggcaggatccaaggtgtccagagatgtt

SEQ ID NO: 61197 - DNA, 1021 bp, Homo sapiens
ggacagtttctagcaaaactgcatgtttatggacctaacagtttacagtgattttcactgtcatactatttgcagtagcaaagactgaaaacaatttaattgtccatcagtagaggattgattgaataaataatgctaggttcacacaatggagtactgtgcagatgtggtaagaaatgaagagctctgcatcctgctatggaatgagctacagaatagagttaagtgagaaaagtgcattggaggaaagcatatgtagtattcagtaaacggaggggagctgtaaatgtatttattattatgttaaaaaaacaatggtagtataaaccaagaaaaagtttttaatgttatatatagaagaaaggaagaaataggtggaggagaggcagtgataaaagtgaaacttttctgcatataacttgttttatcctcttgaacaatgtaaaggtcatatattaaataaaattgttaaaaaaagtggtcaacttttttaaaaactcaaaaccaaaatcgaacagataaacccgtgtattaaattggtaggatggccagatggagagtgaatatttcaagtgatttaaaaatatttctagtggtatatactcgatgtttaaaaaagatatcccctccccatctcccagaaaacattttcagtaagcaaattgtgatgattaattttaggtgtctacttgactagattaaggaatatgcagatagctgttataacattatttctgggtgtatctgtgagggtgtttctggaagagattgacatttgaattagtgggcttttaaagaaaatgcaccctctgtgtagacaggaaccatccaaccagctgaggacttaaaacaaaaaggtagaggaaagatgaattcattctctcttctggagctggcatatccatcttctgtcattcattggtcatcagacctccaggttctctagctttggactctaagacttgcagaagccccgtggattctagggctttcacccttacactgagagttataccatcag

SEQ ID NO: 61198 - DNA, 475 bp, Homo sapiens
tatagaattatgtttaactttcttagtaataatagcagatggtaataaaggaatatgttcttactcttaggcaatcatcttactctacttgggctgtgataacaaaataccatagactgagtggcttaaacaacatacatttatttctcacagttctaggaactggaggtcctaagtcagggtgccagcatagttgaacttgggtgagggccctcttcctgaaagctgtagtctcagcttgcagacagctttgcctttttactgtgtcctcacacaacagagagagaaagagcacaaaagctctctggtatctcttcttacaagggcactaatcccattgtgagggctccacccttgtgacctcatctaaacctaattacccccaagtgccccatgtccaaatatcacatttggggttagggcttcaacgtgtgaatttgagggggaccccaataacaactgaagcagaatgcta

SEQ ID NO: 61199 - DNA, 186 bp, Homo sapiens
gtacccaagcaagccactcctcaggcattttccccacaactagaaatccagaggctttggatcttgagaagaacatgaaggaaagatgccaggaagtacagtctggtctgctgatgatgatcaatggaggaagtgtttcatggtggacatgggaaactggccagatcaactgctgtcaccttctaa

SEQ ID NO: 61200 - DNA, 368 bp, Homo sapiens
acagtgccctctttttaacccaggaaattctgcattttgaaagaaagtagaaaaacgtagacaaatgagttacagttttgaaattagaatgcatgggaagcattttgaaatctgtaaaatattctacctttgatgtcaaaagtcagagtacttgatatggatcctttaaaaaaaatccatgattgaggagattttgaaaaattcctagtttcttttaccagagtaattgtatgttgattagggtttgggtgttttttgttttcaatttggaaagaaaaagagcgtgcttagcccattccatataatattgtatagaaaactcaccaggtcttgttcaattgtgagataacactgattgaggttttatc

SEQ ID NO: 61201 - DNA, 468 bp, Homo sapiens
gcctggtgagttggaggcagcagctggttactttccatgcagagcagcttggagttgagtcactcgacaatccaagggcacctgtggaagcagccatgactcatgctaccttcagtttcacatctggaggaggaaatcactgacaaagcaaagcaaggcgacttctgggggctgccgtgtaggattctcccatgtttaaaaaagaaaaaaagattgtacaggatttaaacatagcatttattgcctgtgttcttagttataaaattaatacatgtacataataattgttgtagttagttattttattcagcatttatcctatgtcaggtactgatgcttcaagctttacatgcgttgtctcacttagtgtttctgaccattcagtgggggagatctgttattatacccattttacagatatggaaactgagtctatacacacacacacgcgcgtaaaacacatagaaa

SEQ ID NO: 61202 - DNA, 411 bp, Homo sapiens
agtggtacaggcctgtcattccacctacagagatactgagggcaggaggattgatacaggcccacccacagggttcaattgcccatggagtggtaacagaccaaaatgccaaaacagcagaaattgcagcagagaaagggttgaataagtcttgatagctaatggttaataatactgcattatatattgaaaatttgctaagaaaatgggttttatgtcctcttactataaagatcatagcctccaagaaatataggactatgagaaaagaccaaacctacatttgattggtatacctgaaaatgatggggagaatggaaccaagctggaaaacacatttcaggatattatccaggagaacttccccaacctatcaagacagaccaacattcaaattcaggaaatacagag

SEQ ID NO: 61203 - DNA, 542 bp, Homo sapiens
cctgcctggcaggaccatcagcagcaggttagagagcaaatgttcatgcagatgaggagcttcctcaggaatctgtggtctgtagatgccctcaagggtcaacatgtgctttctttgctaagatttggggatttctgacttcctgccagcttggtacggcaacaaggtgattctggctagagtctcagtagggctgccacctctcagcatggtgccaggagagggagccctggagtcatcagctctggacaggcctggaggtggcctttcaagtcctctgacctgcgcatcctgtgtgttgcaagtgaaggatctgacactagccttcattttcactcagtcatcaagctttctccatctccactgggtatagggtttggacactcagaaaggtacctccacctgggagacagcccaacttttctgtttccaaaaccaacatgaccaacctcccagatttgagacttcatgactcccttctctgtcaaccagcaccacaagggcatggttaacatttattaaatactcactgttctaaaaaa

SEQ ID NO: 61204 - DNA, 227 bp, Homo sapiens
acctaactgtcaaagcacagaaaatgttaacaaagtggttgggacttgccattttggaatagcacatttttagcaattaggttctctacactagagagccagtagactgatattctttaatgccagtttcctagttaattgtaaagatagacacaagttcccccctttataaaagcttctgttgtttcacataatgactttaactataatggaaatggggcaggaca

SEQ ID NO: 61205 - DNA, 420 bp, Homo sapiens
tgtcttcttttgaaaagtgtctattcatgttgtttgcgcatttttaataaggttgtttgttttttacttgttgatttgtttaatttctttatatattctggatattagacatttgttggatgcacagtttgaaaatattttctccccttctgtagggtgtctgtttgctcttttgatagtttcttttgttgtgcagaagctcttcaggttaattagttcctatttgtcaattttgtttttgttacaattgcttttggagtcttcatcatgaaatatttgccaaggcatatgtccagaatggcatttcctaggttttcttccagggtcggtctgccttgcctcgcctctcctctcctttcctctcctatctgtcctttcctttttcaattttaggttttacatgtaagtctttaatccatc

SEQ ID NO: 61206 - DNA, 2096 bp, Homo sapiens
cccggcgacttaacgcgcccccgccccgcgcccggcctcggcagccgcctgtcgccgcgggagcagccgctatctctgtgtgtccgcgtgtgcgcccggtccccgcctgccgcaccatggagagctaccacaagcctgaccagcagaagctgcaggccttgaaggacacggccaaccgcctacgtatcagctccatccaggccaccactgcggcgggctctggccaccccacgtcatgctgcagcgccgcagagatcatggctgtcctctttttccacaccatgcgctacaagtcccaggacccccggaatccgcacaatgaccgctttgtgctctccaagggccatgcagctcccatcctctacgcggtctgggctgaagctggtttcctggccgaggcggagctgctgaacctgaggaagatcagctccgacttggacgggcacccggtcccgaaacaagctttcaccgacgtggccactggctccctgggccagggcctcggggccgcttgtgggatggcctacaccggcaaatacttcgacaaggccagctaccgagtctattgcttgctgggagacggggagctgtcagagggctctgtatgggaggccatggccttcgccagcatctataagctggacaaccttgtggccattctagacatcaatcgcctgggccagagtgacccggccccactgcagcaccagatggacatctaccagaagcggtgcgaggccttcggttggcatgccatcatcgtggatggacacagcgtggaggagctgtgcaaggcctttggccaggccaagcaccagccaacagccatcattgccaagaccttcaagggccgagggatcacgggggtagaagataaggagtcttggcatgggaagcccctccccaaaaacatggctgagcagatcatccaggagatctacagccagatccagagcaaaaagaagatcctggcaacccctccacaggaggacgcaccctcagtggacattgccaacatccgcatgcccagcctgcccagctacaaagttggggacaagatagccacccgcaaggcctacgggcaggcactggccaagctgggccatgccagtgaccgcatcatcgccctggatggggacaccaaaaattccaccttctcggagatcttcaaaaaggagcacccggaccgcttcatcgagtgctacattgctgagcagaacatggtgagcatcgcggtgggctgtgccacccgcaacaggacggtgcccttctgcagcacttttgcagccttcttcacgcgggcctttgaccagattcgcatggccgccatctccgagagcaacatcaacctctgcggctcccactgcggcgtttccatcggggaagacgggccctcccagatggccctagaagatctggctatgtttcggtcagtccccacatcaactgtcttttacccaagtgatggcgttgctacagagaaggcagtggaactagccgccaatacaaagggtatctgcttcatccggaccagccgcccagaaaatgccatcatctataacaacaatgaggacttccaggtcggacaagccaaggtggtcctgaagagcaaggatgaccaggtgaccgttatcggggctggggtgaccctgcacgaggccttggccgctgccgaactgctgaagaaagaaaagatcaacatccgcgtgctggaccccttcaccatcaagcccctggacagaaaactcattctcgacagcgctcgtgccaccaagggcaggatcctcaccgtggaggaccattattatgaaggtggcattggtgaggctgtgtccagtgcagtagtgggcgagcctggcatcactgtcacccacctggcagttaaccgggtaccaagaagtgggaagccggctgagctgctgaagatgtttggtatcgacagggatgccattgcacaagctgtgaggggcctcatcaccaaggcctagggcgggtatgaagtgtggggcgggggtctatacattcctgagattctgggaaaggtgctcaaagatgtactgagaggaggggtaaatatatgttttgagaaaaatgaa

SEQ ID NO: 61207 - DNA, 742 bp, Homo sapiens
cggacgcgtgggtcgacccacgcgtcgggaagacgggccctcccagatggccctagaagatctggctatgtttcggtcagtccccacatcaactgtcttttacccaagtgatggcgttgctacagagaaggcagtggaactagccgccaatacaaagggtatctgcttcatccggaccagccgcccagaaaatgccatcatctataacaacaatgaggacttccaggtcggacaagccaaggtggtcctgaagagcaaggatgaccaggtgaccgttatcggggctggggtgaccctgcacgaggccttggccgctgccgaactgctgaagaaagaaaagatcaacatccgcgtgctggaccccttcaccatcaagcccctggacagaaaactcattctcgacagcgctcgtgccaccaagggcaggatcctcaccgtggaggaccattattatgaaggtggcattggtgaggctgtgtccagtgcagtagtgggcgagcctggcatcactgtcacccacctggcagttaaccgggtaccaagaagtgggaagccggctgagctgctgaagatgtttggtatcgacagggatgccattgcacaagctgtgaggggcctcatcaccaaggcctagggcgggtatgaagtgtggggcgggggtctatacattcctgagattctgggaaaggtgctcaaagatgtactgagaggaggggtaaatatatgttttgagaaaaatgaa

SEQ ID NO: 61208 - DNA, 1058 bp, Homo sapiens
  misc_feature (32)..(32): n is a, c, g, or t
  misc_feature (35)..(35): n is a, c, g, or t
  misc_feature (867)..(867): n is a, c, g, or t
  misc_feature (903)..(903): n is a, c, g, or t
  misc_feature (915)..(915): n is a, c, g, or t
  misc_feature (926)..(926): n is a, c, g, or t
  misc_feature (934)..(934): n is a, c, g, or t
  misc_feature (941)..(941): n is a, c, g, or t
ccaagataggctagtagggccggggtgtaatnggncgagggctgtcgccgcgggagcagccgctatctctgtgtgtccgcgtgtgcgcccggtccccgcctgccgcaccatggagagctaccacaagcctgaccagcagaagctgcaggccttgaaggacacggccaaccgcctacgtatcagctccatccaggccaccactgcggcgggctctggccaccccacgtcatgctgcagcgccgcagagatcatggctgtcctctttttccacaccatgcgctacaagtcccaggacccccggaatccgcacaatgaccgctttgtgctctccaagggccatgcagctcccatcctctacgcggtctgggctgaagctggtttcctggccgaggcggagctgctgaacctgaggaagatcagctccgacttggacgggcacccggtcccgaaacaagctttcaccgacgtggccactggctccctgggccagggcctcggggccgcttgtgggatggcctacaccggcaaatacttcgacaaggccagctaccgagtctattgcttgctgggagacggggagctgtcagagggctctgtatgggaggccatggccttcgccagcatctataagctggacaaccttgtggccattctagacatcaatcgcctgggccagagtgacccggccccactgcagcaccagatggacatctaccagaagcggtgcgaggccttcggttggcatgccatcatcgtggatggacacagcgtggaggagctgtgcaaggcctttggccaggccaagcaccagccaacagccatcattgccaagaccttcaagggccgagggatcacggggtcgacganaggagtctggatggaagcctcccaaaaatggtgggngacatcgggaanaagcgtccagnaaagtcgnacctccnggagcctcgggttccacatccgtgccgccgcctcaatggacaaaccccggcgcgggcgacatggccaagcgctgccggggcgcacctacggaaacggcgcaaaagaaaggcggagga

SEQ ID NO: 61209 - DNA, 550 bp, Homo sapiens
  misc_feature (47)..(47): n is a, c, g, or t
ccagaaagccttctttataccccattaggcttccaggtggccaaccnaggtggtcctgaagagcaaggatgaccaggtgaccgttatcggggctggggtgaccctgcacgaggccttggccgctgccgaactgctgaagaaagaaaagatcaacatccgcgtgctggaccccttcaccatcaagcccctggacagaaaactcattctcgacagcgctcgtgccaccaagggcaggatcctcaccgtggaggaccattattatgaaggtggcattggtgaggctgtgtccagtgcagtagtgggcgagcctggcatcactgtcacccacctggcagttaaccgggtaccaagaagtgggaagccggctgagctgctgaagatgtttggtatcgacagggatgccattgcacaagctgtgaggggcctcatcaccaaggcctagggcgggtatgaagtgtggggcgggggtctatacattcctgagattctgggaaaggtgctcaaagatgtactgagaggaggggtaaatatatgttttgagaaaaatgaa

SEQ ID NO: 61210 - DNA, 562 bp, Homo sapiens
gaagagaaggcacgcgaatgaagaatgatgcaggttggaactaaataaaaagtgggtcctagaagaacaagagataatccaggtgaaccggtatagagggaaaagggttaacacagcaaaaggatcttgggccgatgcagaagctgctaaagaaaaaaagatcaacatccgcgtgctggaccccttcaccatcaagcccctggacagaaaactcattctcgacagcgctcgtgccaccaagggcaggatcctcaccgtggaggaccattattatgaaggtggcattggtgaggctgtgtccagtgcagtagtgggcgagcctggcatcactgtcacccacctggcagttaaccgggtaccaagaagtgggaagccggctgagctgctgaagatgtttggtatcgacagggatgccattgcacaagctgtgaggggcctcatcaccaaggcctagggcgggtatgaagtgtggggcgggggtctatacattcctgagattctgggaaaggtgctcaaagatgtactgagaggaggggtaaatatatgttttgagaaaaatgaa

SEQ ID NO: 61211 - DNA, 539 bp, Homo sapiens
cgctgccgaactgctgaagaaagaaaagatcaacagcgggcaaggcctcgtgcagggtcaccccagccccgataacggtcacctggtcatccttgctcgaggccttggccgctgccgaactgctgaagaaagaaaagatcaacatccgcgtgctggaccccttcaccatcaagcccctggacagaaaactcattctcgacagcgctcgtgccaccaagggcaggatcctcaccgtggaggaccattattatgaaggtggcattggtgaggctgtgtccagtgcagtagtgggcgagcctggcatcactgtcacccacctggcagttaaccgggtaccaagaagtgggaagccggctgagctgctgaagatgtttggtatcgacagggatgccattgcacaagctgtgaggggcctcatcaccaaggcctagggcgggtatgaagtgtggggcgggggtctatacattcctgagattctgggaaaggtgctcaaagatgtactgagaggaggggtaaatatatgttttgagaaaaatgaa

SEQ ID NO: 61212 - DNA, 214 bp, Homo sapiens
atacattcctgagattctgggaaaggtgctcaaagatgtactgacccccgccccacacttcatacccgccctaggccttggtgatgaggcccctcacagcttgtgcaatgggtatgaagtgtggggcgggggtctatacattcctgagattctgggaaaggtgctcaaagatgtactgagaggaggggtaaatatatgttttgagaaaaatgaa

SEQ ID NO: 61213 - DNA, 2089 bp, Homo sapiens
  misc_feature (32)..(32): n is a, c, g, or t
  misc_feature (35)..(35): n is a, c, g, or t
ccaagataggctagtagggccggggtgtaatnggncgagggctgtcgccgcgggagcagccgctatctctgtgtgtccgcgtgtgcgcccggtccccgcctgccgcaccatggagagctaccacaagcctgaccagcagaagctgcaggccttgaaggacacggccaaccgcctacgtatcagctccatccaggccaccactgcggcgggctctggccaccccacgtcatgctgcagcgccgcagagatcatggctgtcctctttttccacaccatgcgctacaagtcccaggacccccggaatccgcacaatgaccgctttgtgctctccaagggccatgcagctcccatcctctacgcggtctgggctgaagctggtttcctggccgaggcggagctgctgaacctgaggaagatcagctccgacttggacgggcacccggtcccgaaacaagctttcaccgacgtggccactggctccctgggccagggcctcggggccgcttgtgggatggcctacaccggcaaatacttcgacaaggccagctaccgagtctattgcttgctgggagacggggagctgtcagagggctctgtatgggaggccatggccttcgccagcatctataagctggacaaccttgtggccattctagacatcaatcgcctgggccagagtgacccggccccactgcagcaccagatggacatctaccagaagcggtgcgaggccttcggttggcatgccatcatcgtggatggacacagcgtggaggagctgtgcaaggcctttggccaggccaagcaccagccaacagccatcattgccaagaccttcaagggccgagggatcacgggggtagaagataaggagtcttggcatgggaagcccctccccaaaaacatggctgagcagatcatccaggagatctacagccagatccagagcaaaaagaagatcctggcaacccctccacaggaggacgcaccctcagtggacattgccaacatccgcatgcccagcctgcccagctacaaagttggggacaagatagccacccgcaaggcctacgggcaggcactggccaagctgggccatgccagtgaccgcatcatcgccctggatggggacaccaaaaattccaccttctcggagatcttcaaaaaggagcacccggaccgcttcatcgagtgctacattgctgagcagaacatggtgagcatcgcggtgggctgtgccacccgcaacaggacggtgcccttctgcagcacttttgcagccttcttcacgcgggcctttgaccagattcgcatggccgccatctccgagagcaacatcaacctctgcggctcccactgcggcgtttccatcggggaagacgggccctcccagatggccctagaagatctggctatgtttcggtcagtccccacatcaactgtcttttacccaagtgatggcgttgctacagagaaggcagtggaactagccgccaatacaaagggtatctgcttcatccggaccagccgcccagaaaatgccatcatctataacaacaatgaggacttccaggtcggacaagccaaggtggtcctgaagagcaaggatgaccaggtgaccgttatcggggctggggtgaccctgcacgaggccttggccgctgccgaactgctgaagaaagaaaagatcaacatccgcgtgctggaccccttcaccatcaagcccctggacagaaaactcattctcgacagcgctcgtgccaccaagggcaggatcctcaccgtggaggaccattattatgaaggtggcattggtgaggctgtgtccagtgcagtagtgggcgagcctggcatcactgtcacccacctggcagttaaccgggtaccaagaagtgggaagccggctgagctgctgaagatgtttggtatcgacagggatgccattgcacaagctgtgaggggcctcatcaccaaggcctagggcgggtatgaagtgtggggcgggggtctatacattcctgagattctgggaaaggtgctcaaagatgtactgagaggaggggtaaatatatgttttgagaaaaatgaa

SEQ ID NO: 61214 - DNA, 2762 bp, Homo sapiens
cccggcgacttaacgcgcccccgccccgcgcccggcctcggcagccgcctgtcgccgcgggagcagccgctatctctgtgtgtccgcgtgtgcgcccggtccccgcctgccgcaccatggagagctaccacaagcctgaccagcagaagctgcaggccttgaaggacacggccaaccgcctacgtatcagctccatccaggccaccactgcggcgggctctggccaccccacgtcatgctgcagcgccgcagagatcatggctgtcctctttttccacaccatgcgctacaagtcccaggacccccggaatccgcacaatgaccgctttgtgctctccaagggccatgcagctcccatcctctacgcggtctgggctgaagctggtttcctggccgaggcggagctgctgaacctgaggaagatcagctccgacttggacgggcacccggtcccgaaacaagctttcaccgacgtggccactggctccctgggccagggcctcggggccgcttgtgggatggcctacaccggcaaatacttcgacaaggccagctaccgagtctattgcttgctgggagacggggagctgtcagagggctctgtatgggaggccatggccttcgccagcatctataagctggacaaccttgtggccattctagacatcaatcgcctgggccagagtgacccggccccactgcagcaccagatggacatctaccagaagcggtgcgaggccttcggttggcatgccatcatcgtggatggacacagcgtggaggagctgtgcaaggcctttggccaggccaagcaccagccaacagccatcattgccaagaccttcaagggccgagggatcacgggggtagaagataaggagtcttggcatgggaagcccctccccaaaaacatggctgagcagatcatccaggagatctacagccagatccagagcaaaaagaagatcctggcaacccctccacaggaggacgcaccctcagtggacattgccaacatccgcatgcccagcctgcccagctacaaagttggggacaagatagccacccgcaaggcctacgggcaggcactggccaagctgggccatgccagtgaccgcatcatcgccctggatggggacaccaaaaattccaccttctcggagatcttcaaaaaggagcacccggaccgcttcatcgagtgctacattgctgagcagaacatggtgagcatcgcggtgggctgtgccacccgcaacaggacggtgcccttctgcagcacttttgcagccttcttcacgcgggcctttgaccagattcgcatggccgccatctccgagagcaacatcaacctctgcggctcccactgcggcgtttccatcggggaagacgggccctcccagatggccctagaagatctggctatgtttcggtcagtccccacatcaactgtcttttacccaagtgatggcgttgctacagagaaggcagtggaactagccgccaatacaaagggtatctgcttcatccggaccagccgcccagaaaatgccatcatctataacaacaatgaggacttccaggtcggacaagccaaggtggtcctgaagagcaaggatgaccaggtgaccgttatcggggctggggtgaccctgcacgaggccttggccgctgccgaactgctgaagaaagaaaagatcaacatccgcgtgctggaccccttcaccatcaagcccctggacagaaaactcattctcgacagcgctcgtgccaccaagggcaggatcctcaccgtggaggaccattattatgaaggtggcattggtgaggctgtgtccagtgcagtagtgggcgagcctggcatcactgtcacccacctggcagttaaccgggtaccaagaagtgggaagccggctgagctgctgaagatgtttggtatcgacagggatgccattgcacaagctgtgaggggcctcatcaccaaggcctagggcgggtatgaagtgtggggcgggggtctatacattcctgagattctgggaaaggtgctcaaagatgtactgagaggaggggtaaatatatgttttgagaaaaatgaaaaaaaaaacaaaaaaaaaaaaaaaaaaaaaaaaaaacaaaaggggcgggcgcgcgcgccccataaatttcccccgcgggggcgccccacacttttcgcgcgcgtcccccaccttttttgtgtgtgcaaacaggggggcccccaatattagggaggactgcgtatatttaattagcgcaacggcgcgacggggcgcgcggcgagtatatcaaaaccaccagcgcggcggcggtcagcgggggacaaaccaccgctgcggctaagccggcggaaacacgtctgtgggcggggagaggagagacccccctttaaatgcctgcgggggggggggggggacaccacatcatatggttgcgggccaccaaacatctattcccctctaacgcagagaagctatatatacaaagagcgccctctaagagggcgatacatactatatatcaacgaattgtttcaacaaaggggcggtatcatcatagggggtggttgttccaaccacacaacccgcggccacaatatatgtgccgctcgcgccgggccccttggtgaaaaataatttgtgcggcgccacccacgggggggaaccatgcttacattctctgtgcggcaaccaaatttttttttatccccgagggggcctgcttcatgtactaatcatcaagagagt

SEQ ID NO: 61215 - DNA, 2523 bp, Homo sapiens
  misc_feature (2523)..(2523): n is a, c, g, or t
cccggcgacttaacgcgcccccgccccgcgcccggcctcggcagccgcctgtcgccgcgggagcagccgctatctctgtgtgtccgcgtgtgcgcccggtccccgcctgccgcaccatggagagctaccacaagcctgaccagcagaagctgcaggccttgaaggacacggccaaccgcctacgtatcagctccatccaggccaccactgcggcgggctctggccaccccacgtcatgctgcagcgccgcagagatcatggctgtcctctttttccacaccatgcgctacaagtcccaggacccccggaatccgcacaatgaccgctttgtgctctccaagggccatgcagctcccatcctctacgcggtctgggctgaagctggtttcctggccgaggcggagctgctgaacctgaggaagatcagctccgacttggacgggcacccggtcccgaaacaagctttcaccgacgtggccactggctccctgggccagggcctcggggccgcttgtgggatggcctacaccggcaaatacttcgacaaggccagctaccgagtctattgcttgctgggagacggggagctgtcagagggctctgtatgggaggccatggccttcgccagcatctataagctggacaaccttgtggccattctagacatcaatcgcctgggccagagtgacccggccccactgcagcaccagatggacatctaccagaagcggtgcgaggccttcggttggcatgccatcatcgtggatggacacagcgtggaggagctgtgcaaggcctttggccaggccaagcaccagccaacagccatcattgccaagaccttcaagggccgagggatcacgggggtagaagataaggagtcttggcatgggaagcccctccccaaaaacatggctgagcagatcatccaggagatctacagccagatccagagcaaaaagaagatcctggcaacccctccacaggaggacgcaccctcagtggacattgccaacatccgcatgcccagcctgcccagctacaaagttggggacaagatagccacccgcaaggcctacgggcaggcactggccaagctgggccatgccagtgaccgcatcatcgccctggatggggacaccaaaaattccaccttctcggagatcttcaaaaaggagcacccggaccgcttcatcgagtgctacattgctgagcagaacatggtgagcatcgcggtgggctgtgccacccgcaacaggacggtgcccttctgcagcacttttgcagccttcttcacgcgggcctttgaccagattcgcatggccgccatctccgagagcaacatcaacctctgcggctcccactgcggcgtttccatcggggaagacgggccctcccagatggccctagaagatctggctatgtttcggtcagtccccacatcaactgtcttttacccaagtgatggcgttgctacagagaaggcagtggaactagccgccaatacaaagggtatctgcttcatccggaccagccgcccagaaaatgccatcatctataacaacaatgaggacttccaggtcggacaagccaaggtggtcctgaagagcaaggatgaccaggtgaccgttatcggggctggggtgaccctgcacgaggccttggccgctgccgaactgctgaagaaagaaaagatcaacatccgcgtgctggaccccttcaccatcaagcccctggacagaaaactcattctcgacagcgctcgtgccaccaagggcaggatcctcaccgtggaggaccattattatgaaggtggcattggtgaggctgtgtccagtgcagtagtgggcgagcctggcatcactgtcacccacctggcagttaaccgggtaccaagaagtgggaagccggctgagctgctgaagatgtttggtatcgacagggatgccattgcacaagctgtgaggggcctcatcaccaaggcctagggcgggtatgaagtgtggggcgggggtctatacattcctgagattctgggaaaggtgctcaaagatgtactgagaggaggggtaaatatatgttttgagaaaaatgaaaaaaaaaacaaaaaaaaaaaaaaaaaaaaaaaaaaaaagggggggggcgaaaaaaaaccccggggggggccccttttggggcacccctttttttgggaaaaggggggcccccaaaggggggggaattaaaaaagaaaaacggcgggccgcgtttaaaacacagcgtcggcgcgggaaaacagcgcctcgatggggatactccggggggaagacaccccccactgggcggcgccggcagcaattgcggacccccccccacggagaattagcggccgggcggccacaaccaacctacgctgcttatgggcaacccgcggcattgtcgcgcgagaaatgctccgcatttttgaaatatggagctaacgcaaccaacgcaacgagccgcaaacgaagagagaaacggcggacacagagtacacacaaagan

SEQ ID NO: 61216 - DNA, 2569 bp, Homo sapiens
  misc_feature (2569)..(2569): n is a, c, g, or t
cccggcgacttaacgcgcccccgccccgcgcccggcctcggcagccgcctgtcgccgcgggagcagccgctatctctgtgtgtccgcgtgtgcgcccggtccccgcctgccgcaccatggagagctaccacaagcctgaccagcagaagctgcaggccttgaaggacacggccaaccgcctacgtatcagctccatccaggccaccactgcggcgggctctggccaccccacgtcatgctgcagcgccgcagagatcatggctgtcctctttttccacaccatgcgctacaagtcccaggacccccggaatccgcacaatgaccgctttgtgctctccaagggccatgcagctcccatcctctacgcggtctgggctgaagctggtttcctggccgaggcggagctgctgaacctgaggaagatcagctccgacttggacgggcacccggtcccgaaacaagctttcaccgacgtggccactggctccctgggccagggcctcggggccgcttgtgggatggcctacaccggcaaatacttcgacaaggccagctaccgagtctattgcttgctgggagacggggagctgtcagagggctctgtatgggaggccatggccttcgccagcatctataagctggacaaccttgtggccattctagacatcaatcgcctgggccagagtgacccggccccactgcagcaccagatggacatctaccagaagcggtgcgaggccttcggttggcatgccatcatcgtggatggacacagcgtggaggagctgtgcaaggcctttggccaggccaagcaccagccaacagccatcattgccaagaccttcaagggccgagggatcacgggggtagaagataaggagtcttggcatgggaagcccctccccaaaaacatggctgagcagatcatccaggagatctacagccagatccagagcaaaaagaagatcctggcaacccctccacaggaggacgcaccctcagtggacattgccaacatccgcatgcccagcctgcccagctacaaagttggggacaagatagccacccgcaaggcctacgggcaggcactggccaagctgggccatgccagtgaccgcatcatcgccctggatggggacaccaaaaattccaccttctcggagatcttcaaaaaggagcacccggaccgcttcatcgagtgctacattgctgagcagaacatggtgagcatcgcggtgggctgtgccacccgcaacaggacggtgcccttctgcagcacttttgcagccttcttcacgcgggcctttgaccagattcgcatggccgccatctccgagagcaacatcaacctctgcggctcccactgcggcgtttccatcggggaagacgggccctcccagatggccctagaagatctggctatgtttcggtcagtccccacatcaactgtcttttacccaagtgatggcgttgctacagagaaggcagtggaactagccgccaatacaaagggtatctgcttcatccggaccagccgcccagaaaatgccatcatctataacaacaatgaggacttccaggtcggacaagccaaggtggtcctgaagagcaaggatgaccaggtgaccgttatcggggctggggtgaccctgcacgaggccttggccgctgccgaactgctgaagaaagaaaagatcaacatccgcgtgctggaccccttcaccatcaagcccctggacagaaaactcattctcgacagcgctcgtgccaccaagggcaggatcctcaccgtggaggaccattattatgaaggtggcattggtgaggctgtgtccagtgcagtagtgggcgagcctggcatcactgtcacccacctggcagttaaccgggtaccaagaagtgggaagccggctgagctgctgaagatgtttggtatcgacagggatgccattgcacaagctgtgaggggcctcatcaccaaggcctagggcgggtatgaagtgtggggcgggggtctatacattcctgagattctgggaaaggtgctcaaagatgtactgagaggaggggtaaatatatgttttgagaaaaatgaaaaaaaaaacaaaaaaaaaaaaaaaaaaaaaaaaaaaaaaaaaacaaacgaaaagagaataaaagaaaacgaagaaagaaaaaaacaaaacaactaacacatgacaccgaagcacaacacaaccaccaccaacgggcgggcggcgccgccaaccaccacagcccgccgggccggggcccaggaacccaacgacaccgccgcacaggatcaggcaaaagcgcggccaacccaggggacagccgaaaaataatgaacgaacgacccgcggcgctctccaaaccgacccagcagacgagccaagccagccctgacgccgagacggagtcgagagagcaaccaccacaggtggggaggagacaaagggccaacacacaaccgacaggcaaaacgccgcgggacgacaccactgcagcggtcaggaccgcacccaccgacaaccgcccggagaacacctgaccagactgaaaaatagan

SEQ ID NO: 61217 - DNA, 2137 bp, Homo sapiens
cccggcgacttaacgcgcccccgccccgcgcccggcctcggcagccgcctgtcgccgcgggagcagccgctatctctgtgtgtccgcgtgtgcgcccggtccccgcctgccgcaccatggagagctaccacaagcctgaccagcagaagctgcaggccttgaaggacacggccaaccgcctacgtatcagctccatccaggccaccactgcggcgggctctggccaccccacgtcatgctgcagcgccgcagagatcatggctgtcctctttttccacaccatgcgctacaagtcccaggacccccggaatccgcacaatgaccgctttgtgctctccaagggccatgcagctcccatcctctacgcggtctgggctgaagctggtttcctggccgaggcggagctgctgaacctgaggaagatcagctccgacttggacgggcacccggtcccgaaacaagctttcaccgacgtggccactggctccctgggccagggcctcggggccgcttgtgggatggcctacaccggcaaatacttcgacaaggccagctaccgagtctattgcttgctgggagacggggagctgtcagagggctctgtatgggaggccatggccttcgccagcatctataagctggacaaccttgtggccattctagacatcaatcgcctgggccagagtgacccggccccactgcagcaccagatggacatctaccagaagcggtgcgaggccttcggttggcatgccatcatcgtggatggacacagcgtggaggagctgtgcaaggcctttggccaggccaagcaccagccaacagccatcattgccaagaccttcaagggccgagggatcacgggggtagaagataaggagtcttggcatgggaagcccctccccaaaaacatggctgagcagatcatccaggagatctacagccagatccagagcaaaaagaagatcctggcaacccctccacaggaggacgcaccctcagtggacattgccaacatccgcatgcccagcctgcccagctacaaagttggggacaagatagccacccgcaaggcctacgggcaggcactggccaagctgggccatgccagtgaccgcatcatcgccctggatggggacaccaaaaattccaccttctcggagatcttcaaaaaggagcacccggaccgcttcatcgagtgctacattgctgagcagaacatggtgagcatcgcggtgggctgtgccacccgcaacaggacggtgcccttctgcagcacttttgcagccttcttcacgcgggcctttgaccagattcgcatggccgccatctccgagagcaacatcaacctctgcggctcccactgcggcgtttccatcggggaagacgggccctcccagatggccctagaagatctggctatgtttcggtcagtccccacatcaactgtcttttacccaagtgatggcgttgctacagagaaggcagtggaactagccgccaatacaaagggtatctgcttcatccggaccagccgcccagaaaatgccatcatctataacaacaatgaggacttccaggtcggacaagccaaggtggtcctgaagagcaaggatgaccaggtgaccgttatcggggctggggtgaccctgcacgaggccttggccgctgccgaactgctgaagaaagaaaagatcaacatccgcgtgctggaccccttcaccatcaagcccctggacagaaaactcattctcgacagcgctcgtgccaccaagggcaggatcctcaccgtggaggaccattattatgaaggtggcattggtgaggctgtgtccagtgcagtagtgggcgagcctggcatcactgtcacccacctggcagttaaccgggtaccaagaagtgggaagccggctgagctgctgaagatgtttggtatcgacagggatgccattgcacaagctgtgaggggcctcatcaccaaggcctagggcgggtatgaagtgtggggcgggggtctatacattcctgagattctgggaaaggtgctcaaagatgtactgagaggaggggtaaatatatgttttgagaaaaatgaacgggaacaatgacaacaacacccccccccaaaaacccccgg

SEQ ID NO: 61218 - DNA, 2619 bp, Homo sapiens
cccggcgacttaacgcgcccccgccccgcgcccggcctcggcagccgcctgtcgccgcgggagcagccgctatctctgtgtgtccgcgtgtgcgcccggtccccgcctgccgcaccatggagagctaccacaagcctgaccagcagaagctgcaggccttgaaggacacggccaaccgcctacgtatcagctccatccaggccaccactgcggcgggctctggccaccccacgtcatgctgcagcgccgcagagatcatggctgtcctctttttccacaccatgcgctacaagtcccaggacccccggaatccgcacaatgaccgctttgtgctctccaagggccatgcagctcccatcctctacgcggtctgggctgaagctggtttcctggccgaggcggagctgctgaacctgaggaagatcagctccgacttggacgggcacccggtcccgaaacaagctttcaccgacgtggccactggctccctgggccagggcctcggggccgcttgtgggatggcctacaccggcaaatacttcgacaaggccagctaccgagtctattgcttgctgggagacggggagctgtcagagggctctgtatgggaggccatggccttcgccagcatctataagctggacaaccttgtggccattctagacatcaatcgcctgggccagagtgacccggccccactgcagcaccagatggacatctaccagaagcggtgcgaggccttcggttggcatgccatcatcgtggatggacacagcgtggaggagctgtgcaaggcctttggccaggccaagcaccagccaacagccatcattgccaagaccttcaagggccgagggatcacgggggtagaagataaggagtcttggcatgggaagcccctccccaaaaacatggctgagcagatcatccaggagatctacagccagatccagagcaaaaagaagatcctggcaacccctccacaggaggacgcaccctcagtggacattgccaacatccgcatgcccagcctgcccagctacaaagttggggacaagatagccacccgcaaggcctacgggcaggcactggccaagctgggccatgccagtgaccgcatcatcgccctggatggggacaccaaaaattccaccttctcggagatcttcaaaaaggagcacccggaccgcttcatcgagtgctacattgctgagcagaacatggtgagcatcgcggtgggctgtgccacccgcaacaggacggtgcccttctgcagcacttttgcagccttcttcacgcgggcctttgaccagattcgcatggccgccatctccgagagcaacatcaacctctgcggctcccactgcggcgtttccatcggggaagacgggccctcccagatggccctagaagatctggctatgtttcggtcagtccccacatcaactgtcttttacccaagtgatggcgttgctacagagaaggcagtggaactagccgccaatacaaagggtatctgcttcatccggaccagccgcccagaaaatgccatcatctataacaacaatgaggacttccaggtcggacaagccaaggtggtcctgaagagcaaggatgaccaggtgaccgttatcggggctggggtgaccctgcacgaggccttggccgctgccgaactgctgaagaaagaaaagatcaacatccgcgtgctggaccccttcaccatcaagcccctggacagaaaactcattctcgacagcgctcgtgccaccaagggcaggatcctcaccgtggaggaccattattatgaaggtggcattggtgaggctgtgtccagtgcagtagtgggcgagcctggcatcactgtcacccacctggcagttaaccgggtaccaagaagtgggaagccggctgagctgctgaagatgtttggtatcgacagggatgccattgcacaagctgtgaggggcctcatcaccaaggcctagggcgggtatgaagtgtggggcgggggtctatacattcctgagattctgggaaaggtgctcaaagatgtactgagaggaggggtaaatatatgttttgagaaaaatgaaactgacacaaaaacaacaaaaaaacaaacacaacaaacaaaacaaaacaacacaggggggggacggcctaaaagaaatcctcccgaggggggggcccaaacgtttacgcggagtcacaccgggattttcgtgggaaccagaggcgggcccctacagtagaggcaggccggcattaattagcgccagggacagcgcgaccggcgggtttacacaaacgtccgcggagcagcgggggaaaaactccgtctcccacgaggggaacctgttggagggagagagacccactaaactacgcagggaggggggcagccaaaaatattgtggggcgacaacacttaccccttacaaggaagaagttattaaagaacgccctactaagggggaaagatatatcaagacattcgttgacacgggcgtcaataaggggtgcttacacaataaaccgagaaatatgcaataacacggatgaagaacagttggtgcgcaccactgagagtctttgtattttcgcgaccaattttca

SEQ ID NO: 61219 - DNA, 2117 bp, Homo sapiens
cccggcgacttaacgcgcccccgccccgcgcccggcctcggcagccgcctgtcgccgcgggagcagccgctatctctgtgtgtccgcgtgtgcgcccggtccccgcctgccgcaccatggagagctaccacaagcctgaccagcagaagctgcaggccttgaaggacacggccaaccgcctacgtatcagctccatccaggccaccactgcggcgggctctggccaccccacgtcatgctgcagcgccgcagagatcatggctgtcctctttttccacaccatgcgctacaagtcccaggacccccggaatccgcacaatgaccgctttgtgctctccaagggccatgcagctcccatcctctacgcggtctgggctgaagctggtttcctggccgaggcggagctgctgaacctgaggaagatcagctccgacttggacgggcacccggtcccgaaacaagctttcaccgacgtggccactggctccctgggccagggcctcggggccgcttgtgggatggcctacaccggcaaatacttcgacaaggccagctaccgagtctattgcttgctgggagacggggagctgtcagagggctctgtatgggaggccatggccttcgccagcatctataagctggacaaccttgtggccattctagacatcaatcgcctgggccagagtgacccggccccactgcagcaccagatggacatctaccagaagcggtgcgaggccttcggttggcatgccatcatcgtggatggacacagcgtggaggagctgtgcaaggcctttggccaggccaagcaccagccaacagccatcattgccaagaccttcaagggccgagggatcacgggggtagaagataaggagtcttggcatgggaagcccctccccaaaaacatggctgagcagatcatccaggagatctacagccagatccagagcaaaaagaagatcctggcaacccctccacaggaggacgcaccctcagtggacattgccaacatccgcatgcccagcctgcccagctacaaagttggggacaagatagccacccgcaaggcctacgggcaggcactggccaagctgggccatgccagtgaccgcatcatcgccctggatggggacaccaaaaattccaccttctcggagatcttcaaaaaggagcacccggaccgcttcatcgagtgctacattgctgagcagaacatggtgagcatcgcggtgggctgtgccacccgcaacaggacggtgcccttctgcagcacttttgcagccttcttcacgcgggcctttgaccagattcgcatggccgccatctccgagagcaacatcaacctctgcggctcccactgcggcgtttccatcggggaagacgggccctcccagatggccctagaagatctggctatgtttcggtcagtccccacatcaactgtcttttacccaagtgatggcgttgctacagagaaggcagtggaactagccgccaatacaaagggtatctgcttcatccggaccagccgcccagaaaatgccatcatctataacaacaatgaggacttccaggtcggacaagccaaggtggtcctgaagagcaaggatgaccaggtgaccgttatcggggctggggtgaccctgcacgaggccttggccgctgccgaactgctgaagaaagaaaagatcaacatccgcgtgctggaccccttcaccatcaagcccctggacagaaaactcattctcgacagcgctcgtgccaccaagggcaggatcctcaccgtggaggaccattattatgaaggtggcattggtgaggctgtgtccagtgcagtagtgggcgagcctggcatcactgtcacccacctggcagttaaccgggtaccaagaagtgggaagccggctgagctgctgaagatgtttggtatcgacagggatgccattgcacaagctgtgaggggcctcatcaccaaggcctagggcgggtatgaagtgtggggcgggggtctatacattcctgagattctgggaaaggtgctcaaagatgtactgagaggaggggtaaatatatgttttgagaaaaatgaacacctttcccacgatctcagg

SEQ ID NO: 61220 - DNA, 2038 bp, Homo sapiens
cggacgcgtgggtcgacccacgcgtccgcgtgtgcgcccggtccccgcctgccgcaccatggagagctaccacaagcctgaccagcagaagctgcaggccttgaaggacacggccaaccgcctacgtatcagctccatccaggccaccactgcggcgggctctggccaccccacgtcatgctgcagcgccgcagagatcatggctgtcctctttttccacaccatgcgctacaagtcccaggacccccggaatccgcacaatgaccgctttgtgctctccaagggccatgcagctcccatcctctacgcggtctgggctgaagctggtttcctggccgaggcggagctgctgaacctgaggaagatcagctccgacttggacgggcacccggtcccgaaacaagctttcaccgacgtggccactggctccctgggccagggcctcggggccgcttgtgggatggcctacaccggcaaatacttcgacaaggccagctaccgagtctattgcttgctgggagacggggagctgtcagagggctctgtatgggaggccatggccttcgccagcatctataagctggacaaccttgtggccattctagacatcaatcgcctgggccagagtgacccggccccactgcagcaccagatggacatctaccagaagcggtgcgaggccttcggttggcatgccatcatcgtggatggacacagcgtggaggagctgtgcaaggcctttggccaggccaagcaccagccaacagccatcattgccaagaccttcaagggccgagggatcacgggggtagaagataaggagtcttggcatgggaagcccctccccaaaaacatggctgagcagatcatccaggagatctacagccagatccagagcaaaaagaagatcctggcaacccctccacaggaggacgcaccctcagtggacattgccaacatccgcatgcccagcctgcccagctacaaagttggggacaagatagccacccgcaaggcctacgggcaggcactggccaagctgggccatgccagtgaccgcatcatcgccctggatggggacaccaaaaattccaccttctcggagatcttcaaaaaggagcacccggaccgcttcatcgagtgctacattgctgagcagaacatggtgagcatcgcggtgggctgtgccacccgcaacaggacggtgcccttctgcagcacttttgcagccttcttcacgcgggcctttgaccagattcgcatggccgccatctccgagagcaacatcaacctctgcggctcccactgcggcgtttccatcggggaagacgggccctcccagatggccctagaagatctggctatgtttcggtcagtccccacatcaactgtcttttacccaagtgatggcgttgctacagagaaggcagtggaactagccgccaatacaaagggtatctgcttcatccggaccagccgcccagaaaatgccatcatctataacaacaatgaggacttccaggtcggacaagccaaggtggtcctgaagagcaaggatgaccaggtgaccgttatcggggctggggtgaccctgcacgaggccttggccgctgccgaactgctgaagaaagaaaagatcaacatccgcgtgctggaccccttcaccatcaagcccctggacagaaaactcattctcgacagcgctcgtgccaccaagggcaggatcctcaccgtggaggaccattattatgaaggtggcattggtgaggctgtgtccagtgcagtagtgggcgagcctggcatcactgtcacccacctggcagttaaccgggtaccaagaagtgggaagccggctgagctgctgaagatgtttggtatcgacagggatgccattgcacaagctgtgaggggcctcatcaccaaggcctagggcgggtatgaagtgtggggcgggggtctatacattcctgagattctgggaaaggtgctcaaagatgtactgagaggaggggtaaatatatgttttgagaaaaatgaa

SEQ ID NO: 61221 - DNA, 1996 bp, Homo sapiens
cccggcgacttaacgcgcccccgccccgcgcccggcctcggcagccgcctgtcgccgcgggagcagccgctatctctgtgtgtccgcgtgtgcgcccggtccccgcctgccgcaccatggagagctaccacaagcctgaccagcagaagctgcaggccttgaaggacacggccaaccgcctacgtatcagctccatccaggccaccactgcggcgggctctggccaccccacgtcatgctgcagcgccgcagagatcatggctgtcctctttttccacaccatgcgctacaagtcccaggacccccggaatccgcacaatgaccgctttgtgctctccaagggccatgcagctcccatcctctacgcggtctgggctgaagctggtttcctggccgaggcggagctgctgaacctgaggaagatcagctccgacttggacgggcacccggtcccgaaacaagctttcaccgacgtggccactggctccctgggccagggcctcggggccgcttgtgggatggcctacaccggcaaatacttcgacaaggccagctaccgagtctattgcttgctgggagacggggagctgtcagagggctctgtatgggaggccatggccttcgccagcatctataagctggacaaccttgtggccattctagacatcaatcgcctgggccagagtgacccggccccactgcagcaccagatggacatctaccagaagcggtgcgaggccttcggttggcatgccatcatcgtggatggacacagcgtggaggagctgtgcaaggcctttggccaggccaagcaccagccaacagccatcattgccaagaccttcaagggccgagggatcacgggggtagaagataaggagtcttggcatgggaagcccctccccaaaaacatggctgagcagatcatccaggagatctacagccagatccagagcaaaaagaagatcctggcaacccctccacaggaggacgcaccctcagtggacattgccaacatccgcatgcccagcctgcccagctacaaagttggggacaagatagccacccgcaaggcctacgggcaggcactggccaagctgggccatgccagtgaccgcatcatcgccctggatggggacaccaaaaattccaccttctcggagatcttcaaaaaggagcacccggaccgcttcatcgagtgctacattgctgagcagaacatggtgagcatcgcggtgggctgtgccacccgcaacaggacggtgcccttctgcagcacttttgcagccttcttcacgcgggcctttgaccagattcgcatggccgccatctccgagagcaacatcaacctctgcggctcccactgcggcgtttccatcggggaagacgggccctcccagatggccctagaagatctggctatgtttcggtcagtccccacatcaactgtcttttacccaagtgatggcgttgctacagagaaggcagtggaactagccgccaatacaaagggtatctgcttcatccggaccagccgcccagaaaatgccatcatctataacaacaatgaggacttccaggtcggacaagccaaggtggtcctgaagagcaaggatgaccaggtgaccgttatcggggctggggtgaccctgcacgaggccttggccgctgccgaactgctgaagaaagaaaagatcaacatccgcgtgctggaccccttcaccatcaagcccctggacagaaaactcattctcgacagcgctcgtgccaccaagggcaggatcctcaccgtggaggaccattattatgaaggtggcattggtgaggctgtgtccagtgcagtagtgggcgagcacaagctgtgaggggcctcatcaccaaggcctagggcgggtatgaagtgtggggcgggggtctatacattcctgagattctgggaaaggtgctcaaagatgtactgagaggaggggtaaatatatgttttgagaaaaatgaa

SEQ ID NO: 61222 - DNA, 2057 bp, Homo sapiens
gggacaatagcatagaagcggtgtatcgcgaggcgcttgcgtagatcgcgctattcttgttcgagttcgccggtcccgctgcgacagagagtacaaagctacagcagaagctgcaggccttgaaggacacggccaaccgcctacgtatcagctccatccaggccaccactgcggcgggctctggccaccccacgtcatgctgcagcgccgcagagatcatggctgtcctctttttccacaccatgcgctacaagtcccaggacccccggaatccgcacaatgaccgctttgtgctctccaagggccatgcagctcccatcctctacgcggtctgggctgaagctggtttcctggccgaggcggagctgctgaacctgaggaagatcagctccgacttggacgggcacccggtcccgaaacaagctttcaccgacgtggccactggctccctgggccagggcctcggggccgcttgtgggatggcctacaccggcaaatacttcgacaaggccagctaccgagtctattgcttgctgggagacggggagctgtcagagggctctgtatgggaggccatggccttcgccagcatctataagctggacaaccttgtggccattctagacatcaatcgcctgggccagagtgacccggccccactgcagcaccagatggacatctaccagaagcggtgcgaggccttcggttggcatgccatcatcgtggatggacacagcgtggaggagctgtgcaaggcctttggccaggccaagcaccagccaacagccatcattgccaagaccttcaagggccgagggatcacgggggtagaagataaggagtcttggcatgggaagcccctccccaaaaacatggctgagcagatcatccaggagatctacagccagatccagagcaaaaagaagatcctggcaacccctccacaggaggacgcaccctcagtggacattgccaacatccgcatgcccagcctgcccagctacaaagttggggacaagatagccacccgcaaggcctacgggcaggcactggccaagctgggccatgccagtgaccgcatcatcgccctggatggggacaccaaaaattccaccttctcggagatcttcaaaaaggagcacccggaccgcttcatcgagtgctacattgctgagcagaacatggtgagcatcgcggtgggctgtgccacccgcaacaggacggtgcccttctgcagcacttttgcagccttcttcacgcgggcctttgaccagattcgcatggccgccatctccgagagcaacatcaacctctgcggctcccactgcggcgtttccatcggggaagacgggccctcccagatggccctagaagatctggctatgtttcggtcagtccccacatcaactgtcttttacccaagtgatggcgttgctacagagaaggcagtggaactagccgccaatacaaagggtatctgcttcatccggaccagccgcccagaaaatgccatcatctataacaacaatgaggacttccaggtcggacaagccaaggtggtcctgaagagcaaggatgaccaggtgaccgttatcggggctggggtgaccctgcacgaggccttggccgctgccgaactgctgaagaaagaaaagatcaacatccgcgtgctggaccccttcaccatcaagcccctggacagaaaactcattctcgacagcgctcgtgccaccaagggcaggatcctcaccgtggaggaccattattatgaaggtggcattggtgaggctgtgtccagtgcagtagtgggcgagcctggcatcactgtcacccacctggcagttaaccgggtaccaagaagtgggaagccggctgagctgctgaagatgtttggtatcgacagggatgccattgcacaagctgtgaggggcctcatcaccaaggcctagggcgggtatgaagtgtggggcgggggtctatacattcctgagattctgggaaaggtgctcaaagatgtactgagaggaggggtaaatatatgttttgagaaaaatgaa

SEQ ID NO: 61223 - DNA, 2101 bp, Homo sapiens
  misc_feature (208)..(208): n is a, c, g, or t
gcgcctgtctgccgccgagagatgcgacgacagctatcatactagtgtgtacagcgatgtgcaccgcggtcactctcgctagcgagctcctactggagaagctaccagcaaagcctagtagccgatgcacgaacgtcgtcgtccgtgccttgaacggacaacggttcactctccgtcgtaacgtagtacaagcttccatgctacggcnaccactgcggcgggctctggccaccccacgtcatgctgcagcgccgcagagatcatggctgtcctctttttccacaccatgcgctacaagtcccaggacccccggaatccgcacaatgaccgctttgtgctctccaagggccatgcagctcccatcctctacgcggtctgggctgaagctggtttcctggccgaggcggagctgctgaacctgaggaagatcagctccgacttggacgggcacccggtcccgaaacaagctttcaccgacgtggccactggctccctgggccagggcctcggggccgcttgtgggatggcctacaccggcaaatacttcgacaaggccagctaccgagtctattgcttgctgggagacggggagctgtcagagggctctgtatgggaggccatggccttcgccagcatctataagctggacaaccttgtggccattctagacatcaatcgcctgggccagagtgacccggccccactgcagcaccagatggacatctaccagaagcggtgcgaggccttcggttggcatgccatcatcgtggatggacacagcgtggaggagctgtgcaaggcctttggccaggccaagcaccagccaacagccatcattgccaagaccttcaagggccgagggatcacgggggtagaagataaggagtcttggcatgggaagcccctccccaaaaacatggctgagcagatcatccaggagatctacagccagatccagagcaaaaagaagatcctggcaacccctccacaggaggacgcaccctcagtggacattgccaacatccgcatgcccagcctgcccagctacaaagttggggacaagatagccacccgcaaggcctacgggcaggcactggccaagctgggccatgccagtgaccgcatcatcgccctggatggggacaccaaaaattccaccttctcggagatcttcaaaaaggagcacccggaccgcttcatcgagtgctacattgctgagcagaacatggtgagcatcgcggtgggctgtgccacccgcaacaggacggtgcccttctgcagcacttttgcagccttcttcacgcgggcctttgaccagattcgcatggccgccatctccgagagcaacatcaacctctgcggctcccactgcggcgtttccatcggggaagacgggccctcccagatggccctagaagatctggctatgtttcggtcagtccccacatcaactgtcttttacccaagtgatggcgttgctacagagaaggcagtggaactagccgccaatacaaagggtatctgcttcatccggaccagccgcccagaaaatgccatcatctataacaacaatgaggacttccaggtcggacaagccaaggtggtcctgaagagcaaggatgaccaggtgaccgttatcggggctggggtgaccctgcacgaggccttggccgctgccgaactgctgaagaaagaaaagatcaacatccgcgtgctggaccccttcaccatcaagcccctggacagaaaactcattctcgacagcgctcgtgccaccaagggcaggatcctcaccgtggaggaccattattatgaaggtggcattggtgaggctgtgtccagtgcagtagtgggcgagcctggcatcactgtcacccacctggcagttaaccgggtaccaagaagtgggaagccggctgagctgctgaagatgtttggtatcgacagggatgccattgcacaagctgtgaggggcctcatcaccaaggcctagggcgggtatgaagtgtggggcgggggtctatacattcctgagattctgggaaaggtgctcaaagatgtactgagaggaggggtaaatatatgttttgagaaaaatgaa

SEQ ID NO: 61224 - DNA, 1586 bp, Homo sapiens
cccggcgacttaacgcgcccccgccccgcgcccggcctcggcagccgcctgtcgccgcgggagcagccgctatctctgtgtgtccgcgtgtgcgcccggtccccgcctgccgcaccatggagagctaccacaagcctgaccagcagaagctgcaggccttgaaggacacggccaaccgcctacgtatcagctccatccaggccaccactgcggcgggctctggccaccccacgtcatgctgcagcgccgcagagatcatggctgtcctctttttccacaccatgcgctacaagtcccaggacccccggaatccgcacaatgaccgctttgtgctctccaagggccatgcagctcccatcctctacgcggtctgggctgaagctggtttcctggccgaggcggagctgctgaacctgaggaagatcagctccgacttggacgggcacccggtcccgaaacaagctttcaccgacgtggccactggctccctgggccagggcctcggggccgcttgtgggatggcctacaccggcaaatacttcgacaaggccagctaccgagtctattgcttgctgggagacggggagctgtcagagggctctgtatgggaggccatggccttcgccagcatctataagctggacaaccttgtggccattctagacatcaatcgcctgggccagagtgacccggccccactgcagcaccagatggacatctaccagaagcggtgcgaggccttcggttggcatgccatcatcgtggatggacacagcgtggaggagctgtgcaaggcctttggccaggccaagcaccagccaacagccatcattgccaagaccttcaagggccgagggatcacgggggtagaagataaggagtcttggcatgggaagcccctccccaaaaacatggctgagcagatcatccaggagatctacagccagatccagagcaaaaagaagatcctggcaacccctccacaggaggacgcaccctcagtggacattgccaacatccgcatgcccagcctgcccagctacaaagttggggacaagatagccacccgcaaggcctacgggcaggcactggccaagctgggccatgccagtgaccgcatcatcgccctggatggggacaccaaaaattccaccttctcggagatcttcaaaaaggagcacccggaccgcttcatcgagtgctacattgctgagcagaacatggtgagcatcgcggtgggctgtgccacccgcaacaggacggtgcccttctgcagcacttttgcagccttcttcacgcgggcctttgaccagattcgcatggccgccatctccgagagcaacatcaacctctgcggctcccactgcggcgtttccatcggggaagacgggccctcccagatggccctagaagatctggctatgtttcggtcagtccccacatcaactgtcttttacccaagtgatggcgttgctacagagaaggcagtggaactagccgccaatacaaagggtatctgcttcatccggaccagccgcgtagtcagatcgagccgcgtagtcagatcgagccgcgtagtcagatcg

SEQ ID NO: 61225 - DNA, 2123 bp, Homo sapiens
cccggcgacttaacgcgcccccgccccgcgcccggcctcggcagccgcctgtcgccgcgggagcagccgctatctctgtgtgtccgcgtgtgcgcccggtccccgcctgccgcaccatggagagctaccacaagcctgaccagcagaagctgcaggccttgaaggacacggccaaccgcctacgtatcagctccatccaggccaccactgcggcgggctctggccaccccacgtcatgctgcagcgccgcagagatcatggctgtcctctttttccacaccatgcgctacaagtcccaggacccccggaatccgcacaatgaccgctttgtgctctccaagggccatgcagctcccatcctctacgcggtctgggctgaagctggtttcctggccgaggcggagctgctgaacctgaggaagatcagctccgacttggacgggcacccggtcccgattaacggtggccttctgttatgacagaaacaagctttcaccgacgtggccactggctccctgggccagggcctcggggccgcttgtgggatggcctacaccggcaaatacttcgacaaggccagctaccgagtctattgcttgctgggagacggggagctgtcagagggctctgtatgggaggccatggccttcgccagcatctataagctggacaaccttgtggccattctagacatcaatcgcctgggccagagtgacccggccccactgcagcaccagatggacatctaccagaagcggtgcgaggccttcggttggcatgccatcatcgtggatggacacagcgtggaggagctgtgcaaggcctttggccaggccaagcaccagccaacagccatcattgccaagaccttcaagggccgagggatcacgggggtagaagataaggagtcttggcatgggaagcccctccccaaaaacatggctgagcagatcatccaggagatctacagccagatccagagcaaaaagaagatcctggcaacccctccacaggaggacgcaccctcagtggacattgccaacatccgcatgcccagcctgcccagctacaaagttggggacaagatagccacccgcaaggcctacgggcaggcactggccaagctgggccatgccagtgaccgcatcatcgccctggatggggacaccaaaaattccaccttctcggagatcttcaaaaaggagcacccggaccgcttcatcgagtgctacattgctgagcagaacatggtgagcatcgcggtgggctgtgccacccgcaacaggacggtgcccttctgcagcacttttgcagccttcttcacgcgggcctttgaccagattcgcatggccgccatctccgagagcaacatcaacctctgcggctcccactgcggcgtttccatcggggaagacgggccctcccagatggccctagaagatctggctatgtttcggtcagtccccacatcaactgtcttttacccaagtgatggcgttgctacagagaaggcagtggaactagccgccaatacaaagggtatctgcttcatccggaccagccgcccagaaaatgccatcatctataacaacaatgaggacttccaggtcggacaagccaaggtggtcctgaagagcaaggatgaccaggtgaccgttatcggggctggggtgaccctgcacgaggccttggccgctgccgaactgctgaagaaagaaaagatcaacatccgcgtgctggaccccttcaccatcaagcccctggacagaaaactcattctcgacagcgctcgtgccaccaagggcaggatcctcaccgtggaggaccattattatgaaggtggcattggtgaggctgtgtccagtgcagtagtgggcgagcctggcatcactgtcacccacctggcagttaaccgggtaccaagaagtgggaagccggctgagctgctgaagatgtttggtatcgacagggatgccattgcacaagctgtgaggggcctcatcaccaaggcctagggcgggtatgaagtgtggggcgggggtctatacattcctgagattctgggaaaggtgctcaaagatgtactgagaggaggggtaaatatatgttttgagaaaaatgaa

SEQ ID NO: 61226 - DNA, 1389 bp, Homo sapiens
cccggcgacttaacgcgcccccgccccgcgcccggcctcggcagccgcctgtcgccgcgggagcagccgctatctctgtgtgtccgcgtgtgcgcccggtccccgcctgccgcaccatggagagctaccacaagcctgaccagcagaagctgcaggccttgaaggacacggccaaccgcctacgtatcagctccatccaggccaccactgcggcgggctctggccaccccacgtcatgctgcagcgccgcagagatcatggctgtcctctttttccacaccatgcgctacaagtcccaggacccccggaatccgcacaatgaccgctttgtgctctccaagggccatgcagctcccatcctctacgcggtctgggctgaagctggtttcctggccgaggcggagctgctgaacctgaggaagatcagctccgacttggacgggcacccggtcccgaaacaagctttcaccgacgtggccactggctccctgggccagggcctcggggccgcttgtgggatggcctacaccggcaaatacttcgacaaggccagctaccgagtctattgcttgctgggagacggggagctgtcagagggctctgtatgggaggccatggccttcgccagcatctataagctggacaaccttgtggccattctagacatcaatcgcctgggccagagtgacccggccccactgcagcaccagatggacatctaccagaagcggtgcgaggccttcggttggcatgccatcatcgtggatggacacagcgtggaggagctgtgcaaggcctttggccaggccaagcaccagccaacagccatcattgccaagaccttcaagggccgagggatcacgggggtagaagataaggagtcttggcatgggaagcccctccccaaaaacatggctgagcagatcatccaggagatctacagccagatccagagcaaaaagaagatcctggcaacccctccacaggaggacgcaccctcagtggacattgccaacatccgcatgcccagcctgcccagctacaaagttggggacaagatagccacccgcaaggcctacgggcaggcactggccaagctgggccatgccagtgaccgcatcatcgccctggatggggacaccaaaaattccaccttctcggagatcttcaaaaaggagcacccggaccgcttcatcgagtgctacattgctgagcagaacatggtgagcatcgcggtgggctgtgccacccgcaacaggacggtgcccttctgcagcacttttgcagccttcttcacgcgggcctttgaccagattcgcatggccgccatctccgagagcaacatcaacctgtcgacagtcgcaacctggtcacagtctggcccaggta

SEQ ID NO: 61227 - DNA, 1976 bp, Homo sapiens
cccggcgacttaacgcgcccccgccccgcgcccggcctcggcagccgcctgtcgccgcgggagcagccgctatctctgtgtgtccgcgtgtgcgcccggtccccgcctgccgcaccatggagagctaccacaagcctgaccagcagaagctgcaggccttgaaggacacggccaaccgcctacgtatcagctccatccaggccaccactgcggcgggctctggccaccccacgtcatgctgcagcgccgcagagatcatggctgtcctctttttccacaccatgcgctacaagtcccaggacccccggaatccgcacaatgaccgctttgtgctctccaagggccatgcagctcccatcctctacgcggtctgggctgaagctggtttcctggccgaggcggagctgctgaacctgaggaagatcagctccgattgtgggatggcctacaccggcaaatacttcgacaaggccaggggctctgtatgggaggccatggccttcgccagcatctataagctggacaaccttgtggccattctagacatcaatcgcctgggccagagtgacccggccccactgcagcaccagatggacatctaccagaagcggtgcgaggccttcggttggcatgccatcatcgtggatggacacagcgtggaggagctgtgcaaggcctttggccaggccaagcaccagccaacagccatcattgccaagaccttcaagggccgagggatcacgggggtagaagataaggagtcttggcatgggaagcccctccccaaaaacatggctgagcagatcatccaggagatctacagccagatccagagcaaaaagaagatcctggcaacccctccacaggaggacgcaccctcagtggacattgccaacatccgcatgcccagcctgcccagctacaaagttggggacaagatagccacccgcaaggcctacgggcaggcactggccaagctgggccatgccagtgaccgcatcatcgccctggatggggacaccaaaaattccaccttctcggagatcttcaaaaaggagcacccggaccgcttcatcgagtgctacattgctgagcagaacatggtgagcatcgcggtgggctgtgccacccgcaacaggacggtgcccttctgcagcacttttgcagccttcttcacgcgggcctttgaccagattcgcatggccgccatctccgagagcaacatcaacctctgcggctcccactgcggcgtttccatcggggaagacgggccctcccagatggccctagaagatctggctatgtttcggtcagtccccacatcaactgtcttttacccaagtgatggcgttgctacagagaaggcagtggaactagccgccaatacaaagggtatctgcttcatccggaccagccgcccagaaaatgccatcatctataacaacaatgaggacttccaggtcggacaagccaaggtggtcctgaagagcaaggatgaccaggtgaccgttatcggggctggggtgaccctgcacgaggccttggccgctgccgaactgctgaagaaagaaaagatcaacatccgcgtgctggaccccttcaccatcaagcccctggacagaaaactcattctcgacagcgctcgtgccaccaagggcaggatcctcaccgtggaggaccattattatgaaggtggcattggtgaggctgtgtccagtgcagtagtgggcgagcctggcatcactgtcacccacctggcagttaaccgggtaccaagaagtgggaagccggctgagctgctgaagatgtttggtatcgacagggatgccattgcacaagctgtgaggggcctcatcaccaaggcctagggcgggtatgaagtgtggggcgggggtctatacattcctgagattctgggaaaggtgctcaaagatgtactgagaggaggggtaaatatatgttttgagaaaaatgaa

SEQ ID NO: 61228 - DNA, 2030 bp, Homo sapiens
cccggcgacttaacgcgcccccgccccgcgcccggcctcggcagccgcctgtcgccgcgggagcagccgctatctctgtgtgtccgcgtgtgcgcccggtccccgcctgccgcaccatggagagctaccacaagcctgaccagcagaagctgcaggccttgaaggacacggccaaccgcctacgtatcagctccatccaggccaccactgcggcgggctctggccaccccacgtcatgctgcagcgccgcagagatcatggctgtcctctttttccacaccatgcgctacaagtcccaggacccccggaatccgcacaatgaccgctttgtgctctccaagggccatgcagctcccatcctctacgcggtctgggctgaagctggtttcctggccgaggcggagctgctgaacctgaggaagatcagctccgacttggacgggcacccggtcccgaaacaagctttcaccgacgtggccactggctccctgggccagggcctcggggccgcttgtgggatggcctacaccggcaaatacttcgacaaggccagcttcgccagcatctataagctggacaaccttgtggccattctagacatcaatcgcctgggccagagtgacccggccccactgcagcaccagatggacatctaccagaagcggtgcgaggccttcggttggcatgccatcatcgtggatggacacagcgtggaggagctgtgcaaggcctttggccaggccaagcaccagccaacagccatcattgccaagaccttcaagggccgagggatcacgggggtagaagataaggagtcttggcatgggaagcccctccccaaaaacatggctgagcagatcatccaggagatctacagccagatccagagcaaaaagaagatcctggcaacccctccacaggaggacgcaccctcagtggacattgccaacatccgcatgcccagcctgcccagctacaaagttggggacaagatagccacccgcaaggcctacgggcaggcactggccaagctgggccatgccagtgaccgcatcatcgccctggatggggacaccaaaaattccaccttctcggagatcttcaaaaaggagcacccggaccgcttcatcgagtgctacattgctgagcagaacatggtgagcatcgcggtgggctgtgccacccgcaacaggacggtgcccttctgcagcacttttgcagccttcttcacgcgggcctttgaccagattcgcatggccgccatctccgagagcaacatcaacctctgcggctcccactgcggcgtttccatcggggaagacgggccctcccagatggccctagaagatctggctatgtttcggtcagtccccacatcaactgtcttttacccaagtgatggcgttgctacagagaaggcagtggaactagccgccaatacaaagggtatctgcttcatccggaccagccgcccagaaaatgccatcatctataacaacaatgaggacttccaggtcggacaagccaaggtggtcctgaagagcaaggatgaccaggtgaccgttatcggggctggggtgaccctgcacgaggccttggccgctgccgaactgctgaagaaagaaaagatcaacatccgcgtgctggaccccttcaccatcaagcccctggacagaaaactcattctcgacagcgctcgtgccaccaagggcaggatcctcaccgtggaggaccattattatgaaggtggcattggtgaggctgtgtccagtgcagtagtgggcgagcctggcatcactgtcacccacctggcagttaaccgggtaccaagaagtgggaagccggctgagctgctgaagatgtttggtatcgacagggatgccattgcacaagctgtgaggggcctcatcaccaaggcctagggcgggtatgaagtgtggggcgggggtctatacattcctgagattctgggaaaggtgctcaaagatgtactgagaggaggggtaaatatatgttttgagaaaaatgaa

SEQ ID NO: 61229 - DNA, 2111 bp, Homo sapiens
cccggcgacttaacgcgcccccgccccgcgcccggcctcggcagccgcctgtcgccgcgggagcagccgctatctctgtgtgtccgcgtgtgcgcccggtccccgcctgccgcaccatggagagctaccacaagcctgaccagcagaagctgcaggccttgaaggacacggccaaccgcctacgtatcagctccatccaggccaccactgcggcgggctctggccaccccacgtcatgctgcagcgccgcagagatcatggctgtcctctttttccacaccatgcgctacaagtcccaggacccccggaatccgcacaatgaccgctttgtgctctccaagggccatgcagctcccatcctctacgcggtctgggctgaagctggtttcctggccgaggcggagctgctgaacctgaggaagatcagctccgacttggacgggcacccggtcccgaaacaagctttcaccgacgtggccactggctccctgggccagggcctcggggccgcttgtgggatggcctacaccggcaaatacttcgacaaggccagatggagtctcgctctgtcacccaggctggagtgcagtggtacgatctcggcccactgcaacctccgcctcccgggttcaagtgattctcctcctgcctcagcctcccgagtagctgggactacagacatcaatcgcctgggccagagtgacccggccccactgcagcaccagatggacatctaccagaagcggtgcgaggccttcggttggcatgccatcatcgtggatggacacagcgtggaggagctgtgcaaggcctttggccaggccaagcaccagccaacagccatcattgccaagaccttcaagggccgagggatcacgggggtagaagataaggagtcttggcatgggaagcccctccccaaaaacatggctgagcagatcatccaggagatctacagccagatccagagcaaaaagaagatcctggcaacccctccacaggaggacgcaccctcagtggacattgccaacatccgcatgcccagcctgcccagctacaaagttggggacaagatagccacccgcaaggcctacgggcaggcactggccaagctgggccatgccagtgaccgcatcatcgccctggatggggacaccaaaaattccaccttctcggagatcttcaaaaaggagcacccggaccgcttcatcgagtgctacattgctgagcagaacatggtgagcatcgcggtgggctgtgccacccgcaacaggacggtgcccttctgcagcacttttgcagccttcttcacgcgggcctttgaccagattcgcatggccgccatctccgagagcaacatcaacctctgcggctcccactgcggcgtttccatcggggaagacgggccctcccagatggccctagaagatctggctatgtttcggtcagtccccacatcaactgtcttttacccaagtgatggcgttgctacagagaaggcagtggaactagccgccaatacaaagggtatctgcttcatccggaccagccgcccagaaaatgccatcatctataacaacaatgaggacttccaggtcggacaagccaaggtggtcctgaagagcaaggatgaccaggtgaccgttatcggggctggggtgaccctgcacgaggccttggccgctgccgaactgctgaagaaagaaaagatcaacatccgcgtgctggaccccttcaccatcaagcccctggacagaaaactcattctcgacagcgctcgtgccaccaagggcaggatcctcaccgtggaggaccattattatgaaggtggcattggtgaggctgtgtccagtgcagtagtgggcgagcctggcatcactgtcacccacctggcagttaaccgggtaccaagaagtgggaagccggctgagctgctgaagatgtttggtatcgacagggatgccattgcacaagctgtgaggggcctcatcaccaaggcctagggcgggtatgaagtgtggggcgggggtctatacattcctgagattctgggaaaggtgctcaaagatgtactgagaggaggggtaaatatatgttttgagaaaaatgaa

SEQ ID NO: 61230 - DNA, 1970 bp, Homo sapiens
gcgtggtgaggcttcagtgggctaatatgggtagtggttggcatggcactcagtttgagaagtgctatttttattcttatgtcaaaaagagtccccaaaaggatagcttttcaagagaaagggtgctctgccccagctccttcctgtatatttgactccatggttcatttcaaaaacatttccagcaccacatccagcatctgtggagtgatcaaatgtgttccccaaataagaattgggccaaaaaattcatcaagaatctaatagcagacagattccaaacccagtgcgctgaccccagaacagctttcagtaggaaatgagcagatcaggaatgaaagagacaataaaggaactgagctctggattacttaagaggaggaggaaaacctgttcagaggcaaacaaaaggaagtaaaataatgtgaaaaagaaaaggatttaaaaaacccaaactggaaacaggaatgttgcaagctttctactactccagctgaggccgcagttgtggggtggagcctgggcagaccccagctgccaaggcagacctttccctggaaggctcctcggtgttgtggcccctgggaattgccccttactctctgccccctgtccccagttggcatgccatcatcgtggatggacacagcgtggaggagctgtgcaaggcctttggccaggccaagcaccagccaacagccatcattgccaagaccttcaagggccgagggatcacgggggtagaagataaggagtcttggcatgggaagcccctccccaaaaacatggctgagcagatcatccaggagatctacagccagatccagagcaaaaagaagatcctggcaacccctccacaggaggacgcaccctcagtggacattgccaacatccgcatgcccagcctgcccagctacaaagttggggacaagatagccacccgcaaggcctacgggcaggcactggccaagctgggccatgccagtgaccgcatcatcgccctggatggggacaccaaaaattccaccttctcggagatcttcaaaaaggagcacccggaccgcttcatcgagtgctacattgctgagcagaacatggtgagcatcgcggtgggctgtgccacccgcaacaggacggtgcccttctgcagcacttttgcagccttcttcacgcgggcctttgaccagattcgcatggccgccatctccgagagcaacatcaacctctgcggctcccactgcggcgtttccatcggggaagacgggccctcccagatggccctagaagatctggctatgtttcggtcagtccccacatcaactgtcttttacccaagtgatggcgttgctacagagaaggcagtggaactagccgccaatacaaagggtatctgcttcatccggaccagccgcccagaaaatgccatcatctataacaacaatgaggacttccaggtcggacaagccaaggtggtcctgaagagcaaggatgaccaggtgaccgttatcggggctggggtgaccctgcacgaggccttggccgctgccgaactgctgaagaaagaaaagatcaacatccgcgtgctggaccccttcaccatcaagcccctggacagaaaactcattctcgacagcgctcgtgccaccaagggcaggatcctcaccgtggaggaccattattatgaaggtggcattggtgaggctgtgtccagtgcagtagtgggcgagcctggcatcactgtcacccacctggcagttaaccgggtaccaagaagtgggaagccggctgagctgctgaagatgtttggtatcgacagggatgccattgcacaagctgtgaggggcctcatcaccaaggcctagggcgggtatgaagtgtggggcgggggtctatacattcctgagattctgggaaaggtgctcaaagatgtactgagaggaggggtaaatatatgttttgagaaaaatgaa

SEQ ID NO: 61231 - DNA, 1620 bp, Homo sapiens
aagcgtgccaagacctcaagggccgagggatcacgggtcagtatgcacaagccgccctcccgaagtaaaataatgtgaaaaagaaaaggatttaaaaaacccaaactggaaacaggaatgttgcaagctttctactactccagctgaggccgcagttgtggggtggagcctgggcagaccccagctgccaaggcagacctttccctggaaggctcctcggtgttgtggcccctgggaattgccccttactctctgccccctgtccccagttggcatgccatcatcgtggatggacacagcgtggaggagctgtgcaaggcctttggccaggccaagcaccagccaacagccatcattgccaagaccttcaagggccgagggatcacgggggtagaagataaggagtcttggcatgggaagcccctccccaaaaacatggctgagcagatcatccaggagatctacagccagatccagagcaaaaagaagatcctggcaacccctccacaggaggacgcaccctcagtggacattgccaacatccgcatgcccagcctgcccagctacaaagttggggacaagatagccacccgcaaggcctacgggcaggcactggccaagctgggccatgccagtgaccgcatcatcgccctggatggggacaccaaaaattccaccttctcggagatcttcaaaaaggagcacccggaccgcttcatcgagtgctacattgctgagcagaacatggtgagcatcgcggtgggctgtgccacccgcaacaggacggtgcccttctgcagcacttttgcagccttcttcacgcgggcctttgaccagattcgcatggccgccatctccgagagcaacatcaacctctgcggctcccactgcggcgtttccatcggggaagacgggccctcccagatggccctagaagatctggctatgtttcggtcagtccccacatcaactgtcttttacccaagtgatggcgttgctacagagaaggcagtggaactagccgccaatacaaagggtatctgcttcatccggaccagccgcccagaaaatgccatcatctataacaacaatgaggacttccaggtcggacaagccaaggtggtcctgaagagcaaggatgaccaggtgaccgttatcggggctggggtgaccctgcacgaggccttggccgctgccgaactgctgaagaaagaaaagatcaacatccgcgtgctggaccccttcaccatcaagcccctggacagaaaactcattctcgacagcgctcgtgccaccaagggcaggatcctcaccgtggaggaccattattatgaaggtggcattggtgaggctgtgtccagtgcagtagtgggcgagcctggcatcactgtcacccacctggcagttaaccgggtaccaagaagtgggaagccggctgagctgctgaagatgtttggtatcgacagggatgccattgcacaagctgtgaggggcctcatcaccaaggcctagggcgggtatgaagtgtggggcgggggtctatacattcctgagattctgggaaaggtgctcaaagatgtactgagaggaggggtaaatatatgttttgagaaaaatgaa

SEQ ID NO: 61232 - DNA, 2017 bp, Homo sapiens
cccggcgacttaacgcgcccccgccccgcgcccggcctcggcagccgcctgtcgccgcgggagcagccgctatctctgtgtgtccgcgtgtgcgcccggtccccgcctgccgcaccatggagagctaccacaagcctgaccagcagaagctgcaggccttgaaggacacggccaaccgcctacgtatcagctccatccaggccaccactgcggcgggctctggccaccccacgtcatgctgcagcgccgcagagatcatggctgtcctctttttccacaccatgcgctacaagtcccaggacccccggaatccgcacaatgaccgctttgtgctctccaagggccatgcagctcccatcctctacgcggtctgggctgaagctggtttcctggccgaggcggagctgctgaacctgaggaagatcagctccgattgtgggatggcctacaccggcaaatacttcgacaaggccaggggctctgtatgggaggccatggccttcgccagcatctataagctggacaaccttgtggccattctagacatcaatcgcctgggccagagtgacccggccccactgcagcaccagatggacatctaccagaagcggtgcgaggccttcggttggcatgccatcatcgtggatggacacagcgtggaggagctgtgcaaggcctttggccaggccaagcaccagccaacagccatcattgccaagaccttcaagggccgagggatcacgggggtagaagataaggagtcttggcatgggaagcccctccccaaaaacatggctgagcagatcatccaggagatctacagccagatccagagcaaaaagaagatcctggcaacccctccacaggaggacgcaccctcagtggacattgccaacatccgcatgcccagcctgcccagctacaaagttggggacaagatagccacccgcaaggcctacgggcaggcactggccaagctgggccatgccagtgaccgcatcatcgccctggatggggacaccaaaaattccaccttctcggagatcttcaaaaaggagcacccggaccgcttcatcgagtgctacattgctgagcagaacatggtgagcatcgcggtgggctgtgccacccgcaacaggacggtgcccttctgcagcacttttgcagccttcttcacgcgggcctttgaccagattcgcatggccgccatctccgagagcaacatcaacctctgcggctcccactgcggcgtttccatcggggaagacgggccctcccagatggccctagaagatctggctatgtttcggtcagtccccacatcaactgtcttttacccaagtgatggcgttgctacagagaaggcagtggaactagccgccaatacaaagggtatctgcttcatccggaccagccgcccagaaaatgccatcatctataacaacaatgaggacttccaggtcggacaagccaaggtggtcctgaagagcaaggatgaccaggtgaccgttatcggggctggggtgaccctgcacgaggccttggccgctgccgaactgctgaagaaagaaaagatcaacatccgcgtgctggaccccttcaccatcaagcccctggacagaaaactcattctcgacagcgctcgtgccaccaagggcaggatcctcaccgtggaggaccattattatgaaggtggcattggtgaggctgtgtccagtgcagtagtgggcgagcctggcatcactgtcacccacctggcagttaaccgggtaccaagaagtgggaagccggctgagctgctgaagatgtttggtatcgacagggatgccattgcacaagctgtgaggggcctcatcaccaaggcctagggcgggtatgaagtgtggggcgggggtctatacattcctgagattctgggaaaggtgctcaaagatgtactgagaggaggggtaaatatatgttttgagaaaaatgaacgggaacaatgacaacaacacccccccccaaaaacccccgg

SEQ ID NO: 61233 - DNA, 1150 bp, Homo sapiens
gcgcatgcccagcctgcggatgttggcaatgtccactgagggtgcgtcctcctgtggagggattgccaacatccgcatgcccagcctgcccagctacaaagttggggacaagatagccacccgcaaggcctacgggcaggcactggccaagctgggccatgccagtgaccgcatcatcgccctggatggggacaccaaaaattccaccttctcggagatcttcaaaaaggagcacccggaccgcttcatcgagtgctacattgctgagcagaacatggtgagcatcgcggtgggctgtgccacccgcaacaggacggtgcccttctgcagcacttttgcagccttcttcacgcgggcctttgaccagattcgcatggccgccatctccgagagcaacatcaacctctgcggctcccactgcggcgtttccatcggggaagacgggccctcccagatggccctagaagatctggctatgtttcggtcagtccccacatcaactgtcttttacccaagtgatggcgttgctacagagaaggcagtggaactagccgccaatacaaagggtatctgcttcatccggaccagccgcccagaaaatgccatcatctataacaacaatgaggacttccaggtcggacaagccaaggtggtcctgaagagcaaggatgaccaggtgaccgttatcggggctggggtgaccctgcacgaggccttggccgctgccgaactgctgaagaaagaaaagatcaacatccgcgtgctggaccccttcaccatcaagcccctggacagaaaactcattctcgacagcgctcgtgccaccaagggcaggatcctcaccgtggaggaccattattatgaaggtggcattggtgaggctgtgtccagtgcagtagtgggcgagcctggcatcactgtcacccacctggcagttaaccgggtaccaagaagtgggaagccggctgagctgctgaagatgtttggtatcgacagggatgccattgcacaagctgtgaggggcctcatcaccaaggcctagggcgggtatgaagtgtggggcgggggtctatacattcctgagattctgggaaaggtgctcaaagatgtactgagaggaggggtaaatatatgttttgagaaaaatgaa

SEQ ID NO: 61234 - DNA, 1065 bp, Homo sapiens
  misc_feature (874)..(874): n is a, c, g, or t
  misc_feature (910)..(910): n is a, c, g, or t
  misc_feature (922)..(922): n is a, c, g, or t
  misc_feature (933)..(933): n is a, c, g, or t
  misc_feature (941)..(941): n is a, c, g, or t
  misc_feature (948)..(948): n is a, c, g, or t
cccggcgacttaacgcgcccccgccccgcgcccggcctcggcagccgcctgtcgccgcgggagcagccgctatctctgtgtgtccgcgtgtgcgcccggtccccgcctgccgcaccatggagagctaccacaagcctgaccagcagaagctgcaggccttgaaggacacggccaaccgcctacgtatcagctccatccaggccaccactgcggcgggctctggccaccccacgtcatgctgcagcgccgcagagatcatggctgtcctctttttccacaccatgcgctacaagtcccaggacccccggaatccgcacaatgaccgctttgtgctctccaagggccatgcagctcccatcctctacgcggtctgggctgaagctggtttcctggccgaggcggagctgctgaacctgaggaagatcagctccgacttggacgggcacccggtcccgaaacaagctttcaccgacgtggccactggctccctgggccagggcctcggggccgcttgtgggatggcctacaccggcaaatacttcgacaaggccagctaccgagtctattgcttgctgggagacggggagctgtcagagggctctgtatgggaggccatggccttcgccagcatctataagctggacaaccttgtggccattctagacatcaatcgcctgggccagagtgacccggccccactgcagcaccagatggacatctaccagaagcggtgcgaggccttcggttggcatgccatcatcgtggatggacacagcgtggaggagctgtgcaaggcctttggccaggccaagcaccagccaacagccatcattgccaagaccttcaagggccgagggatcacggggtcgacganaggagtctggatggaagcctcccaaaaatggtgggngacatcgggaanaagcgtccagnaaagtcgnacctccnggagcctcgggttccacatccgtgccgccgcctcaatggacaaaccccggcgcgggcgacatggccaagcgctgccggggcgcacctacggaaacggcgcaaaagaaaggcggagga

SEQ ID NO: 61235 - DNA, 942 bp, Homo sapiens
  misc_feature (26)..(26): n is a, c, g, or t
gaaaacttatgggtctaagtgttagncgagtgccctgcgcgggtgttgtttaacacttccgaggccacggtgagcatcgcggtgggctgtgccacccgcaacaggacggtgcccttctgcagcacttttgcagccttcttcacgcgggcctttgaccagattcgcatggccgccatctccgagagcaacatcaacctctgcggctcccactgcggcgtttccatcggggaagacgggccctcccagatggccctagaagatctggctatgtttcggtcagtccccacatcaactgtcttttacccaagtgatggcgttgctacagagaaggcagtggaactagccgccaatacaaagggtatctgcttcatccggaccagccgcccagaaaatgccatcatctataacaacaatgaggacttccaggtcggacaagccaaggtggtcctgaagagcaaggatgaccaggtgaccgttatcggggctggggtgaccctgcacgaggccttggccgctgccgaactgctgaagaaagaaaagatcaacatccgcgtgctggaccccttcaccatcaagcccctggacagaaaactcattctcgacagcgctcgtgccaccaagggcaggatcctcaccgtggaggaccattattatgaaggtggcattggtgaggctgtgtccagtgcagtagtgggcgagcctggcatcactgtcacccacctggcagttaaccgggtaccaagaagtgggaagccggctgagctgctgaagatgtttggtatcgacagggatgccattgcacaagctgtgaggggcctcatcaccaaggcctagggcgggtatgaagtgtggggcgggggtctatacattcctgagattctgggaaaggtgctcaaagatgtactgagaggaggggtaaatatatgttttgagaaaaatgaa

SEQ ID NO: 61236 - DNA, 1268 bp, Homo sapiens
gcgtggtgaggcttcagtgggctaatatgggtagtggttggcatggcactcagtttgagaagtgctatttttattcttatgtcaaaaagagtccccaaaaggatagcttttcaagagaaagggtgctctgccccagctccttcctgtatatttgactccatggttcatttcaaaaacatttccagcaccacatccagcatctgtggagtgatcaaatgtgttccccaaataagaattgggccaaaaaattcatcaagaatctaatagcagacagattccaaacccagtgcgctgaccccagaacagctttcagtaggaaatgagcagatcaggaatgaaagagacaataaaggaactgagctctggattacttaagaggaggaggaaaacctgttcagaggcaaacaaaaggaagtaaaataatgtgaaaaagaaaaggatttaaaaaacccaaactggaaacaggaatgttgcaagctttctactactccagctgaggccgcagttgtggggtggagcctgggcagaccccagctgccaaggcagacctttccctggaaggctcctcggtgttgtggcccctgggaattgccccttactctctgccccctgtccccagtgtcttttacccaagtgatggcgttgctacagagaaggcagtggaactagccgccaatacaaagggtatctgcttcatccggaccagccgcccagaaaatgccatcatctataacaacaatgaggacttccaggtcggacaagccaaggtggtcctgaagagcaaggatgaccaggtgaccgttatcggggctggggtgaccctgcacgaggccttggccgctgccgaactgctgaagaaagaaaagatcaacatccgcgtgctggaccccttcaccatcaagcccctggacagaaaactcattctcgacagcgctcgtgccaccaagggcaggatcctcaccgtggaggaccattattatgaaggtggcattggtgaggctgtgtccagtgcagtagtgggcgagcctggcatcactgtcacccacctggcagttaaccgggtaccaagaagtgggaagccggctgagctgctgaagatgtttggtatcgacagggatgccattgcacaagctgtgaggggcctcatcaccaaggcctagggcgggtatgaagtgtggggcgggggtctatacattcctgagattctgggaaaggtgctcaaagatgtactgagaggaggggtaaatatatgttttgagaaaaatgaa

SEQ ID NO: 61237 - DNA, 545 bp, Homo sapiens
gtcataccccttgtaataatggacttcaggtcggacaagccaaggtggtcctgaagagcaaggatgaccaggtgaccgttatcggggctggggtgaccctgcacgaggccttggccgctgccgaactgctgaagaaagaaaagatcaacatccgcgtgctggaccccttcaccatcaagcccctggacagaaaactcattctcgacagcgctcgtgccaccaagggcaggatcctcaccgtggaggaccattattatgaaggtggcattggtgaggctgtgtccagtgcagtagtgggcgagcctggcatcactgtcacccacctggcagttaaccgggtaccaagaagtgggaagccggctgagctgctgaagatgtttggtatcgacagggatgccattgcacaagctgtgaggggcctcatcaccaaggcctagggcgggtatgaagtgtggggcgggggtctatacattcctgagattctgggaaaggtgctcaaagatgtactgagaggaggggtaaatatatgttttgagaaaaatgaa

SEQ ID NO: 61238 - DNA, 629 bp, Homo sapiens
  misc_feature (565)..(565): n is a, c, g, or t
  misc_feature (568)..(568): n is a, c, g, or t
cccggcgacttaacgcgcccccgccccgcgcccggcctcggcagccgcctgtcgccgcgggagcagccgctatctctgtgtgtccgcgtgtgcgcccggtccccgcctgccgcaccatggagagctaccacaagcctgaccagcagaagctgcaggccttgaaggacacggccaaccgcctacgtatcagctccatccaggccaccactgcggcgggctctggccaccccacgtcatgctgcagcgccgcagagatcatggctgtcctctttttccacaccatgcgctacaagtcccaggacccccggaatccgcacaatgaccgctttgtgctctccaagggccatgcagctcccatcctctacgcggtctgggctgaagctggtttcctggccgaggcggagctgctgaacctgaggaagatcagctccgacttggacgggcacccggtcccgaaacaagctttcaccgacgtggccactggctccctgggccagggcctcggggccgcttgtgggatggcctacaccggcaaatacttcgacaaggccagtacgattattgntgnggagaggggatgtcggtcgtatggagccatagcttcgcaacatctatgctggctttggctc

SEQ ID NO: 61239 - DNA, 410 bp, Homo sapiens
gggtgtttacacctggagctcccttgacttttgcaccaggaggtatgggagggggatgggccaggattccagcccatggatgggggggtaggggtcttatttctgcatatcctttcccccacaccccaggggaagacgggccctcccagatggccctagaagatctggctatgtttcggtcagtccccacatcaactgtcttttacccaagtgatggcgttgctacagagaaggcagtggaactagccgccaatacaaaggtaggttgcatggctgttctttctcctgctggcagccatcacttcccaagggaaacagaagaggaggccagagctggtcacttgctgccccagggggtgtttcctgaccttgcccctggtgttcgtgtagcttgtggaagttagacaaga

SEQ ID NO: 61240 - DNA, 2899 bp, Homo sapiens
cccggcgacttaacgcgcccccgccccgcgcccggcctcggcagccgcctgtcgccgcgggagcagccgctatctctgtgtgtccgcgtgtgcgcccggtccccgcctgccgcaccatggagagctaccacaagcctgaccagcagaagctgcaggccttgaaggacacggccaaccgcctacgtatcagctccatccaggccaccactgcggcgggctctggccaccccacgtcatgctgcagcgccgcagagatcatggctgtcctctttttccacaccatgcgctacaagtcccaggacccccggaatccgcacaatgaccgctttgtgctctccaagggccatgcagctcccatcctctacgcggtctgggctgaagctggtttcctggccgaggcggagctgctgaacctgaggaagatcagctccgacttggacgggcacccggtcccgaaacaagctttcaccgacgtggccactggctccctgggccagggcctcggggccgcttgtgggatggcctacaccggcaaatacttcgacaaggccagctaccgagtctattgcttgctgggagacggggagctgtcagagggctctgtatgggaggccatggccttcgccagcatctataagctggacaaccttgtggccattctagacatcaatcgcctgggccagagtgacccggccccactgcagcaccagatggacatctaccagaagcggtgcgaggccttcggttggcatgccatcatcgtggatggacacagcgtggaggagctgtgcaaggcctttggccaggccaagcaccagccaacagccatcattgccaagaccttcaagggccgagggatcacgggggtagaagataaggagtcttggcatgggaagcccctccccaaaaacatggctgagcagatcatccaggagatctacagccagatccagagcaaaaagaagatcctggcaacccctccacaggaggacgcaccctcagtggacattgccaacatccgcatgcccagcctgcccagctacaaagttggggacaagatagccacccgcaaggcctacgggcaggcactggccaagctgggccatgccagtgaccgcatcatcgccctggatggggacaccaaaaattccaccttctcggagatcttcaaaaaggagcacccggaccgcttcatcgagtgctacattgctgagcagaacatggtgagcatcgcggtgggctgtgccacccgcaacaggacggtgcccttctgcagcacttttgcagccttcttcacgcgggcctttgaccagattcgcatggccgccatctccgagagcaacatcaacctctgcggctcccactgcggcgtttccatcggggaagacgggccctcccagatggccctagaagatctggctatgtttcggtcagtccccacatcaactgtcttttacccaagtgatggcgttgctacagagaaggcagtggaactagccgccaatacaaagggtatctgcttcatccggaccagccgcccagaaaatgccatcatctataacaacaatgaggacttccaggtcggacaagccaaggtggtcctgaagagcaaggatgaccaggtgaccgttatcggggctggggtgaccctgcacgaggccttggccgctgccgaactgctgaagaaagaaaagatcaacatccgcgtgctggaccccttcaccatcaagcccctggacagaaaactcattctcgacagcgctcgtgccaccaagggcaggatcctcaccgtggaggaccattattatgaaggtggcattggtgaggctgtgtccagtgcagtagtgggcgagcctggcatcactgtcacccacctggcagttaaccgggtaccaagaagtgggaagccggctgagctgctgaagatgtttggtatcgacagggatgccattgcacaagctgtgaggggcctcatcaccaaggcctagggcccagtgcaggttctggggaagaagcgtggagggtgcgctagggaggctggtgtccttggtcctgggccaggacctgggtgtcccaagtccccttggaatcacctgcaactgccctcaacctccagaactatcgctgcctcccattcatcaccaggtgacatttgactgcaacctgccttctagctgagaggctgagacctacatccctcattgtgacctcagtccacctggccctgagcgggctggggaactgcctcagtctggaagctgaccaggcactctcagggccgccccacctcccccaagtccccacagccttgcagtcaggtctcctgggatagggaggttcacttgcttgttgtccctcgtccttgtcatatccttttaactaggcatctcagagaagcagagacagggcagccttcgtcctgggggaaaagggaccctcaggatggcatgagaggtcctcaatcccaagtgtggaactgtccccctcaacttgttaaaatgcagatttctgggtcttgccaatggggcctgggactccatgtgacaactggcccaggagcttctgatgtcacacagaattctgcagtcccaagctccagccccgacctgctctgctgttcctaggtgactgccctcacactgctgaccacagtggatttctccccctgctgctcgggctcagctggggtcagccctgcttataaggtcaactgtgcaaaaccttatactggccaagaacaaactagtgctgggggaggagggctgggtgccccggccactggtggagtccccaggaaatcctcagagctgttgcgaggatgagacacatttgtggacacgtccacctgtcctcctgaccgtctggagagaataaacctgtcaaagccaaggtcaaaaaa

SEQ ID NO: 61241 - DNA, 2043 bp, Homo sapiens
agaaagaaagaaaaacatcggctagtgagcgcgtgttaattcggacgaggcgcctgccgcaccatggagagctaccacaagcctgaccagcagaagctgcaggccttgaaggacacggccaaccgcctacgtatcagctccatccaggccaccactgcggcgggctctggccaccccacgtcatgctgcagcgccgcagagatcatggctgtcctctttttccacaccatgcgctacaagtcccaggacccccggaatccgcacaatgaccgctttgtgctctccaagggccatgcagctcccatcctctacgcggtctgggctgaagctggtttcctggccgaggcggagctgctgaacctgaggaagatcagctccgacttggacgggcacccggtcccgaaacaagctttcaccgacgtggccactggctccctgggccagggcctcggggccgcttgtgggatggcctacaccggcaaatacttcgacaaggccagctaccgagtctattgcttgctgggagacggggagctgtcagagggctctgtatgggaggccatggccttcgccagcatctataagctggacaaccttgtggccattctagacatcaatcgcctgggccagagtgacccggccccactgcagcaccagatggacatctaccagaagcggtgcgaggccttcggttggcatgccatcatcgtggatggacacagcgtggaggagctgtgcaaggcctttggccaggccaagcaccagccaacagccatcattgccaagaccttcaagggccgagggatcacgggggtagaagataaggagtcttggcatgggaagcccctccccaaaaacatggctgagcagatcatccaggagatctacagccagatccagagcaaaaagaagatcctggcaacccctccacaggaggacgcaccctcagtggacattgccaacatccgcatgcccagcctgcccagctacaaagttggggacaagatagccacccgcaaggcctacgggcaggcactggccaagctgggccatgccagtgaccgcatcatcgccctggatggggacaccaaaaattccaccttctcggagatcttcaaaaaggagcacccggaccgcttcatcgagtgctacattgctgagcagaacatggtgagcatcgcggtgggctgtgccacccgcaacaggacggtgcccttctgcagcacttttgcagccttcttcacgcgggcctttgaccagattcgcatggccgccatctccgagagcaacatcaacctctgcggctcccactgcggcgtttccatcggggaagacgggccctcccagatggccctagaagatctggctatgtttcggtcagtccccacatcaactgtcttttacccaagtgatggcgttgctacagagaaggcagtggaactagccgccaatacaaagggtatctgcttcatccggaccagccgcccagaaaatgccatcatctataacaacaatgaggacttccaggtcggacaagccaaggtggtcctgaagagcaaggatgaccaggtgaccgttatcggggctggggtgaccctgcacgaggccttggccgctgccgaactgctgaagaaagaaaagatcaacatccgcgtgctggaccccttcaccatcaagcccctggacagaaaactcattctcgacagcgctcgtgccaccaagggcaggatcctcaccgtggaggaccattattatgaaggtggcattggtgaggctgtgtccagtgcagtagtgggcgagcctggcatcactgtcacccacctggcagttaaccgggtaccaagaagtgggaagccggctgagctgctgaagatgtttggtatcgacagggatgccattgcacaagctgtgaggggcctcatcaccaaggcctagggcgggtatgaagtgtggggcgggggtctatacattcctgagattctgggaaaggtgctcaaagatgtactgagaggaggggtaaatatatgttttgagaaaaatgaa

SEQ ID NO: 61242 - DNA, 1748 bp, Homo sapiens
cccggcgacttaacgcgcccccgccccgcgcccggcctcggcagccgcctgtcgccgcgggagcagccgctatctctgtgtgtccgcgtgtgcgcccggtccccgcctgccgcaccatggagagctaccacaagcctgaccagcagaagctgcaggccttgaaggacacggccaaccgcctacgtatcagctccatccaggccaccactgcggcgggctctggccaccccacgtcatgctgcagcgccgcagagatcatggctgtcctctttttccacaccatgcgctacaagtcccaggacccccggaatccgcacaatgaccgctttgtgctctccaagggccatgcagctcccatcctctacgcggtctgggctgaagctggtttcctggccgaggcggagctgctgaacctgaggaagatcagctccgacttggacgggcacccggtcccgaaacaagctttcaccgacgtggccactggctccctgggccagggcctcggggccgcttgtgggatggcctacaccggcaaatacttcgacaaggccagctaccgagtctattgcttgctgggagacggggagctgtcagagggctctgtatgggaggccatggccttcgccagcatctataagctggacaaccttgtggccattctagacatcaatcgcctgggccagagtgacccggccccactgcagcaccagatggacatctaccagaagcggtgcgaggccttcggttggcatgccatcatcgtggatggacacagcgtggaggagctgtgcaaggcctttggccaggccaagcaccagccaacagccatcattgccaagaccttcaagggccgagggatcacgggggtagaagataaggagtcttggcatgggaagcccctccccaaaaacatggctgagcagatcatccaggagatctacagccagatccagagcaaaaagaagatcctggcaacccctccacaggaggacgcaccctcagtggacattgccaacatccgcatgcccagcctgcccagctacaaagttggggacaagatagccacccgcaaggcctacgggcaggcactggccaagctgggccatgccagtgaccgcatcatcgccctggatggggacaccaaaaattccaccttctcggagatcttcaaaaaggagcacccggaccgcttcatcgagtgctacattgctgagcagaacatggtgagcatcgcggtgggctgtgccacccgcaacaggacggtgcccttctgcagcacttttgcagccttcttcacgcgggcctttgaccagattcgcatggccgccatctccgagagcaacatcaacctctgcggctcccactgcggcgtttccatcggggaagacgggccctcccagatggccctagaagatctggctatgtttcggtcagtccccacatcaactgtcttttacccaagtgatggcgttgctacagagaaggcagtggaactagccgccaatacaaagggtatctgcttcatccggaccagccgcccagaaaatgccatcatctataacaacaatgaggacttccaggtcggacaagccaaggtggtcctgaagagcaaggatgaccaggtgaccgttatcggggctggggtgatcactgatagagtctctcgacctcgatcgttgcttctgaacaatagacagatgagtcgcacacgcgtatactcatctcggggtattctatagtctcgctgt

SEQ ID NO: 61243 - DNA, 1826 bp, Homo sapiens
gctcggccctacgttggtcgcagtcccaggacccccggaatccgcacaatgaccgctttgtgctctccaagggccatgcagctcccatcctctacgcggtctgggctgaagctggtttcctggccgaggcggagctgctgaacctgaggaagatcagctccgacttggacgggcacccggtcccgaaacaagctttcaccgacgtggccactggctccctgggccagggcctcggggccgcttgtgggatggcctacaccggcaaatacttcgacaaggccagctaccgagtctattgcttgctgggagacggggagctgtcagagggctctgtatgggaggccatggccttcgccagcatctataagctggacaaccttgtggccattctagacatcaatcgcctgggccagagtgacccggccccactgcagcaccagatggacatctaccagaagcggtgcgaggccttcggttggcatgccatcatcgtggatggacacagcgtggaggagctgtgcaaggcctttggccaggccaagcaccagccaacagccatcattgccaagaccttcaagggccgagggatcacgggggtagaagataaggagtcttggcatgggaagcccctccccaaaaacatggctgagcagatcatccaggagatctacagccagatccagagcaaaaagaagatcctggcaacccctccacaggaggacgcaccctcagtggacattgccaacatccgcatgcccagcctgcccagctacaaagttggggacaagatagccacccgcaaggcctacgggcaggcactggccaagctgggccatgccagtgaccgcatcatcgccctggatggggacaccaaaaattccaccttctcggagatcttcaaaaaggagcacccggaccgcttcatcgagtgctacattgctgagcagaacatggtgagcatcgcggtgggctgtgccacccgcaacaggacggtgcccttctgcagcacttttgcagccttcttcacgcgggcctttgaccagattcgcatggccgccatctccgagagcaacatcaacctctgcggctcccactgcggcgtttccatcggggaagacgggccctcccagatggccctagaagatctggctatgtttcggtcagtccccacatcaactgtcttttacccaagtgatggcgttgctacagagaaggcagtggaactagccgccaatacaaagggtatctgcttcatccggaccagccgcccagaaaatgccatcatctataacaacaatgaggacttccaggtcggacaagccaaggtggtcctgaagagcaaggatgaccaggtgaccgttatcggggctggggtgaccctgcacgaggccttggccgctgccgaactgctgaagaaagaaaagatcaacatccgcgtgctggaccccttcaccatcaagcccctggacagaaaactcattctcgacagcgctcgtgccaccaagggcaggatcctcaccgtggaggaccattattatgaaggtggcattggtgaggctgtgtccagtgcagtagtgggcgagcctggcatcactgtcacccacctggcagttaaccgggtaccaagaagtgggaagccggctgagctgctgaagatgtttggtatcgacagggatgccattgcacaagctgtgaggggcctcatcaccaaggcctagggcgggtatgaagtgtggggcgggggtctatacattcctgagattctgggaaaggtgctcaaagatgtactgagaggaggggtaaatatatgttttgagaaaaatgaa

SEQ ID NO: 61244 - DNA, 2221 bp, Homo sapiens
cccggcgacttaacgcgcccccgccccgcgcccggcctcggcagccgcctgtcgccgcgggagcagccgctatctctgtgtgtccgcgtgtgcgcccggtccccgcctgccgcaccatggagagctaccacaagcctgaccagcagaagctgcaggccttgaaggacacggccaaccgcctacgtatcagctccatccaggccaccactgcggcgggctctggccaccccacgtcatgctgcagcgccgcagagatcatggctgtcctctttttccacaccatgcgctacaagtcccaggacccccggaatccgcacaatgaccgctttgtgctctccaagggccatgcagctcccatcctctacgcggtctgggctgaagctggtttcctggccgaggcggagctgctgaacctgaggaagatcagctccgacttggacgggcacccggtcccgaaacaagctttcaccgacgtggccactggctccctgggccagggcctcggggccgcttgtgggatggcctacaccggcaaatacttcgacaaggccagatggagtctcgctctgtcacccaggctggagtgcagtggtacgatctcggcccactgcaacctccgcctcccgggttcaagtgattctcctcctgcctcagcctcccgagtagctgggactacagctaccgagtctattgcttgctgggagacggggagctgtcagagggctctgtatgggaggccatggccttcgccagcatctataagctggacaaccttgtggccattctagacatcaatcgcctgggccagagtgacccggccccactgcagcaccagatggacatctaccagaagcggtgcgaggccttcggttggcatgccatcatcgtggatggacacagcgtggaggagctgtgcaaggcctttggccaggccaagcaccagccaacagccatcattgccaagaccttcaagggccgagggatcacgggggtagaagataaggagtcttggcatgggaagcccctccccaaaaacatggctgagcagatcatccaggagatctacagccagatccagagcaaaaagaagatcctggcaacccctccacaggaggacgcaccctcagtggacattgccaacatccgcatgcccagcctgcccagctacaaagttggggacaagatagccacccgcaaggcctacgggcaggcactggccaagctgggccatgccagtgaccgcatcatcgccctggatggggacaccaaaaattccaccttctcggagatcttcaaaaaggagcacccggaccgcttcatcgagtgctacattgctgagcagaacatggtgagcatcgcggtgggctgtgccacccgcaacaggacggtgcccttctgcagcacttttgcagccttcttcacgcgggcctttgaccagattcgcatggccgccatctccgagagcaacatcaacctctgcggctcccactgcggcgtttccatcggggaagacgggccctcccagatggccctagaagatctggctatgtttcggtcagtccccacatcaactgtcttttacccaagtgatggcgttgctacagagaaggcagtggaactagccgccaatacaaagggtatctgcttcatccggaccagccgcccagaaaatgccatcatctataacaacaatgaggacttccaggtcggacaagccaaggtggtcctgaagagcaaggatgaccaggtgaccgttatcggggctggggtgaccctgcacgaggccttggccgctgccgaactgctgaagaaagaaaagatcaacatccgcgtgctggaccccttcaccatcaagcccctggacagaaaactcattctcgacagcgctcgtgccaccaagggcaggatcctcaccgtggaggaccattattatgaaggtggcattggtgaggctgtgtccagtgcagtagtgggcgagcctggcatcactgtcacccacctggcagttaaccgggtaccaagaagtgggaagccggctgagctgctgaagatgtttggtatcgacagggatgccattgcacaagctgtgaggggcctcatcaccaaggcctagggcgggtatgaagtgtggggcgggggtctatacattcctgagattctgggaaaggtgctcaaagatgtactgagaggaggggtaaatatatgttttgagaaaaatgaa

SEQ ID NO: 61245 - DNA, 1694 bp, Homo sapiens
cggacgcgtgggtcgacccacgcgtcatggagtctcgctctgtcacccaggctggagtgcagtggtacgatctcggcccactgcaacctccgcctcccgggttcaagtgattctcctcctgcctcagcctcccgagtagctgggactacagctaccgagtctattgcttgctgggagacggggagctgtcagagggctctgtatgggaggccatggccttcgccagcatctataagctggacaaccttgtggccattctagacatcaatcgcctgggccagagtgacccggccccactgcagcaccagatggacatctaccagaagcggtgcgaggccttcggttggcatgccatcatcgtggatggacacagcgtggaggagctgtgcaaggcctttggccaggccaagcaccagccaacagccatcattgccaagaccttcaagggccgagggatcacgggggtagaagataaggagtcttggcatgggaagcccctccccaaaaacatggctgagcagatcatccaggagatctacagccagatccagagcaaaaagaagatcctggcaacccctccacaggaggacgcaccctcagtggacattgccaacatccgcatgcccagcctgcccagctacaaagttggggacaagatagccacccgcaaggcctacgggcaggcactggccaagctgggccatgccagtgaccgcatcatcgccctggatggggacaccaaaaattccaccttctcggagatcttcaaaaaggagcacccggaccgcttcatcgagtgctacattgctgagcagaacatggtgagcatcgcggtgggctgtgccacccgcaacaggacggtgcccttctgcagcacttttgcagccttcttcacgcgggcctttgaccagattcgcatggccgccatctccgagagcaacatcaacctctgcggctcccactgcggcgtttccatcggggaagacgggccctcccagatggccctagaagatctggctatgtttcggtcagtccccacatcaactgtcttttacccaagtgatggcgttgctacagagaaggcagtggaactagccgccaatacaaagggtatctgcttcatccggaccagccgcccagaaaatgccatcatctataacaacaatgaggacttccaggtcggacaagccaaggtggtcctgaagagcaaggatgaccaggtgaccgttatcggggctggggtgaccctgcacgaggccttggccgctgccgaactgctgaagaaagaaaagatcaacatccgcgtgctggaccccttcaccatcaagcccctggacagaaaactcattctcgacagcgctcgtgccaccaagggcaggatcctcaccgtggaggaccattattatgaaggtggcattggtgaggctgtgtccagtgcagtagtgggcgagcctggcatcactgtcacccacctggcagttaaccgggtaccaagaagtgggaagccggctgagctgctgaagatgtttggtatcgacagggatgccattgcacaagctgtgaggggcctcatcaccaaggcctagggcgggtatgaagtgtggggcgggggtctatacattcctgagattctgggaaaggtgctcaaagatgtactgagaggaggggtaaatatatgttttgagaaaaatgaa

SEQ ID NO: 61246 - DNA, 1532 bp, Homo sapiens
ataatccagccgtaccggactggagatgttggggctctgtatgggaggccatggccttcgccagcatctataagctggacaaccttgtggccattctagacatcaatcgcctgggccagagtgacccggccccactgcagcaccagatggacatctaccagaagcggtgcgaggccttcggttggcatgccatcatcgtggatggacacagcgtggaggagctgtgcaaggcctttggccaggccaagcaccagccaacagccatcattgccaagaccttcaagggccgagggatcacgggggtagaagataaggagtcttggcatgggaagcccctccccaaaaacatggctgagcagatcatccaggagatctacagccagatccagagcaaaaagaagatcctggcaacccctccacaggaggacgcaccctcagtggacattgccaacatccgcatgcccagcctgcccagctacaaagttggggacaagatagccacccgcaaggcctacgggcaggcactggccaagctgggccatgccagtgaccgcatcatcgccctggatggggacaccaaaaattccaccttctcggagatcttcaaaaaggagcacccggaccgcttcatcgagtgctacattgctgagcagaacatggtgagcatcgcggtgggctgtgccacccgcaacaggacggtgcccttctgcagcacttttgcagccttcttcacgcgggcctttgaccagattcgcatggccgccatctccgagagcaacatcaacctctgcggctcccactgcggcgtttccatcggggaagacgggccctcccagatggccctagaagatctggctatgtttcggtcagtccccacatcaactgtcttttacccaagtgatggcgttgctacagagaaggcagtggaactagccgccaatacaaagggtatctgcttcatccggaccagccgcccagaaaatgccatcatctataacaacaatgaggacttccaggtcggacaagccaaggtggtcctgaagagcaaggatgaccaggtgaccgttatcggggctggggtgaccctgcacgaggccttggccgctgccgaactgctgaagaaagaaaagatcaacatccgcgtgctggaccccttcaccatcaagcccctggacagaaaactcattctcgacagcgctcgtgccaccaagggcaggatcctcaccgtggaggaccattattatgaaggtggcattggtgaggctgtgtccagtgcagtagtgggcgagcctggcatcactgtcacccacctggcagttaaccgggtaccaagaagtgggaagccggctgagctgctgaagatgtttggtatcgacagggatgccattgcacaagctgtgaggggcctcatcaccaaggcctagggcgggtatgaagtgtggggcgggggtctatacattcctgagattctgggaaaggtgctcaaagatgtactgagaggaggggtaaatatatgttttgagaaaaatgaa

SEQ ID NO: 61247 - DNA, 1246 bp, Homo sapiens
cccggcgacttaacgcgcccccgccccgcgcccggcctcggcagccgcctgtcgccgcgggagcagccgctatctctgtgtgtccgcgtgtgcgcccggtccccgcctgccgcaccatggagagctaccacaagcctgaccagcagaagctgcaggccttgaaggacacggccaaccgcctacgtatcagctccatccaggccaccactgcggcgggctctggccaccccacgtcatgctgcagcgccgcagagatcatggctgtcctctttttccacaccatgcgctacaagtcccaggacccccggaatccgcacaatgaccgctttgtgctctccaagggccatgcagctcccatcctctacgcggtctgggctgaagctggtttcctggccgaggcggagctgctgaacctgaggaagatcagctccgacttggacgggcacccggtcccgaaacaagctttcaccgacgtggccactggctccctgggccagggcctcggggccgcttgtgggatggcctacaccggcaaatacttcgacaaggccagctaccgagtctattgcttgctgggagacggggagctgtcagagggctctgtatgggaggccatggccttcgccagcatctataagctggacaaccttgtggccattctagacatcaatcgcctgggccagagtgacccggccccactgcagcaccagatggacatctaccagaagcggtgcgaggccttcggttggcatgccatcatcgtggatggacacagcgtggaggagctgtgcaaggcctttggccaggccaagcaccagccaacagccatcattgccaagaccttcaagggccgagggatcacgggggtagaagataaggagtcttggcatgggaagcccctccccaaaaacatggctgagcagatcatccaggagatctacagccagatccagagcaaaaagaagatcctggcaacccctccacaggaggacgcaccctcagtggacattgccaacatccgcatgcccagcctgcccagctacaaagttggggacaagatagccacccgcaaggcctacgggcaggcactggccaagctgggccatgccagtgaccgcatcatcgccctggatggggacacgggtatgaagtgtggggcgggggtctatacattcctgagattctgggaaaggtgctcaaagatgtactgagaggaggggtaaatatatgttttgagaaaaatgaa

SEQ ID NO: 61248 - DNA, 1185 bp, Homo sapiens
  misc_feature (1069)..(1069): n is a, c, g, or t
  misc_feature (1076)..(1076): n is a, c, g, or t
  misc_feature (1092)..(1092): n is a, c, g, or t
  misc_feature (1100)..(1100): n is a, c, g, or t
cccggcgacttaacgcgcccccgccccgcgcccggcctcggcagccgcctgtcgccgcgggagcagccgctatctctgtgtgtccgcgtgtgcgcccggtccccgcctgccgcaccatggagagctaccacaagcctgaccagcagaagctgcaggccttgaaggacacggccaaccgcctacgtatcagctccatccaggccaccactgcggcgggctctggccaccccacgtcatgctgcagcgccgcagagatcatggctgtcctctttttccacaccatgcgctacaagtcccaggacccccggaatccgcacaatgaccgctttgtgctctccaagggccatgcagctcccatcctctacgcggtctgggctgaagctggtttcctggccgaggcggagctgctgaacctgaggaagatcagctccgacttggacgggcacccggtcccgaaacaagctttcaccgacgtggccactggctccctgggccagggcctcggggccgcttgtgggatggcctacaccggcaaatacttcgacaaggccagctaccgagtctattgcttgctgggagacggggagctgtcagagggctctgtatgggaggccatggccttcgccagcatctataagctggacaaccttgtggccattctagacatcaatcgcctgggccagagtgacccggccccactgcagcaccagatggacatctaccagaagcggtgcgaggccttcggttggcatgccatcatcgtggatggacacagcgtggaggagctgtgcaaggcctttggccaggccaagcaccagccaacagccatcattgccaagaccttcaagggccgagggatcacgggggtagaagataaggagtcttggcatgggaagcccctccccaaaaacatggctgagcagatcatccaggagatctacagccagatccagagcaaaaagaagatcctggcaacccctccacaggaggacgcaccctcagtggacattgccaacatccgcatgcccagcctgcccagctacaaagttggggacaagatagcacccgnaggctangggcggcctggccagngggctgcngtgacgatctcgccggtgggggcccaaaattcccttttgggaactcaaagagcccggacgtccggggacatgcggcacacatggc

SEQ ID NO: 61249 - DNA, 1180 bp, Homo sapiens
aacttaggctaggtacgagcctgggttccagatccagagcaaaaagaagatcctggcaacccctccacaggaggacgcaccctcagtggacattgccaacatccgcatgcccagcctgcccagctacaaagttggggacaagatagccacccgcaaggcctacgggcaggcactggccaagctgggccatgccagtgaccgcatcatcgccctggatggggacaccaaaaattccaccttctcggagatcttcaaaaaggagcacccggaccgcttcatcgagtgctacattgctgagcagaacatggtgagcatcgcggtgggctgtgccacccgcaacaggacggtgcccttctgcagcacttttgcagccttcttcacgcgggcctttgaccagattcgcatggccgccatctccgagagcaacatcaacctctgcggctcccactgcggcgtttccatcggggaagacgggccctcccagatggccctagaagatctggctatgtttcggtcagtccccacatcaactgtcttttacccaagtgatggcgttgctacagagaaggcagtggaactagccgccaatacaaagggtatctgcttcatccggaccagccgcccagaaaatgccatcatctataacaacaatgaggacttccaggtcggacaagccaaggtggtcctgaagagcaaggatgaccaggtgaccgttatcggggctggggtgaccctgcacgaggccttggccgctgccgaactgctgaagaaagaaaagatcaacatccgcgtgctggaccccttcaccatcaagcccctggacagaaaactcattctcgacagcgctcgtgccaccaagggcaggatcctcaccgtggaggaccattattatgaaggtggcattggtgaggctgtgtccagtgcagtagtgggcgagcctggcatcactgtcacccacctggcagttaaccgggtaccaagaagtgggaagccggctgagctgctgaagatgtttggtatcgacagggatgccattgcacaagctgtgaggggcctcatcaccaaggcctagggcgggtatgaagtgtggggcgggggtctatacattcctgagattctgggaaaggtgctcaaagatgtactgagaggaggggtaaatatatgttttgagaaaaatgaa

SEQ ID NO: 61250 - DNA, 1036 bp, Homo sapiens
cccggcgacttaacgcgcccccgccccgcgcccggcctcggcagccgcctgtcgccgcgggagcagccgctatctctgtgtgtccgcgtgtgcgcccggtccccgcctgccgcaccatggagagctaccacaagcctgaccagcagaagctgcaggccttgaaggacacggccaaccgcctacgtatcagctccatccaggccaccactgcggcgggctctggccaccccacgtcatgctgcagcgccgcagagatcatggctgtcctctttttccacaccatgcgctacaagtcccaggacccccggaatccgcacaatgaccgctttgtgctctccaagggccatgcagctcccatcctctacgcggtctgggctgaagctggtttcctggccgaggcggagctgctgaacctgaggaagatcagctccgacttggacgggcacccggtcccgaaacaagctttcaccgacgtggccactggctccctgggccagggcctcggggccgcttgtgggatggcctacaccggcaaatacttcgacaaggccagctaccgagtctattgcttgctgggagacggggagctgtcagagggctctgtatgggaggccatggccttcgccagcatctataagctggacaaccttgtggccattctagacatcaatcgcctgggccagagtgacccggccccactgcagcaccagatggacatctaccagaagcggtgcgaggccttcggttggcatgccatcatcgtggatggacacagcgtggaggagctgtgcaaggcctttggccaggccaagcaccagccaacagccatcattgccaagaccttcaagggccgagggatcacgggggtagaagataaggagtcttggcatgggaagcccctccccttgccggcttccttctctgccctcatcgagaaatgtagccacagctcgacgcagggacggagaaggaagccggcaaggggatggggcaagcatgtctgtctctcaaaggctggccttcctggccgagtcac

SEQ ID NO: 61251 - DNA, 1276 bp, Homo sapiens
tttccaggtgcttggttgcccccaacacttgcggggcctgctggggaccatacatggccggagggaagaaaaaaccgtgggtttaactggcgaagaatcgcattcgactaatcgatccgaccttgttcatcattgatccagacccatagaagatcttcatccttcgtctgttctacaccgaatttgtgctttatcactgaagagtagagtaaagttgaagagttgtagttgtgctatttgggacagtgcctggtcacaggaacagatgatcttgctggtggagcagaggtcttacaattgaacctggtggtttgcccataggagggggaggtctatacgaccctggaggcggatacattccaggtcttgaagatgcgagtgctacattgctgagcagaacatggtgagcatcgcggtgggctgtgccacccgcaacaggacggtgcccttctgcagcacttttgcagccttcttcacgcgggcctttgaccagattcgcatggccgccatctccgagagcaacatcaacctctgcggctcccactgcggcgtttccatcggggaagacgggccctcccagatggccctagaagatctggctatgtttcggtcagtccccacatcaactgtcttttacccaagtgatggcgttgctacagagaaggcagtggaactagccgccaatacaaagggtatctgcttcatccggaccagccgcccagaaaatgccatcatctataacaacaatgaggacttccaggtcggacaagccaaggtggtcctgaagagcaaggatgaccaggtgaccgttatcggggctggggtgaccctgcacgaggccttggccgctgccgaactgctgaagaaagaaaagatcaacatccgcgtgctggaccccttcaccatcaagcccctggacagaaaactcattctcgacagcgctcgtgccaccaagggcaggatcctcaccgtggaggaccattattatgaaggtggcattggtgaggctgtgtccagtgcagtagtgggcgagcctggcatcactgtcacccacctggcagttaaccgggtaccaagaagtgggaagccggctgagctgctgaagatgtttggtatcgacagggatgccattgcacaagctgtgaggggcctcatcaccaaggcctagggcgggtatgaagtgtggggcgggggtctatacattcctgagattctgggaaaggtgctcaaagatgtactgagaggaggggtaaatatatgttttgagaaaaatgaa

SEQ ID NO: 61252 - DNA, 728 bp, Homo sapiens
cgcgcggccccctccagccatcgcctacccttgggcccctagaagatctggctatgtttcggtcagtccccacatcaactgtcttttacccaagtgatggcgttgctacagagaaggcagtggaactagccgccaatacaaagggtatctgcttcatccggaccagccgcccagaaaatgccatcatctataacaacaatgaggacttccaggtcggacaagccaaggtggtcctgaagagcaaggatgaccaggtgaccgttatcggggctggggtgaccctgcacgaggccttggccgctgccgaactgctgaagaaagaaaagatcaacatccgcgtgctggaccccttcaccatcaagcccctggacagaaaactcattctcgacagcgctcgtgccaccaagggcaggatcctcaccgtggaggaccattattatgaaggtggcattggtgaggctgtgtccagtgcagtagtgggcgagcctggcatcactgtcacccacctggcagttaaccgggtaccaagaagtgggaagccggctgagctgctgaagatgtttggtatcgacagggatgccattgcacaagctgtgaggggcctcatcaccaaggcctagggcgggtatgaagtgtggggcgggggtctatacattcctgagattctgggaaaggtgctcaaagatgtactgagaggaggggtaaatatatgttttgagaaaaatgaa

SEQ ID NO: 61253 - DNA, 1348 bp, Homo sapiens
gtcataccccttgtaataatggacttcaggtcggacaagccaaggtggtcctgaagagcaaggatgaccaggtgaccgttatcggggctggggtgaccctgcacgaggccttggccgctgccgaactgctgaagaaagaaaagatcaacatccgcgtgctggaccccttcaccatcaagcccctggacagaaaactcattctcgacagcgctcgtgccaccaagggcaggatcctcaccgtggaggaccattattatgaaggtggcattggtgaggctgtgtccagtgcagtagtgggcgagcctggcatcactgtcacccacctggcagttaaccgggtaccaagaagtgggaagccggctgagctgctgaagatgtttggtatcgacagggatgccattgcacaagctgtgaggggcctcatcaccaaggcctagggcccagtgcaggttctggggaagaagcgtggagggtgcgctagggaggctggtgtccttggtcctgggccaggacctgggtgtcccaagtccccttggaatcacctgcaactgccctcaacctccagaactatcgctgcctcccattcatcaccaggtgacatttgactgcaacctgccttctagctgagaggctgagacctacatccctcattgtgacctcagtccacctggccctgagcgggctggggaactgcctcagtctggaagctgaccaggcactctcagggccgccccacctcccccaagtccccacagccttgcagtcaggtctcctgggatagggaggttcacttgcttgttgtccctcgtccttgtcatatccttttaactaggcatctcagagaagcagagacagggcagccttcgtcctgggggaaaagggaccctcaggatggcatgagaggtcctcaatcccaagtgtggaactgtccccctcaacttgttaaaatgcagatttctgggtcttgccaatggggcctgggactccatgtgacaactggcccaggagcttctgatgtcacacagaattctgcagtcccaagctccagccccgacctgctctgctgttcctaggtgactgccctcacactgctgaccacagtggatttctccccctgctgctcgggctcagctggggtcagccctgcttataaggtcaactgtgcaaaaccttatactggccaagaacaaactagtgctgggggaggagggctgggtgccccggccactggtggagtccccaggaaatcctcagagctgttgcgaggatgagacacatttgtggacacgtccacctgtcctcctgaccgtctggagagaataaacctgtcaaagccaaggtcaaaaaa

SEQ ID NO: 61254 - DNA, 409 bp, Homo sapiens
cttccatcaggccagacacctggggtgttttctctcgcattccctttgtcttcaaggttgtgggaggatgagggaaggcgctcagggcctgcacgctccgctctgggttcttggatactgcgggcaacacagctggaccagatgccccagtgcaaggggttggcaagcatgagctcagccatgggaacgaggtggcaagtggttctccctgggacagggacaggcccgcaggctgagctcttagctacacgcagccctcaggatgtcccaccaggcccccaccagggcagatagtggtgcccagccctcccctcagccacgccgtgtgctctccctcacagaaaagatcaacatccgcgtgctggaccccttcaccatcaagcccctggacagaaaactcattctcgac

SEQ ID NO: 61255 - DNA, 301 bp, Homo sapiens
ccaaaaacatggctgagcagatcatccaggagatctacagccagatccagagcaaaaagaagatcctggcaacccctccacaggaggacgcaccctcagtggacattgccaacatccgcatgcccagcctgcccagctacaaagttggggacaaggtacaaagtggggcctgtttctctgaacccatagttctcaggtttcccaagtctgtggcccagatacaccctctggagggctgggaaagggaggagagcgattcatttagggcgaggagtgatccctgaggtgttgttcctgtcac

SEQ ID NO: 61256 - DNA, 333 bp, Homo sapiens
tgggatggaactatgacagagaaagaacagggtgccttggaaatacagagaatgggagacacgactaatgaatgttcctacggttgtctatctctgagctttacaattcagtctctactattttgtgggcattttatgtcctatttataaaacctttcaattagaaattgagacatctattgagtacctaccatgtgggaagtgccctgcttgatgctgttgtatcttatgaagcttgcggaagagagtacggagttgaataagacacttttctttttcccacacagagtgcttaaaatctaataggagaaataagattacataaataatgaa

SEQ ID NO: 61257 - DNA, 448 bp, Homo sapiens
agccttcacccagtcagacttctgcacagagtcctgttataccgccactgggcaggtgatagtcgtagcagctaaagaatggggaacaactgggggtgctctgtggcgttgatgttaaagctacagagtcaggtttgacctcaaagcaatttcctaaattactaaatacacataactcttattgttcatgctttaatccatggtctttggcatattattggcctgttaaatgctaataaacctttgtttctcagcatgtagtttacatgatggggacttgattaagaaagtactttcaagcatcttatttcataggaaactttattagagataagataagacccattcaaatatgcattctcttaaaaatgggttgtgagttattctcagaattctctgctgtctgtcctttcctgtactccactttagctgtttggtatctctgttc

SEQ ID NO: 61258 - DNA, 1628 bp, Homo sapiens
  misc_feature (1624)..(1624): n is a, c, g, or t
  misc_feature (1626)..(1627): n is a, c, g, or t
cgcgttccagagtacccggtatagagaagtattctgtccccctctttgggaatggaaagaagccctgcctggatgcatggagcagatggatactgacaccaaggacattcagattttctttcctatacctattttcataaaatttggaaagaaaaactatctgcagtatttttttaaaacgacttctgctattcttacttagagaaatccagtgatagcacctcatgtcttcagaggagcaagaagttcaaggagttaaatgtcacattcatactcaggtaatagagaagaataaaacacatcaggtttgcttcatctatcctaagtggtgcttaggggttcagaaaaaatgtttcaagtacaggaaattaatgagcaatatttacaatgtattttaataaaagggatttttctagttaactctgagttaagcacgaactcctttcttttgttaattgttggaaataccattaagatgtatttgtctgtttttctgcattggcaagtaaagaacataaaacaaatattcccttggtgacagattatttttagtattttgggccatcttttgaatcactaataggtgagagctctaaagcatgctgcaaatagaagttcctttttaaaaatccctaatattagtattttccctgatttacctctttctcctaaaagtggaaacagcaaaaattaagttgaatataaatttaataaagctatatttaacccaagaatcacacaagccaggatgcttcttggtttaaaaatgtgaattaatcgactgtaaaggaactgcctcccattatctctgcactgagctatgaatcaaactttttttttttaagtagaggtcaaaaggagatgcaacttaacacggcatcagattgtaatacttagaattcaaccaaataacttttttttaaaactggggcttttctgtggggcaaggggacagagaagaatgggtggtagcaggagataaggggagaaaaggatcatatctctgtcagcccactccatttttttttcttagcacttcccatatttatcagtcttacagcttatctatctaatggctccaggctgaagtccaatctcagcattacagtttatatagcaaaaaaaattttccccaacccccttggagactctaaatctgacttagtagctagaaaccctgtaaatatggtcttagcagacattaagggaaacaaagccaaggcaacatgacaatgccaaatttgcaatttctaccaatccactaagctatcaggcctagttagtccatcattcctaactttgacatttctgaacgactggcattttctgacagttttgttgtttacctgtctaaaaactaagtacagttggctctgtatctgtgggtgttccacatccatgaattcaaccgtggataaaaaatattcagaaaaagaaggatggttgtgtctgtactgaacatgtacagacatttttcttttcattctctaaacaatagagtataacaactatttagcatttacagtgtattatgtatcgcaagtgacctagaaataatttgaagtatatgagaagatgtgtgtagattatatgcaaatacaacgtcattttatgtaagaaaaananna

SEQ ID NO: 61259 - DNA, 1742 bp, Homo sapiens
  misc_feature (1738)..(1738): n is a, c, g, or t
  misc_feature (1740)..(1741): n is a, c, g, or t
ataaaagtattgatggctgtgtcctcatctgcatttttgtttttatgatagggctgatattttcaacaacgaaacacccaatgttcagaccttacctcagtctaagagctggctccacagttggtagcaatggccctgttaggcagactgtccccctctttgggaatggaaagaagccctgcctggatgcatggagcagatggatactgacaccaaggacattcagattttctttcctatacctattttcataaaatttggaaagaaaaactatctgcagtatttttttaaaacgacttctgctattcttacttagagaaatccagtgatagcacctcatgtcttcagaggagcaagaagttcaaggagttaaatgtcacattcatactcaggtaatagagaagaataaaacacatcaggtttgcttcatctatcctaagtggtgcttaggggttcagaaaaaatgtttcaagtacaggaaattaatgagcaatatttacaatgtattttaataaaagggatttttctagttaactctgagttaagcacgaactcctttcttttgttaattgttggaaataccattaagatgtatttgtctgtttttctgcattggcaagtaaagaacataaaacaaatattcccttggtgacagattatttttagtattttgggccatcttttgaatcactaataggtgagagctctaaagcatgctgcaaatagaagttcctttttaaaaatccctaatattagtattttccctgatttacctctttctcctaaaagtggaaacagcaaaaattaagttgaatataaatttaataaagctatatttaacccaagaatcacacaagccaggatgcttcttggtttaaaaatgtgaattaatcgactgtaaaggaactgcctcccattatctctgcactgagctatgaatcaaactttttttttttaagtagaggtcaaaaggagatgcaacttaacacggcatcagattgtaatacttagaattcaaccaaataacttttttttaaaactggggcttttctgtggggcaaggggacagagaagaatgggtggtagcaggagataaggggagaaaaggatcatatctctgtcagcccactccatttttttttcttagcacttcccatatttatcagtcttacagcttatctatctaatggctccaggctgaagtccaatctcagcattacagtttatatagcaaaaaaaattttccccaacccccttggagactctaaatctgacttagtagctagaaaccctgtaaatatggtcttagcagacattaagggaaacaaagccaaggcaacatgacaatgccaaatttgcaatttctaccaatccactaagctatcaggcctagttagtccatcattcctaactttgacatttctgaacgactggcattttctgacagttttgttgtttacctgtctaaaaactaagtacagttggctctgtatctgtgggtgttccacatccatgaattcaaccgtggataaaaaatattcagaaaaagaaggatggttgtgtctgtactgaacatgtacagacatttttcttttcattctctaaacaatagagtataacaactatttagcatttacagtgtattatgtatcgcaagtgacctagaaataatttgaagtatatgagaagatgtgtgtagattatatgcaaatacaacgtcattttatgtaagaaaaananna

SEQ ID NO: 61260 - DNA, 420 bp, Homo sapiens
aaaaccaggagtccaacaaaagcctttacataaatcacagctgatacaatggctcttggctgaaggggagaggggcttagagtctcagcgctgctgaaagaaggtttgtgtctgggggaggaattgtcagagcagtccctggggaagagacgaggcctgatgtctgaacagagggtgagcccgtcatcctgctggggacgacagaggccatggaagggaatgagagtgaaaatctggaggcagactccagatgtgacatctccatggggcgggatggtccagatatctggggcctgtgcaggtcacgctccatcacagtccacagtccacagtccacagtctatcctggcagggcagtccctcctaggagggcatgctgtcttgcagaggtgccaggcaagggcagtcctcacccagtga

SEQ ID NO: 61261 - DNA, 2917 bp, Homo sapiens
tcctgaaggccgaaggtggctctagcgcatcctttgtcgcgccgtgacctgcaggtactgacagatccgtagggaggacaccgtgacttcccggacgctgggaaatggactcagtctcctttgaggatgtggccgtgaacttcaccctggaggagtgggctttgctggattcttcacagaaaaagctctatgaagatgtgatgcaggagaccttcaaaaacctggtttgtctaggaaaaaagtgggaagaccaggacattgaagatgaccacagaaaccaggggaaaaatcgaagatgtcatatggttgagagactctgtgaaagtagaagaggtagcaaatgtggagaaaccactagccagatgccaaatgttaatatcaacaaggaaacttttactggagcaaaaccacatgaatgcagcttttgtggaagagacttcattcatcattcgtcccttaataggcacatgagatctcacactggacagaaaccaaatgagtatcaggaatatgaaaagcaaccatgtaaatgtaaagcagttgggaaaaccttcagttatcaccactgctttcgcaaacatgaaagaactcacactggagtgaagccctatgaatgtaaacagtgtgggaaagcctttatatattaccagccatttcaaagacatgaaaggactcatgctggacagaaaccctatgaatgtaagcaatgtggaaaaacctttatatattaccagtcttttcaaaaacatgctcatactggaaagaaaccctatgaatgtaaacagtgtgggaaagcctttatatgttaccaatcttttcaaagacacaaaaggactcacactggagagaaaccctatgaatgtaagcaatgtggtaaggctttcagttgtcccacatactttcgaactcatgaaagaactcactctggagaaaaaccctacaaatgtaaagaatgtggtaaagccttcagttttctcagttcttttcgaaggcataaaaggactcatagtggagagaaaccctatgaatgtaaagaatgtggaaaagccttcttttattctgcaagctttcgagcacatgtaataatacacactggggctcgaccttataaatgtaaagaatgtgggaaagccttcaactcttctaattcctgtcgagtgcatgaaagaactcatattggagaaaaaccatatgaatgtaaacgatgtggcaaatcattcagttggtccatttctcttcgattgcatgaaagaactcatactggagagaaaccttatgagtgtaaacagtgtcataaaaccttcagtttttcaagttcccttcgagaacacgaaacaactcacactggagagaaaccctatgaatgtaaacaatgtggtaaaaccttcagtttttcaagttcccttcaaagacatgaaaggactcacaatgcagagaaaccctatgaatgtaaacagtgtgggaaagccttcaggtgttcaagttattttcgaattcatgaaaggtcacacactggagagaaaccctatgaatgtaaacagtgtggaaaagttttcattcgttccagttcctttcgactgcatgaaagaacacacactggagagaaaccctatgaatgtaaactatgcggtaaaaccttcagtttttcaagttcccttcgagaacatgaaaaaattcacactggaaataagccttttgagtgtaagcaatgtggtaaggccttccttcgttccagtcaaattcgattgcatgaaaggactcacactggagagaaaccgtatcaatgtaaacaatgtggaaaagccttcatttcttccagtaaatttcgaatgcatgagagaactcacacgggagagaaaccctatcgatgtaaacaatgtgggaaagccttcagattttcaagttctgttcgaattcatgaaaggtctcacactggagagaaaccttatgaatgcaaacaatgtggaaaagccttcatttcttccagtcactttcgactgcatgaaaggactcatatgggagagaaagtctaagaatataagcaacattctgaagccttcggttgttccagctccttctgaatacacaaaagagttcatactggacagaagctgtgtgaatacaaacattgttctaaagcccttgattgttccagtttcttttgagcacgaaagaattcccactggtgagaaacagtatgaatgtaaacattgtgattaagccttcagttgacctaattcatttcaaagacaggactcgtgctgcagtgaaatctgttttgttttttgttttttgtttttttaaaaaaggccaagcttgttggctcatgcctatagtcccagcactttgggaggccaaggtgcaaggcaggcagatcatttgaggtcagaaattcgagaccagcgtggtcaacatggtgtaaccccatctctactaaaaattaccaaaaaatgaaccaggcatggtagtgcatgcctctaatcccagctactcaggaggctaaggcaggagaatcacttgaacctggagacagaggttgcagtgagctgagatcacgccactgcattccagcctgtgcgacagaatgagacactgtctcaagaaaaaataaaagtgggaaaatcttccaactgtcctctagagtgtgaatatatgaaaggagtcagagtggggtgaaagtctataaatgtaagacatttgggaaagccttcacacagccttttgagcacacatgagaatgtatactggagagaaaccctataaatattaagaatgtgggaaattcttcatcctagttcttttgttgttgttgatgatacaaaaataatttcatttaataaagattgtcaggttatatttaataagaaagaaagtatcatgtaaacagcccagtaataaaattttacaatcttataaa

SEQ ID NO: 61262 - DNA, 2695 bp, Homo sapiens
caattcagacaggggagatatcctatactttttctgaaaatggttaaaatgtaattctcatacctactaataaatacaaaataattaaaaagccactaataatgtgctattcattttttacagatgtcatatggttgagagactctgtgaaagtagaagaggtagcaaatgtggagaaaccactagccagatgccaaatgttaatatcaacaaggaaacttttactggagcaaaaccacatgaatgcagcttttgtggaagagacttcattcatcattcgtcccttaataggcacatgagatctcacactggacagaaaccaaatgagtatcaggaatatgaaaagcaaccatgtaaatgtaaagcagttgggaaaaccttcagttatcaccactgctttcgcaaacatgaaagaactcacactggagtgaagccctatgaatgtaaacagtgtgggaaagcctttatatattaccagccatttcaaagacatgaaaggactcatgctggacagaaaccctatgaatgtaagcaatgtggaaaaacctttatatattaccagtcttttcaaaaacatgctcatactggaaagaaaccctatgaatgtaaacagtgtgggaaagcctttatatgttaccaatcttttcaaagacacaaaaggactcacactggagagaaaccctatgaatgtaagcaatgtggtaaggctttcagttgtcccacatactttcgaactcatgaaagaactcactctggagaaaaaccctacaaatgtaaagaatgtggtaaagccttcagttttctcagttcttttcgaaggcataaaaggactcatagtggagagaaaccctatgaatgtaaagaatgtggaaaagccttcttttattctgcaagctttcgagcacatgtaataatacacactggggctcgaccttataaatgtaaagaatgtgggaaagccttcaactcttctaattcctgtcgagtgcatgaaagaactcatattggagaaaaaccatatgaatgtaaacgatgtggcaaatcattcagttggtccatttctcttcgattgcatgaaagaactcatactggagagaaaccttatgagtgtaaacagtgtcataaaaccttcagtttttcaagttcccttcgagaacacgaaacaactcacactggagagaaaccctatgaatgtaaacaatgtggtaaaaccttcagtttttcaagttcccttcaaagacatgaaaggactcacaatgcagagaaaccctatgaatgtaaacagtgtgggaaagccttcaggtgttcaagttattttcgaattcatgaaaggtcacacactggagagaaaccctatgaatgtaaacagtgtggaaaagttttcattcgttccagttcctttcgactgcatgaaagaacacacactggagagaaaccctatgaatgtaaactatgcggtaaaaccttcagtttttcaagttcccttcgagaacatgaacttccttcgttccagtcaaattcgattgcatgaaaggactcacactggagagaaaccgtatcaatgtaaacaatgtggaaaagccttcatttcttccagtaaatttcgaatgcatgagagaactcacacgggagagaaaccctatcgatgtaaacaatgtgggaaagccttcagattttcaagttctgttcgaattcatgaaaggtctcacactggagagaaaccttatgaatgcaaacaatgtggaaaagccttcatttcttccagtcactttcgactgcatgaaaggactcatatgggagagaaagtctaagaatataagcaacattctgaagccttcggttgttccagctccttctgaatacacaaaagagttcatactggacagaagctgtgtgaatacaaacattgttctaaagcccttgattgttccagtttcttttgagcacgaaagaattcccactggtgagaaacagtatgaatgtaaacattgtgattaagccttcagttgacctaattcatttcaaagacaggactcgtgctgcagtgaaatctgttttgttttttgttttttgtttttttaaaaaaggccaagcttgttggctcatgcctatagtcccagcactttgggaggccaaggtgcaaggcaggcagatcatttgaggtcagaaattcgagaccagcgtggtcaacatggtgtaaccccatctctactaaaaattaccaaaaaatgaaccaggcatggtagtgcatgcctctaatcccagctactcaggaggctaaggcaggagaatcacttgaacctggagacagaggttgcagtgagctgagatcacgccactgcattccagcctgtgcgacagaatgagacactgtctcaagaaaaaataaaagtgggaaaatcttccaactgtcctctagagtgtgaatatatgaaaggagtcagagtggggtgaaagtctataaatgtaagacatttgggaaagccttcacacagccttttgagcacacatgagaatgtatactggagagaaaccctataaatattaagaatgtgggaaattcttcatcctagttcttttgttgttgttgatgatacaaaaataatttcatttaataaagattgtcaggttatatttaataagaaagaaagtatcatgtaaacagcccagtaataaaattttacaatcttataaa

SEQ ID NO: 61263 - DNA, 2023 bp, Homo sapiens
  misc_feature (1213)..(1213): n is a, c, g, or t
  misc_feature (2017)..(2017): n is a, c, g, or t
  misc_feature (2019)..(2019): n is a, c, g, or t
  misc_feature (2022)..(2023): n is a, c, g, or t
ggtgatgatgacgggctacaataatggtcgctgtccccggaattctctctacagtgactgcattattgaggagaagacggtggtcctgcagaaaaaagacaatgagggctttggattcgtgcttcgaggggccaaagctgacacacccattgaagaattcacaccaacaccggctttcccagccctacagtacctggagtccgtggatgaaggtggggtggcgtggcaagccggactaaggaccggggacttcttgattgaggttaacaatgagaatgttgtcaaagtcggccacaggcaggtggtgaacatgatccggcagggagggaatcacctggtccttaaggtggtcacggtgaccaggaatctggaccccgacgacaccgccaggaagaaagctcccccgcctccaaagcgggcaccgaccacagccctcaccctgcgctccaagtccatgacctcggagctggaggagctcgtggataaaagcctcggtccggaagaagaagggataaacccgaggagatagtcccggcctccaagccctcccgcgctgctgagaacatggctgtggaaccgagggtggcgaccatcaagcagcggcccagcagccggtgcttcccggcgggctcagacatgaactctgtgtacgaacgccaaggaatcgccgtgatgacgcccactgttcctgggagcccaaaagccccgtttctgggcatccctcgaggtacgatgcgaaggcagaaatcaataggtaagaagtgtggcactcccccacagaagttgcccctgggctttcaaacacagccttaggcccctcaggaattctgagccctgggcctctcacagttgccttggcgtcccaccccagcaaggccctgccagcccacccaccagagggtgggaacctggccttgcccactagggagccattggaacatctgagtggcatgaaactcatcccccctgaaggacacaaaatctagggtggcttctgtcatcttgaagcccagttatctgtgataattccagcagggtaaagcgggagggtgggcggggtggtgcgagccaacccccctcccccaccctgccctgctcagggtgggaagggtaagtgggttccctgcattccccagccaccaccaggcctggagtatgagctcagcagatgtacttccaagggtggttgggtcaggtctcgaaatgaaataangtactgtgtgttgcagaaaactgccttcctttcttcttaatgtcacaattattcctattgaccctgttgcaggcaaaggtacacttgaccttgagacaagtcacacttgaccctttgagacagtccctttgtgagataattcagcattgcctttactgtgtcaattctggtagaagctaaggcccttgccctgtgagagttgtggaggcaaccctgggactctggtctgcccagcccaccccaggggcactgtcctgtgtgttctggaaatgcctctgggctgctgtgcaaaagcgcagcgtgcttgtgagtctcaggtggataactgtaggcagtcactaggcagtaagtggccgtggaggtggtgtctgctgtgcttaaagctccccctgcaccagcaaactcagggaaagctgcgtatttgtcttgcggttactggttaataacaactgatttcctcctgtcagacagcagaatctttctatcaggttagtgaaccttacggtttggaatctgtaatctgaatgtaacccagtttactttataaggtgtattcttaaattagtactccttgggaacagaattgccagacagccaactcagagtgactggtcaatggagaacactttgaacgagccatctttgcaatgccaaaatgtcctcccacaaggagtatgttaaatttggaatacccttatcgaatggaagttttcattggaataaattattgtagtttgtcctaggactttttttcatttcaagtaatttattttgctacctctttgaaaacctgcatgctcccancntgnn

SEQ ID NO: 61264 - DNA, 8770 bp, Homo sapiens
  misc_feature (4016)..(4016): n is a, c, g, or t
ggtaccagaaacgcgcgctgacgcagcagaagctgttcagcactacaccgtgggctcctatgacagcttcgacacttccagtgactgcattattgaggagaagacggtggtcctgcagaaaaaagacaatgagggctttggattcgtgcttcgaggggccaaagctgacacacccattgaagaattcacaccaacaccggctttcccagccctacagtacctggagtccgtggatgaaggtggggtggcgtggcaagccggactaaggaccggggacttcttgattgaggttaacaatgagaatgttgtcaaagtcggccacaggcaggtggtgaacatgatccggcagggagggaatcacctggtccttaaggtggtcacggtgaccaggaatctggaccccgacgacaccgccaggaagaaagctcccccgcctccaaagcgggcaccgaccacagccctcaccctgcgctccaagtccatgacctcggagctggaggagctcgtggataagataaacccgaggagatagtcccggcctccaagccctcccgcgctgctgagaacatggctgtggaaccgagggtggcgaccatcaagcagcggcccagcagccggtgcttcccggcgggctcagacatgaactctgtgtacgaacgccaaggaatcgccgtgatgacgcccactgttcctgggagcccaaaagccccgtttctgggcatccctcgaggtacgatgcgaaggcagaaatcaatagacagcagaatctttctatcaggaataacagaggaagagcggcagtttctggctcctccaatgctgaagttcaccagaagcctgtccatgccggacacctctgaggacatcccccctccaccgcagtctgtgcccccgtccccaccaccaccttccccaaccacttacaactgccccaagtccccaactccaagagtctacgggacgattaagcctgcgttcaatcagaattctgccgccaaggtgtcccccgccaccaggtccgacaccgtggccaccatgatgagggagaaggggatgtacttcaggagagagctggaccgctactccttggactctgaagacctctacagtcggaatgccggcccgcaagccaacttccgcaacaagagaggccagatgccagaaaacccatactcagaggtggggaagatcgccagcaaagccgtctacgtccccgccaagcccgccaggcggaaggggatgctggtgaagcagtccaacgtggaggacagccccgagaagacgtgctccatccctatcccgaccatcatcgtgaaggagccgtccaccagcagcagcggcaagagcagccagggcagcagcatggagatcgacccccaggccccggagccaccgagccagctgcggcctgacgaaagcctgaccgtcagcagcccctttgccgccgccatcgccggagccgtccgcgaccgtgagaagcggctggaagccaggaggaactccccggccttcctctccacagacctgggggatgaggatgtgggcctggggccacccgcccccaggacgcggccctccatgttccccgaggagggggattttgctgacgaggacagcgctgagcagctgtcatcccccatgccgagtgccacgcccagggagcccgaaaaccatttcgtgggtggcgccgaggccagtgctccgggtgaggctgggaggccgctgaattccacgtccaaagcccaggggcccgagagcagcccagcagtgccctccgcgagcagcggcacagccggccccgggaattatgtccacccactcacagggcggctgcttgatcccagctccccgctggccctggcactctccgcaagggaccgagccatgaaggagtctcaacagggacccaaaggggaggcccccaaggccgacctcaacaaacctctttacattgataccaaaatgcggcccagcctggatgccggcttccctacggtcaccaggcagaacacccggggacccctgaggcggcaggagacggagaacaagtacgagaccgacctgggccgagaccggaaaggcgatgacaagaagaacatgctgatcgacatcatggacacgtcccagcagaagtcggctggcctgctgatggtgcacaccgtggacgccactaagctggacaacgccctgcaggaagaggacgagaaggcagaggtggagatgaagccagacagctcgccgtccgaggtgccagaaggtgtttccgaaaccgaaggtgctttacagatctccgctgcccccgagcccaccaccgtgcccggcagaaccatcgtcgcggtgggctccatggaagaggcggtgattttgccattccgcatccctcctccccctctggcatccgtggacttggatgaggattttatttttacagagccattgcctcctcccctggaatttgcaaatagttttgatatccccgatgaccgggcagcttctgtcccggctctctcagacttagtgaagcagaagaaaagcgacacccctcagtccccttcgttgaactccagccaaccaaccaactctgcagacagcaagaagccagccagtctttcaaactgtctgcctgcctcattcctgccaccccctgaaagctttgacgccgtcgccgactctgggatcgaggaggtggacagccggagtagcagcgaccaccacctcgagacgaccagcactatctccaccgtgtctagcatctccaccctgtcttccgaaggtggagagaatgtggacacctgcacagtctatgcagatgggcaagcatttatggttgacaaacccccagtacctcctaagccaaaaatgaagcccatcattcacaaaagcaatgcactttatcaagacgcgctcgtggaagaagatgtagatagctttgttatccccccgcccgctcccccgcccccgccgggcagtgcccagcctgggatggccaaggttctccagccaaggacctccaagttgtggggcgacgtcacagagatcaaaagcccgattctctcaggcccaaaggcaaacgttattagtgaattgaactctatcctacagcaaatgaaccgagagaaattggcaaagccgggggaaggactggattcaccaatgggagccaagtccgccagcctcgctccaagaagcccggagatcatgagcaccatctcaggtacacggagcacgacggtcaccttcactgttcgccccggcacctcccagcccatcaccctgcagagccggccccccgactatgaaagcaggacctcaggaacaagacgtgccccaagccctgtggtctcgccaacagagatgaacaaagagaccctgcccgcccccctgtctgctgccaccgcctctccttctcccgctctctcagatgtctttagccttccaagccagcccccttctggggatctatttggcttgaacccagcgggacgcagtaggtcgccatccccctcgatactgcaacagccaatctcaaataagccttttacaactaaacctgtccacctgtggactaaaccagatgtggccgattggctggaaagtctaaacttgggtgaacataaagaggccttcatggacaatgagatcgatggcagtcacttaccaaacctgcagaaggaggacctcatcgatcttggggtaactcgagtcgggcacagaatgaacatagaaagggctttgaaacagctgctggacagataaggacggctgctctccacctcgcagactgctcttgttataagtagagatgggctcgtgctgaaacatctgaatgccaagcgaagtctgtgagcatcaaccccactccatgggtttgtctcctggtacccaaagaaatactgagttgtgtccacaacatggctgggtcttcagacccctggctcaccatgtgggtgtcttgggcagtttctatcacacatgggacaaggggagggagtttttctaacatggaaaaagattcncagcctgccgcccagcatgcaggtggcctcgctttgccgggtccgagaggctccccgtcaattttgcacgggatcctagctcttgtaggcagacaccagtgcactctagatacctcctgagacctccgtcctctgctttccgggcagctctcaccaccccaggccccggcatgaggcctttcctcagtcctgtggcctctcagaggacacctgatgctcacctgcccctctttctcctgcacttggcttgcagtgagatgctcccagatgcatttgtccagtgccccatcatgggcctgaaaggcagagaaactttttcctacacagattcttttccccatctcctcctgtggtttgcatccatggctctttggccatgaggttcctggcagtgctgggagtttggatgggatcgtgcccagctttgcttagctttctttatttctgcaaatctgttagcataattccaaggtggccaagcagatgtcacatggagttagtcaaagcacaaagtcacgattccacaatggaggggagacctggccaagggagccagccagcgtgcaactgcccaagctccaggtctccaggacaagagcagttgtctgccatgagcacccatccaggatggagaataagggcttctctgcctctcagaattctttttaattgaagatgtcttgagctctgcaaagatcagagcaggtgagcatccactttgacatgaaggacaagaagacgcatggctcatggcgggcacatgcggctgccagtgagacagcgtctcctctgggagctgggcgggcacagcatcctcagttctgtgcccagccaagggtgagcatctctgctgagacagtccttttgctctcggaggccagggaagatggtacttagaggcttttcccctatcgctctgggtgtctaggaatcccaccagcttgtcttaacagtacaacagcttctttgaggacccagtgggtatggagtatagacagaacccagggttgagaacagaaggtgggcggcaggatcagagtgaaagcagaggcgtgaggagaggaaagcagggaggtctcctgggctgccaggtcagcctctctggcaaggctttcttgagccccgcccctttctttccccggagtccctccaccccataacaatacctcgaatttccaaaagaggtcaccagatgcacatgggccgcaaaacacacagtcaggcttccagcacattctcccccatttggaggatactcgaatgtcaggtttttggttttattattatttcagaactagctcagcccatctctaattataaaacatggttttgttttttttttttcctttttttcttgattaggtctggaacagctctagaatgaacacataaaatttagcaatttaaaatctttctttactgcaagtttaaatagttgtacagatagtttataagcacaatattttaagaaaaaaaagtggctggtctactaggcagcctttgtgccacttcagtgctagaaagttaaagaaaaaaaaacttttgtgatttaataatactatttctgtggaataattataaaagtatgacctttttaaatcaaccttatttggatgcatctgaaccagcagagctgtgttatattttctatctttgctagaacttcgtcattgaaggacaatttcttcaaagtggttacaattcataatgcagcagtttctccaaaaacaaaaacaaaacacacaccacacacacgcgcttttccagtcacacacccctgatgttggaaccaagtttttggaccttctgttccaaaaccttttgcaggtcaatctttgtatttgaaatgatccaatccaacttgaagtcaattgaatattaaggcgctttacttccgtgtgctttcagtttttccatcatgagatgaatgagcattactctagataaatttcaagacaggatactacaggtggcctgctgaggctgccccatattttagaaaatgtaaaaatggtggtttggccattaatttgtcttccatttgatgataccgcaaaattccgtgagtccattcctttggcatggcactttccctgggcctacagttggtattacctctgtgctcagtgccaggcaaaacactagctcaaaggagagtcaaggaaaccgctggcagacgataaccagtcgaaactcgtgacttcggtttgttgaactttggcagccagttggtgagggccagatgttattccctttcttaaagatactccaagccacatgccactaaccacaagcaagctggctgcaagactaaagagctgataacatagtttatttttacactgtcttattatagagaagtaatagacctatcagaacctgcactgaccaacaaataaacacatgttgccaagatgaatcggtctctatctctatctgcttattttggtactgaaagcaatagttcctcattcaaatcaccacccactgttctccccctttgggacatgttaggacgaggccctattccatgcccctctttaatggtggaacaaatgttaaactgctcatctaaagatcatgttgatattattccaggttttaagatcaacttttgttacatactgtaatttaaataaactgcatttacatgcctagtttctgtaatattgtgtatacaaaacccaaatctctcaaaatgtaaattatgtatacctgccaagataccttttccagggtgtctgcgcacattttaagttaattcacataatataaaaattactcaatgtgactgttgatttgctgaactttacatatcacaaagtgaattatttgtgatactttagttaataaaatggtaaatttttttctcagttattgaacaagcaagcattatccagttgatctggcaatgactttttgtgtgtgggccacaatattgattttcccattaacaatttttttttgttttttaaatactaatatgtttcacactatagtttgtgtaacaacacgtgttcgcattatctatgttgctgttacttttgtgcttttattctttttagactttataaaaaaaaaaaaaagctcctgtaatttgcactttctcccaatccttaaatctcttgtatggcaaccaaaattactgtaaaaaaataaatatactattgcactaaggttgtggttctgattgcaaacaaacagtgaacactgtctgaattaaacaaaaagctgcccgacttgcaatctaatgtagattatctcaggcattgtggccagctctgcctctctaaaactgaccagaaaaatctctctcatcgagtaaacaggctcctgtcactgagctaatctgccttggttccatttccttattctcaatttatcaatggatacgtgcatgttatttcagaattatgcaaaacgtcaaaatctgcttctgtgaccgctgctataggcgtggagctgaggctcggcttttccttttgttctgggtggaagcagcggtgccgcggagggccagccagatccggacccttcccttagggtccagtctccccacaccccagcagggtgtcttctagccataaggccaagggagtggcagaactgggccgcctctctggttgacaagcaaaccacatgctaaggcttggagcaagagagaatttgtgtctattggcaaagaactaagccaggaagacatgggccatccctccgctttagggaagcatattttaaacctaaacgttgaacttcttctttggcctcaccagtgaaaacttgttgtctttagttcctaaagtttcttctactttggcacattccccagttgagcagcagcctctatgcttccacgttcaggaaaaattccagtcctcatatcttttgtagttcaccctcaagctctcccgcttcaccatccaatagtttctcccaaaccttggcacccccctagactttgcttccaatggtttcttccagaccacttttcctagatgaatatattcgtttaccttactaggaaaattattggaagattttttcttttacttgaaattggaggcattttaataactggcgaactggaatgtgtttctgtatttgtagacaaccatgtacccatgcaagtaggtgaacattccacagtggctgggtgaccacagcagctgcatgcagacaggactgcccgtgctttgtggggaatcagagaatttccaaacttgtttctcagacttccgcagatctcatcactttgatttctaatccatgctgtattggtgattttgtttatcgttcctgtaacttgttctacattccacagtctttaccgttttatgttcaaaattacaacaatccctgtccattgattccactctggaactctttgttcatgccaattttgaaattttaatacgagccttcaaataaacacagaaaagaaaaaaaaaaaggaaaaaaaataaagtgtgtgccttgggtgttttgaacctgatctgcataaaaccatattgtattcaaatgctgtatctttcatgaaaggataaatatatcttcaatgtattaatgtagctgataaaatagttatagtgccttgttttctgaactgagaagcccatatcaatgcacaacgtaaagaaaggacggttcgagctatgaaatgttgaggacacctacacgtgattctggagcctttctcatcataagactgtggaaaatacacagtcgtttaagttaaaaataaaaagtaaattgaa

SEQ ID NO: 61265 - DNA, 9608 bp, Homo sapiens
  misc_feature (1128)..(1128): n is a, c, g, or t
  misc_feature (4854)..(4854): n is a, c, g, or t
ggtaccagaaacgcgcgctgacgcagcagaagctgttcagcactacaccgtgggctcctatgacagcttcgacacttccagtgactgcattattgaggagaagacggtggtcctgcagaaaaaagacaatgagggctttggattcgtgcttcgaggggccaaagctgacacacccattgaagaattcacaccaacaccggctttcccagccctacagtacctggagtccgtggatgaaggtggggtggcgtggcaagccggactaaggaccggggacttcttgattgaggttaacaatgagaatgttgtcaaagtcggccacaggcaggtggtgaacatgatccggcagggagggaatcacctggtccttaaggtggtcacggtgaccaggaatctggaccccgacgacaccgccaggaagaaaggataaacccgaggagatagtcccggcctccaagccctcccgcgctgctgagaacatggctgtggaaccgagggtggcgaccatcaagcagcggcccagcagccggtgcttcccggcgggctcagacatgaactctgtgtacgaacgccaaggaatcgccgtgatgacgcccactgttcctgggagcccaaaagccccgtttctgggcatccctcgaggtacgatgcgaaggcagaaatcaataggtaagaagtgtggcactcccccacagaagttgcccctgggctttcaaacacagccttaggcccctcaggaattctgagccctgggcctctcacagttgccttggcgtcccaccccagcaaggccctgccagcccacccaccagagggtgggaacctggccttgcccactagggagccattggaacatctgagtggcatgaaactcatcccccctgaaggacacaaaatctagggtggcttctgtcatcttgaagcccagttatctgtgataattccagcagggtaaagcgggagggtgggcggggtggtgcgagccaacccccctcccccaccctgccctgctcagggtgggaagggtaagtgggttccctgcattccccagccaccaccaggcctggagtatgagctcagcagatgtacttccaagggtggttgggtcaggtctcgaaatgaaataangtactgtgtgttgcagaaaactgccttcctttcttcttaatgtcacaattattcctattgaccctgttgcaggcaaaggtacacttgaccttgagacaagtcacacttgaccctttgagacagtccctttgtgagataattcagcattgcctttactgtgtcaattctggtagaagctaaggcccttgccctgtgagagttgtggaggcaaccctgggactctggtctgcccagcccaccccaggggcactgtcctgtgtgttctggaaatgcctctgggctgctgtgcaaaagcgcagcgtgcttgtgagtctcaggtggataactgtaggcagtcactaggcagtaagtggccgtggaggtggtgtctgctgtgcttaaagctccccctgcaccagcaaactcagggaaagctgcgtatttgtcttgcggttactggttaataacaactgatttcctcctgtcagacagcagaatctttctatcaggaataacagaggaagagcggcagtttctggctcctccaatgctgaagttcaccagaagcctgtccatgccggacacctctgaggacatcccccctccaccgcagtctgtgcccccgtccccaccaccaccttccccaaccacttacaactgccccaagtccccaactccaagagtctacgggacgattaagcctgcgttcaatcagaattctgccgccaaggtgtcccccgccaccaggtccgacaccgtggccaccatgatgagggagaaggggatgtacttcaggagagagctggaccgctactccttggactctgaagacctctacagtcggaatgccggcccgcaagccaacttccgcaacaagagaggccagatgccagaaaacccatactcagaggtggggaagatcgccagcaaagccgtctacgtccccgccaagcccgccaggcggaaggggatgctggtgaagcagtccaacgtggaggacagccccgagaagacgtgctccatccctatcccgaccatcatcgtgaaggagccgtccaccagcagcagcggcaagagcagccagggcagcagcatggagatcgacccccaggccccggagccaccgagccagctgcggcctgacgaaagcctgaccgtcagcagcccctttgccgccgccatcgccggagccgtccgcgaccgtgagaagcggctggaagccaggaggaactccccggccttcctctccacagacctgggggatgaggatgtgggcctggggccacccgcccccaggacgcggccctccatgttccccgaggagggggattttgctgacgaggacagcgctgagcagctgtcatcccccatgccgagtgccacgcccagggagcccgaaaaccatttcgtgggtggcgccgaggccagtgctccgggtgaggctgggaggccgctgaattccacgtccaaagcccaggggcccgagagcagcccagcagtgccctccgcgagcagcggcacagccggccccgggaattatgtccacccactcacagggcggctgcttgatcccagctccccgctggccctggcactctccgcaagggaccgagccatgaaggagtctcaacagggacccaaaggggaggcccccaaggccgacctcaacaaacctctttacattgataccaaaatgcggcccagcctggatgccggcttccctacggtcaccaggcagaacacccggggacccctgaggcggcaggagacggagaacaagtacgagaccgacctgggccgagaccggaaaggcgatgacaagaagaacatgctgatcgacatcatggacacgtcccagcagaagtcggctggcctgctgatggtgcacaccgtggacgccactaagctggacaacgccctgcaggaagaggacgagaaggcagaggtggagatgaagccagacagctcgccgtccgaggtgccagaaggtgtttccgaaaccgaaggtgctttacagatctccgctgcccccgagcccaccaccgtgcccggcagaaccatcgtcgcggtgggctccatggaagaggcggtgattttgccattccgcatccctcctccccctctggcatccgtggacttggatgaggattttatttttacagagccattgcctcctcccctggaatttgcaaatagttttgatatccccgatgaccgggcagcttctgtcccggctctctcagacttagtgaagcagaagaaaagcgacacccctcagtccccttcgttgaactccagccaaccaaccaactctgcagacagcaagaagccagccagtctttcaaactgtctgcctgcctcattcctgccaccccctgaaagctttgacgccgtcgccgactctgggatcgaggaggtggacagccggagtagcagcgaccaccacctcgagacgaccagcactatctccaccgtgtctagcatctccaccctgtcttccgaaggtggagagaatgtggacacctgcacagtctatgcagatgggcaagcatttatggttgacaaacccccagtacctcctaagccaaaaatgaagcccatcattcacaaaagcaatgcactttatcaagacgcgctcgtggaagaagatgtagatagctttgttatccccccgcccgctcccccgcccccgccgggcagtgcccagcctgggatggccaaggttctccagccaaggacctccaagttgtggggcgacgtcacagagatcaaaagcccgattctctcaggcccaaaggcaaacgttattagtgaattgaactctatcctacagcaaatgaaccgagagaaattggcaaagccgggggaaggactggattcaccaatgggagccaagtccgccagcctcgctccaagaagcccggagatcatgagcaccatctcaggtacacggagcacgacggtcaccttcactgttcgccccggcacctcccagcccatcaccctgcagagccggccccccgactatgaaagcaggacctcaggaacaagacgtgccccaagccctgtggtctcgccaacagagatgaacaaagagaccctgcccgcccccctgtctgctgccaccgcctctccttctcccgctctctcagatgtctttagccttccaagccagcccccttctggggatctatttggcttgaacccagcgggacgcagtaggtcgccatccccctcgatactgcaacagccaatctcaaataagccttttacaactaaacctgtccacctgtggactaaaccagatgtggccgattggctggaaagtctaaacttgggtgaacataaagaggccttcatggacaatgagatcgatggcagtcacttaccaaacctgcagaaggaggacctcatcgatcttggggtaactcgagtcgggcacagaatgaacatagaaagggctttgaaacagctgctggacagataaggacggctgctctccacctcgcagactgctcttgttataagtagagatgggctcgtgctgaaacatctgaatgccaagcgaagtctgtgagcatcaaccccactccatgggtttgtctcctggtacccaaagaaatactgagttgtgtccacaacatggctgggtcttcagacccctggctcaccatgtgggtgtcttgggcagtttctatcacacatgggacaaggggagggagtttttctaacatggaaaaagattcncagcctgccgcccagcatgcaggtggcctcgctttgccgggtccgagaggctccccgtcaattttgcacgggatcctagctcttgtaggcagacaccagtgcactctagatacctcctgagacctccgtcctctgctttccgggcagctctcaccaccccaggccccggcatgaggcctttcctcagtcctgtggcctctcagaggacacctgatgctcacctgcccctctttctcctgcacttggcttgcagtgagatgctcccagatgcatttgtccagtgccccatcatgggcctgaaaggcagagaaactttttcctacacagattcttttccccatctcctcctgtggtttgcatccatggctctttggccatgaggttcctggcagtgctgggagtttggatgggatcgtgcccagctttgcttagctttctttatttctgcaaatctgttagcataattccaaggtggccaagcagatgtcacatggagttagtcaaagcacaaagtcacgattccacaatggaggggagacctggccaagggagccagccagcgtgcaactgcccaagctccaggtctccaggacaagagcagttgtctgccatgagcacccatccaggatggagaataagggcttctctgcctctcagaattctttttaattgaagatgtcttgagctctgcaaagatcagagcaggtgagcatccactttgacatgaaggacaagaagacgcatggctcatggcgggcacatgcggctgccagtgagacagcgtctcctctgggagctgggcgggcacagcatcctcagttctgtgcccagccaagggtgagcatctctgctgagacagtccttttgctctcggaggccagggaagatggtacttagaggcttttcccctatcgctctgggtgtctaggaatcccaccagcttgtcttaacagtacaacagcttctttgaggacccagtgggtatggagtatagacagaacccagggttgagaacagaaggtgggcggcaggatcagagtgaaagcagaggcgtgaggagaggaaagcagggaggtctcctgggctgccaggtcagcctctctggcaaggctttcttgagccccgcccctttctttccccggagtccctccaccccataacaatacctcgaatttccaaaagaggtcaccagatgcacatgggccgcaaaacacacagtcaggcttccagcacattctcccccatttggaggatactcgaatgtcaggtttttggttttattattatttcagaactagctcagcccatctctaattataaaacatggttttgttttttttttttcctttttttcttgattaggtctggaacagctctagaatgaacacataaaatttagcaatttaaaatctttctttactgcaagtttaaatagttgtacagatagtttataagcacaatattttaagaaaaaaaagtggctggtctactaggcagcctttgtgccacttcagtgctagaaagttaaagaaaaaaaaacttttgtgatttaataatactatttctgtggaataattataaaagtatgacctttttaaatcaaccttatttggatgcatctgaaccagcagagctgtgttatattttctatctttgctagaacttcgtcattgaaggacaatttcttcaaagtggttacaattcataatgcagcagtttctccaaaaacaaaaacaaaacacacaccacacacacgcgcttttccagtcacacacccctgatgttggaaccaagtttttggaccttctgttccaaaaccttttgcaggtcaatctttgtatttgaaatgatccaatccaacttgaagtcaattgaatattaaggcgctttacttccgtgtgctttcagtttttccatcatgagatgaatgagcattactctagataaatttcaagacaggatactacaggtggcctgctgaggctgccccatattttagaaaatgtaaaaatggtggtttggccattaatttgtcttccatttgatgataccgcaaaattccgtgagtccattcctttggcatggcactttccctgggcctacagttggtattacctctgtgctcagtgccaggcaaaacactagctcaaaggagagtcaaggaaaccgctggcagacgataaccagtcgaaactcgtgacttcggtttgttgaactttggcagccagttggtgagggccagatgttattccctttcttaaagatactccaagccacatgccactaaccacaagcaagctggctgcaagactaaagagctgataacatagtttatttttacactgtcttattatagagaagtaatagacctatcagaacctgcactgaccaacaaataaacacatgttgccaagatgaatcggtctctatctctatctgcttattttggtactgaaagcaatagttcctcattcaaatcaccacccactgttctccccctttgggacatgttaggacgaggccctattccatgcccctctttaatggtggaacaaatgttaaactgctcatctaaagatcatgttgatattattccaggttttaagatcaacttttgttacatactgtaatttaaataaactgcatttacatgcctagtttctgtaatattgtgtatacaaaacccaaatctctcaaaatgtaaattatgtatacctgccaagataccttttccagggtgtctgcgcacattttaagttaattcacataatataaaaattactcaatgtgactgttgatttgctgaactttacatatcacaaagtgaattatttgtgatactttagttaataaaatggtaaatttttttctcagttattgaacaagcaagcattatccagttgatctggcaatgactttttgtgtgtgggccacaatattgattttcccattaacaatttttttttgttttttaaatactaatatgtttcacactatagtttgtgtaacaacacgtgttcgcattatctatgttgctgttacttttgtgcttttattctttttagactttataaaaaaaaaaaaaagctcctgtaatttgcactttctcccaatccttaaatctcttgtatggcaaccaaaattactgtaaaaaaataaatatactattgcactaaggttgtggttctgattgcaaacaaacagtgaacactgtctgaattaaacaaaaagctgcccgacttgcaatctaatgtagattatctcaggcattgtggccagctctgcctctctaaaactgaccagaaaaatctctctcatcgagtaaacaggctcctgtcactgagctaatctgccttggttccatttccttattctcaatttatcaatggatacgtgcatgttatttcagaattatgcaaaacgtcaaaatctgcttctgtgaccgctgctataggcgtggagctgaggctcggcttttccttttgttctgggtggaagcagcggtgccgcggagggccagccagatccggacccttcccttagggtccagtctccccacaccccagcagggtgtcttctagccataaggccaagggagtggcagaactgggccgcctctctggttgacaagcaaaccacatgctaaggcttggagcaagagagaatttgtgtctattggcaaagaactaagccaggaagacatgggccatccctccgctttagggaagcatattttaaacctaaacgttgaacttcttctttggcctcaccagtgaaaacttgttgtctttagttcctaaagtttcttctactttggcacattccccagttgagcagcagcctctatgcttccacgttcaggaaaaattccagtcctcatatcttttgtagttcaccctcaagctctcccgcttcaccatccaatagtttctcccaaaccttggcacccccctagactttgcttccaatggtttcttccagaccacttttcctagatgaatatattcgtttaccttactaggaaaattattggaagattttttcttttacttgaaattggaggcattttaataactggcgaactggaatgtgtttctgtatttgtagacaaccatgtacccatgcaagtaggtgaacattccacagtggctgggtgaccacagcagctgcatgcagacaggactgcccgtgctttgtggggaatcagagaatttccaaacttgtttctcagacttccgcagatctcatcactttgatttctaatccatgctgtattggtgattttgtttatcgttcctgtaacttgttctacattccacagtctttaccgttttatgttcaaaattacaacaatccctgtccattgattccactctggaactctttgttcatgccaattttgaaattttaatacgagccttcaaataaacacagaaaagaaaaaaaaaaaggaaaaaaaataaagtgtgtgccttgggtgttttgaacctgatctgcataaaaccatattgtattcaaatgctgtatctttcatgaaaggataaatatatcttcaatgtattaatgtagctgataaaatagttatagtgccttgttttctgaactgagaagcccatatcaatgcacaacgtaaagaaaggacggttcgagctatgaaatgttgaggacacctacacgtgattctggagcctttctcatcataagactgtggaaaatacacagtcgtttaagttaaaaataaaaagtaaattgaa

SEQ ID NO: 61266 - DNA, 241 bp, Homo sapiens
actgccagtggatctgccactagacactctggcatggtttgggcgtctccctcgccttcctgggtgatctgcagccagctgccctgactcggtgacctgccttgtgatggttttctctgtgttgctgtttcagaagcccggagatcatgagcaccatctcaggtacacggagcacgacggtcaccttcactgttcgccccggcacctcccagcccatcaccctgcagagccggccccccga

SEQ ID NO: 61267 - DNA, 1327 bp, Homo sapiens
cacacttgaaagagattattgagagtaggttaaggtggttatattggggaggtgtggtatgtgtatatgtgtggatagtgttggagtgtctctaccatattatttgctaaggcggtgtacttgctgctagtctggtctctcaccttcatctacttaagctctgtgcattgatttttgggaccaccctatgttctgtcgtctggttggcatacaggctcgggaataaacagtttcagaaactggggcaggggaggtgacagctgtgtttttaagcatccaagtgtttctgagagaataaccatcagttgctgtcattcatcctgagagtatgaaattggaagctcgcttaccctggagtgtttcataacctttacctctgggaagtcaaggccgtgtcatcattaatctaccatcgcctgaaagcccccaggctctgcttttcatcctgccatcagtcacgtggcactgagattcaggctccctcttttcctttttgccatgctaccttacattcctttggaaatcagactggcctgagaactattaacatcttagtatggtaactcatttacaaaggggggcagttatttgtatttttgtgaaatatgacatcttagctctctgtcagcctctcttccatcactctagggaaaagacttttgagggggaaaataatagcagtacctgagctcccctgaaatgcttctttctgcttctaaggatttttctgactggactctttagattgggaatttctgcttctcacacatggtataaggagggatgataagtgagtgagcttgttacacttgaccaggaacagtgcctggcttggttaattcttttggtcgcagagaataacgatgtttcttatttgaatccagtgaaagtactcatgctttgtgttcttgggaattactgagttcaaattcctaatgatgcttgggttacactttgctttgtttctcctagtttctttttatatgatccggagtggcactggtaataagattgaagaaggtgggccgggcacagtggctcacacctgcaatcccagcactttgggaggccggggcaggcggatcacctgaggtcaggagttcgagaccagcctggctaacatggtgaaaccccgtttctactaaaaatacaaacaaacaaacaaacaaacaaaaaacagccaggcgtggtggcatgcgcctgtaatcccagctacttgggaggctgaggcaggagaatcacttgaacccgggaaggagaggttgcagtgagccgagatcacatcattgcacactccagcttgggcaacaagagcgaaactctgtta

SEQ ID NO: 61268 - DNA, 640 bp, Homo sapiens
ggaattctagtttctatggcttgcctcgagggcaaatgagggggtgagagacaggagagcaggagaaagtcagagagggactttgcttctggggctacttctgaagcatccactttgttgtattgtttcctgagccccaactagtctaactaaattcccacacgtcatccccactttctccgtatctgatgcctctgattcctgagccttcttaggattcagtggggtgaatgcatttgattctgctccgttctcccctctgccggaatttttgagtgtcagctttcctccttctgcctgagttcatctgtcactcttccatataccctcagtcttccagaaattactccatctttctcatctgctgggtctcctctccctttctcattgtccctgtgggttaacgttaactctcccagggccaaaaggatgacttgcacgtcttcagtttgcttacagggcaaacatgaaggcttaagaatcattcattgattggtttgcccatctccataatcattgaaatactctgccctttttccattttctcttgattgttgttggtgctattttttcttgattagtctcaccaggattcattaattttattagtcctttggctctgttgattctccccccattt

SEQ ID NO: 61269 - DNA, 302 bp, Homo sapiens
ggggagagtattgcatttctttatgaagaggtcattagtgaccttttaaaaagcaatttagtacagtgatgaggtgatactctatgaaatattaggtacctcagctggtttggtgttaaatgggaataaggataggacacatttaaagcatttcacaaagaaaattgacaggctttatttgtatacctaacacatgcttatagggtacataccagacactgttctaagctctttaaaaaattaaatcatttattttccataacaaccctatgaaataaattactattgatagatgggaatat

SEQ ID NO: 61270 - DNA, 5574 bp, Homo sapiens
ccggttcctgccatgcccggcggccccagtccccgcagccccgcgcctttgctgcgccccctcctcctgctcctctgcgctctggctcccggcgcccccggacccgcaccaggacgtgcaaccgagggccgggcggcactggacatcgtgcacccggttcgagtcgacgcggggggctccttcctgtcctacgagctgtggccccgcgcactgcgcaagcgggatgtatctgtgcgccgagacgcgcccgccttctacgagctacaataccgcgggcgcgagctgcgcttcaacctgaccgccaatcagcacctgctggcgcccggctttgtgagcgagacgcggcggcgcggcggcctgggccgcgcgcacatccgggcccacaccccggcctgccacctgcttggcgaggtgcaggaccctgagctcgagggtggcctggcggccatcagcgcctgcgacggcctgaaaggtgtgttccagctctccaacgaggactacttcattgagcccctggacagtgccccggcccggcctggccacgcccagccccatgtggtgtacaagcgtcaggccccggagaggctggcacagcggggtgattccagtgctccaagcacctgtggagtgcaagtgtacccagagctggagtctcgacgggagcgttgggagcagcggcagcagtggcggcggccacggctgaggcgtctacaccagcggtcggtcagcaaagagaagtgggtggagaccctggtagtagctgatgccaaaatggtggagtaccacggacagccgcaggttgagagctatgtgctgaccatcatgaacatggtggctggcctgtttcatgaccccagcattgggaaccccatccacatcaccattgtgcgcctggtcctgctggaagatgaggaggaggacctaaagatcacgcaccatgcagacaacaccctgaagagcttctgcaagtggcagaaaagcatcaacatgaagggggatgcccatcccctgcaccatgacactgccatcctgctcaccagaaaggacctgtgtgcagccatgaaccggccctgtgagaccctgggactgtcccatgtggcgggcatgtgccagccgcaccgcagctgcagcatcaacgaggacacgggcctgccgctggccttcactgtagcccacgagctcgggcacagttttggcattcagcatgacggaagcggcaatgactgtgagcccgttgggaaacgacctttcatcatgtctccacagctcctgtacgacgccgctcccctcacctggtcccgctgcagccgccagtatatcaccaggttccttgaccgtgggtggggcctgtgcctggacgaccctcctgccaaggacattatcgacttcccctcggtgccacctggcgtcctctatgatgtaagccaccagtgccgcctccagtacggggcctactctgccttctgcgaggacatggataatgtctgccacacactctggtgctctgtggggaccacctgtcactccaagctggatgcagctgtggacggcacccggtgtggggagaataagtggtgtctcagtggggagtgcgtacccgtgggcttccggcccgaggccgtggatggtggctggtctggctggagcgcctggtccatctgctcacggagctgtggcatgggcgtacagagcgccgagcggcagtgcacgcagcctacgcccaaatacaaaggcagatactgtgtgggtgagcgcaagcgcttccgcctctgcaacctgcaggcctgccctgctggccgcccctccttccgccacgtccagtgcagccactttgacgctatgctctacaagggccagctgcacacatgggtgcccgtggtcaatgacgtgaacccctgcgagctgcactgccggcccgcgaatgagtactttgccaagaagctgcgggacgccgtggtcgatggcaccccctgctaccaggtccgagccagccgggacctctgcatcaacggcatctgtaagaacgtgggctgtgacttcgagattgactccggtgctatggaggaccgctgtggtgtgtgccacggcaacggctccacctgccacaccgtgagcgggaccttcgaggaggccgagggtctggggtatgtggatgtggggctgatcccagcgggcgcacgcgagatccgcatccaagaggttgccgaggctgccaacttcctggcactgcggagcgaggacccggagaagtacttcctcaatggtggctggaccatccagtggaacggggactaccaggtggcagggaccaccttcacatacgcacgcaggggcaactgggagaacctcacgtccccgggtcccaccaaggagcctgtctggatccaggtgcctgcctcccgtggcccaggcggggggagcagaggcggagtccccaggcccagcaccctccatggcaggtctcgtcctggaggagtgagccctggttcagtcacagagcctggctctgagccaggccctcctgctgcggcctctacctcagtttccccatctttaaaatggcccaatcttgtagctgcagttcacagaggtggctggggtcaagctcctttaggactgggtggatggagaagacaccttgtgctcatgggcccccgcctgcccacccagctgctgttccaggagagcaaccctggggtgcactacgagtacaccatccacagggaggcaggtggccacgacgaggtcccgccgcccgtgttctcctggcattatgggccctggaccaagtgcacagtcacctgcggcagaggtgtgcagaggcagaatgtgtactgcttggagcggcaggcagggcccgtggacgaggagcactgtgaccccctgggccggcctgatgaccaacagaggaagtgcagcgagcagccctgccctgccaggtggtgggcaggtgagtggcagctgtgctccagctcctgcgggcctgggggcctctcccgccgggccgtgctctgcatccgcagcgtggggctggatgagcagagcgccctggagccacccgcctgtgaacaccttccccggccccctactgaaaccccttgcaaccgccatgtaccctgtccggccacctgggctgtggggaactggtctcagtgctcagtgacatgtggggagggcactcagcgccgaaatgtcctctgcaccaatgacaccggtgtcccctgtgacgaggcccagcagccagccagcgaagtcacctgctctctgccactctgtcggtggcccctgggcacactgggccctgaaggctcaggcagcggctcctccagccacgagctcttcaacgaggctgacttcatcccgcaccacctggccccacgcccttcacccgcctcatcacccaagccaggcaccatgggcaacgccattgaggaggaggctccagagctggacctgccggggcccgtgtttgtggacgacttctactacgactacaatttcatcaatttccacgaggatctgtcctacgggccctctgaggagcccgatctagacctggcggggacaggggaccggacgcccccaccacacagccatcctgctgcgccctccacgggtagccctgtgcctgccacagagcctcctgcagccaaggaggagggggtactgggaccttggtccccgagcccttggcctagccaggccggcgctccccacccccaccctcagagcagacccctgggaaccctttgatcaatttcctgcctgaggaagacacccccataggggccccagatcttgggctccccagcctgtcctggcccagggtttccactgatggcctgcagacacctgccaccctgagagccaaaatgatttcccagttggcaaggacagccagagccagtgccccctccatggcgggacaggaccaatgaggttttcaaggatgatgaggaacccaagggccgcggagcaccccacctgcccccgagacccagctccacgctgccccctttgtcccctgttggcagcacccactcctctcctagtcctgacgtggcggagctgtggacaggaggcacagtggcctgggagccagctctggagggtggcctggggcctgtggacagtgaactgtggcccactgttggggtggcttctctccttcctcctcccatagcccctctgccagagatgaaggtcagggacagttccctggagccggggactccctccttcccaaccccaggaccaggctcatgggacctgcagactgtggcagtgtgggggaccttcctccccacaaccctgactggcctcgggcacatgcctgagcctgccctgaacccaggacccaagggtcagcctgagtccctcagccctgaggtgcccctgagctctaggctgctgtccacaccagcttgggacagccccgccaacagccacagagtccctgagacccagccgctggctcccagcctggctgaagcggggccccccgcggacccgttggttgtcaggaacgccagctggcaagcgggaaactggagcgagtgctctaccacctgtggcctgggtgcggtctggaggccggtgcgctgtagctccggccgggatgaggactgcgcccccgctggccggccccagcctgcccgccgctgccacctgcggccctgtgccacctggcactcaggcaactggagtaagtgctcccgcagctgcggcggaggttcctcagtgcgggacgtgcagtgtgtggacacacgggacctccggccactgcggcccttccattgtcagcccgggcctgccaagccgcctgcgcaccggccctgcggggcccagccctgcctcagctggtacacatcttcctggagggagtgctccgaggcctgtggcggtggtgagcagcagcgtctagtgacctgcccggagccaggcctctgcgaggaggcgctgagacccaacaccacccggccctgcaacacccacccctgcacgcagtgggtggtggggccctggggccagtgctcagccccctgtggtggtggtgtccagcggcgcctggtcaagtgtgtcaacacccagacagggctgcccgaggaagacagtgaccagtgtggccacgaggcctggcctgagagctcccggccgtgtggcaccgaggattgtgagcccgtcgagcctccccgctgtgagcgggaccgcctgtccttcgggttctgcgagacgctgcgcctactgggccgctgccagctgcccaccatccgcacccagtgctgccgctcgtgctctccgcccagccacggcgccccctcccgaggccatcagcgggttgcccgccgctgactgtgccaggatgcacagaccgaccgacagacctcagtgcccaccacgggctgtggcggagctcccgccccctgcgccctaatggtgctaaccccctctcactacccagcagcaggctggggacctcctccccctcaaaaaaggtatttttttattctaacagtttgtgtaacatttattatgattttacataaatgagcatctaccattccaaagcacagc

SEQ ID NO: 61271 - DNA, 1231 bp, Homo sapiens
aaggggagggccccaggctgcacatctgtgtgcccgatcacaccggattctgaatctcttgggagtcttctcatctttgtctggcttggcctgtctcctttcctctgtatctttgaccccatctggacttgtctttcaccagcttgcctttgttcctccctttctctgtctgtcccagcccgtggcagcccctggccatgccaccttttgcctggggcctgccagccttggcctctcgctggggttcttcagctattcccccgggctggggcgtgggcctggatgcctttcccgccacacacctcacggggtcacgcctgtgggcctgcacatggggatgtgtccatacacgtctctcggtccccagtgctcccgcagctgcggcggaggttcctcagtgcgggacgtgcagtgtgtggacacacgggacctccggccactgcggcccttccattgtcagcccgggcctgccaagccgcctgcgcaccggccctgcggggcccagccctgcctcagctggtacacatcttcctggagggagtgctccgaggcctgtggcggtggtgagcagcagcgtctagtgacctgcccggagccaggcctctgcgaggaggcgctgagacccaacaccacccggccctgcaacacccacccctgcacgcagtgggtggtggggccctggggccagtgctcagccccctgtggtggtggtgtccagcggcgcctggtcaagtgtgtcaacacccagacagggctgcccgaggaagacagtgaccagtgtggccacgaggcctggcctgagagctcccggccgtgtggcaccgaggattgtgagcccgtcgagcctccccgctgtgagcgggaccgcctgtccttcgggttctgcgagacgctgcgcctactgggccgctgccagctgcccaccatccgcacccagtgctgccgctcgtgctctccgcccagccacggcgccccctcccgaggccatcagcgggttgcccgccgctgactgtgccaggatgcacagaccgaccgacagacctcagtgcccaccacgggctgtggcggagctcccgccccctgcgccctaatggtgctaaccccctctcactacccagcagcaggctggggacctcctccccctcaaaaaaggtatttttttattctaacagtttgtgtaacatttattatgattttacataaatgagcatctaccattccaaagcacagc

SEQ ID NO: 61272 - DNA, 313 bp, Homo sapiens
gtgagtgagctgggacatgtatacttggggcagtctcgggtggtgggatgtgcagattggctctagccttgccacgcacttgtctggtggctttgcccagtgcactttttctctgccagcctcggtattcacgcctgtaaagtgggagtgacaacgcaggcctcgttgatctctaggataacagttctcaaagtttaatgtgaaagccgggtggtggtgcacctgtagtcccagctatttgggaggctgaggcgaaaggatcacttgagcccaggaattcaaggatgtagggtgtggtgattgcgcttagctg

SEQ ID NO: 61273 - DNA, 3179 bp, Homo sapiens
ccggttcctgccatgcccggcggccccagtccccgcagccccgcgcctttgctgcgccccctcctcctgctcctctgcgctctggctcccggcgcccccggacccgcaccaggacgtgcaaccgagggccgggcggcactggacatcgtgcacccggttcgagtcgacgcggggggctccttcctgtcctacgagctgtggccccgcgcactgcgcaagcgggatgtatctgtgcgccgagacgcgcccgccttctacgagctacaataccgcgggcgcgagctgcgcttcaacctgaccgccaatcagcacctgctggcgcccggctttgtgagcgagacgcggcggcgcggcggcctgggccgcgcgcacatccgggcccacaccccggcctgccacctgcttggcgaggtgcaggaccctgagctcgagggtggcctggcggccatcagcgcctgcgacggcctgaaaggtgtgttccagctctccaacgaggactacttcattgagcccctggacagtgccccggcccggcctggccacgcccagccccatgtggtgtacaagcgtcaggccccggagaggctggcacagcggggtgattccagtgctccaagcacctgtggagtgcaagtgtacccagagctggagtctcgacgggagcgttgggagcagcggcagcagtggcggcggccacggctgaggcgtctacaccagcggtcggtcagcaaagagaagtgggtggagaccctggtagtagctgatgccaaaatggtggagtaccacggacagccgcaggttgagagctatgtgctgaccatcatgaacatggtggctggcctgtttcatgaccccagcattgggaaccccatccacatcaccattgtgcgcctggtcctgctggaagatgaggaggaggacctaaagatcacgcaccatgcagacaacaccctgaagagcttctgcaagtggcagaaaagcatcaacatgaagggggatgcccatcccctgcaccatgacactgccatcctgctcaccagaaaggacctgtgtgcagccatgaaccggccctgtgagaccctgggactgtcccatgtggcgggcatgtgccagccgcaccgcagctgcagcatcaacgaggacacgggcctgccgctggccttcactgtagcccacgagctcgggcacagttttggcattcagcatgacggaagcggcaatgactgtgagcccgttgggaaacgacctttcatcatgtctccacagctcctgtacgacgccgctcccctcacctggtcccgctgcagccgccagtatatcaccaggttccttgaccgtgggtggggcctgtgcctggacgaccctcctgccaaggacattatcgacttcccctcggtgccacctggcgtcctctatgatgtaagccaccagtgccgcctccagtacggggcctactctgccttctgcgaggacatggataatgtctgccacacactctggtgctctgtggggaccacctgtcactccaagctggatgcagctgtggacggcacccggtgtggggagaataagtggtgtctcagtggggagtgcgtacccgtgggcttccggcccgaggccgtggatggtggctggtctggctggagcgcctggtccatctgctcacggagctgtggcatgggcgtacagagcgccgagcggcagtgcacgcagcctacgcccaaatacaaaggcagatactgtgtgggtgagcgcaagcgcttccgcctctgcaacctgcaggcctgccctgctggccgcccctccttccgccacgtccagtgcagccactttgacgctatgctctacaagggccagctgcacacatgggtgcccgtggtcaatgacgtgaacccctgcgagctgcactgccggcccgcgaatgagtactttgccaagaagctgcgggacgccgtggtcgatggcaccccctgctaccaggtccgagccagccgggacctctgcatcaacggcatctgtaagaacgtgggctgtgacttcgagattgactccggtgctatggaggaccgctgtggtgtgtgccacggcaacggctccacctgccacaccgtgagcgggaccttcgaggaggccgagggtctggggtatgtggatgtggggctgatcccagcgggcgcacgcgagatccgcatccaagaggttgccgaggctgccaacttcctggcactgcggagcgaggacccggagaagtacttcctcaatggtggctggaccatccagtggaacggggactaccaggtggcagggaccaccttcacatacgcacgcaggggcaactgggagaacctcacgtccccgggtcccaccaaggagcctgtctggatccaggtgcctgcctcccgtggcccaggcggggggagcagaggcggagtccccaggcccagcaccctccatggcaggtctcgtcctggaggagtgagccctggttcagtcacagagcctggctctgagccaggccctcctgctgcggcctctacctcagtttccccatctttaaaatggcccaatcttgtagctgcagttcacagaggtggctggggtcaagctcctttaggactgggtggatggagaagacaccttgtgctcatgggcccccgcctgcccacccagctgctgttccaggagagcaaccctggggtgcactacgagtacaccatccacagggaggcaggtggccacgacgaggtcccgccgcccgtgttctcctggcattatgggccctggaccaagtgcacagtcacctgcggcagaggtgagaagtggggcaggcacagccccacctgcaggggcttagtgtctggacagggacactggcttcagctcccagctcactgctgggccaccacgggtttggaagtttgcttctctgagcctcagttctccatctgtgagatgaggctagcgattgccctgtgtcccaggcccgctgggagggtacatggatgaggcaggtgggtgctggctcgcggcgcatgttcagtgtgctccagctcttggcgttctccctccaggggacacagctccccctcgatagaccagtccagtggcccctcaccacactgacttatttccctaaactatttataaaaagtagggcaatttcattaactctgactctt

SEQ ID NO: 61274 - DNA, 501 bp, Homo sapiens
gctccagaaactggggctctctgcttggtggggagctgctggagcctccttaaggtggttggcgtagggagccaggttctgggtaccccaagctactggttctgatgcctctctgcccccccactccaggctgtgagcgggaccgcctgtccttcgggttctgcgagacgctgcgcctactgggccgctgccagctgcccaccatccgcacccagtgctgccgctcgtgctctccgcccagccacggcgccccctcccgaggccatcagcgggttgcccgccgctgactgtgccaggatgcacagaccgaccgacagacctcagtgcccaccacgggctgtggcggagctcccgccccctgcgccctaatggtgctaaccccctctcactacccagcagcaggctggggacctcctccccctcaaaaaaggtatttttttattctaacagtttgtgtaacatttattatgattttacataaatgagcatctaccattccaa

SEQ ID NO: 61275 - DNA, 1004 bp, Homo sapiens
ctccaccacgcgtccgcggacgcgtgggccggccgcggcggcgaggggcgctccctcttcagctaagccgttagcgccgagcccgcccgggagcgggtcgccggccgcggcgggcgcccctgccagtgagcccctgtccgaagtgagccacggcattgactcggggctgcccgggggcagggcactgaggagggagttgcgcgcgcgaggcgagggcgatggggccaagaagaaccggggcgatagcgcggcagcggtgacagctgggacccgccgcggtcgggctgccccctcccctcgccccgaccgctcccctgctggtgagggcctgcggaggcggcggcggcggcgcccttggtggcagtggtggcggcggagcagcctcccgggatcgtgtccggagctcgaggagagggtggtgcccggcgagctatgcacgggggcggcggcgtctcctcctgttccgcctcctcagtctcctcggtctcgcagaatccgccggcggcggcggcgccaggacatggagctcgagaacatcgtggccaactcgctgctgctgaaagcgcgtcaaggcagaatatgaagttgccgatgatgaggaccgaagtgattgtggactgtcaatcttagatagattcttcaatgataagttggcagcccctttaccagaaatacctccagatgttgtgacagaatgtagattgggactgaaggaggagaacccttccaaaaaagcctttgaggaatgtactagaaggagaaactgaggctatagaggttggagttgcccataactacctaagaggggaaccatttgaagaataccaagaaagctcatatttttctcagtttttacaatggaaatggctggaaaggcaacccgtaacaaagaacacatttagacattacagagttctaggaaaaggcggatttggagaggtttgcgcctgtcaagtgcgagccacaggaaaaatgtatgcttgcgaaaagctacaaaaaaaaaa

SEQ ID NO: 61276 - DNA, 428 bp, Homo sapiens
gagatgggatctcgctatgttgctcaggctggcctcgaactcttgagctcaagtgatcctcccaacctcagcgtcccaagtggctggaactacaggtatgcaccaccacacccagcttaactgttctttcttttcttccatctctccaatcaggcagaatatgaagttgccgatgatgaggaccgaagtgattgtggactgtcaatcttagatagattcttcaatgataagttggcagcccctttaccagaaatacctccagatgttgtgacagaatgtagattgggactgaaggaggagaacccttccaaaaaagcctttgaggaatgtactaggtaagtggttcatgctgagccctgcatatattatctatgactaaccccaaaacagacagctttcaggaggtttctctgcataagacaagttcc

SEQ ID NO: 61277 - DNA, 1648 bp, Homo sapiens
ctccaccacgcgtccgcggacgcgtgggccggccgcggcggcgaggggcgctccctcttcagctaagccgttagcgccgagcccgcccgggagcgggtcgccggccgcggcgggcgcccctgccagtgagcccctgtccgaagtgagccacggcattgactcggggctgcccgggggcagggcactgaggagggagttgcgcgcgcgaggcgagggcgatggggccaagaagaaccggggcgatagcgcggcagcggtgacagctgggacccgccgcggtcgggctgccccctcccctcgccccgaccgctcccctgctggtgagggcctgcggaggcggcggcggcggcgcccttggtggcagtggtggcggcggagcagcctcccgggatcgtgtccggagctcgaggagagggtggtgcccggcgagctatgcacgggggcggcggcgtctcctcctgttccgcctcctcagtctcctcggtctcgcagaatccgccggcggcggcggcgccaggacatggagctcgagaacatcgtggccaactcgctgctgctgaaagcgcgtcaagtcctctgcatcccgccacaaaagcatcagttggtccagcccttcagcgggagacccccacaatcctctgtgcaatcctctgtctcggacctcatgtctcccttgcctgcgtctcaagagagctggcgacagagcctcggacctcaagtccctgtgctagccacggtagttcttcacaccccgtcactcttacggaattgctgatttcctctatttccttgcgtgatggagcagctctgctcggactgtgctccaggacagtgtaaatgccgactgaagatgccacagcagccggcgatgcatatttaaaggacagtctggagccgaaggtggcggccacgcttgtagtcccagctactctggaagctgaggtggaaggctcacttgggcccaggagagtccagcctgggcaaaacacagcaagaccatctctttaaaaaagtctaaaacaaagacttcatcttctcagtatttttgtgcaccaactcacactattttgaatagaagaactgagaatgggtgggaagagaatgggatctttttcccttaagataatcagggagtcccagagcagtatgcgttctcagcagccattttcagtggagcatttgactgtgcctcttatccctgactgtgaactccaaataggtcatggaaaataatcatccttagtggaagtcagattgaagctaagccagttttctttttacactaccttcctatctgcatgtaatttacaaaaaggaactataccaagccgccttccttataatgctgcagagattagataatgagataaatacaagtgctctataaatgctaaataacataaaaccagattctgtcacaaaacctaagaccacagtgatagtttgatggaggccgaggcgggcggatcacaaggtcaggagattgagaccatcctggctaacatggtgaaaccccgtctctactaaaaatacaaaaattagccgggcgtggtggcgggcgcctgtagtcccagctacatgggaggctgaggcaggagaatggcgtgaaccctggaggcagagcttgcagtgagccgagatcgcgcca

SEQ ID NO: 61278 - DNA, 670 bp, Homo sapiens
gttatgccaagtcatcagttatgctatagattatgtgacctgtcattatatgattaactgcctttgttttgcttctgtaagtttgcttataaaaatcctgcttagtctttgttcaaggctcagctttttggatgtgaatccactgagctggtgcgtaccttaacataaatatcctcctgttttcacccatgctggtctctctagtcctctgcatcccgccacaaaagcatcagttggtccagcccttcagcgggagacccccacaatcctctgtgcaatcctctgtctcggacctcatgtctcccttgcctgcgtctcaagagagctggcgacagagcctcggacctcaagtccctgtgctagccacggtagttcttcacaccccgtcactcttacggaattgctgatttcctctatttccttgcgtgatggagcagctctgctcggactgtgctccaggacagtgtaaatgccgactgaagatgccacagcagccggcgatgcatatttaaaggacagtctggagccgaaggtggcggccacgcttgtagtcccagctactctggaagctgaggtggaaggctcacttgggcccaggagagtccagcctgggcaaaacacagcaagaccatctctttaaaaaagtctaaaacaaagacttcatcttctc

SEQ ID NO: 61279 - DNA, 1194 bp, Homo sapiens
ctccaccacgcgtccgcggacgcgtgggccggccgcggcggcgaggggcgctccctcttcagctaagccgttagcgccgagcccgcccgggagcgggtcgccggccgcggcgggcgcccctgccagtgagcccctgtccgaagtgagccacggcattgactcggggctgcccgggggcagggcactgaggagggagttgcgcgcgcgaggcgagggcgatggggccaagaagaaccggggcgatagcgcggcagcggtgacagctgggacccgccgcggtcgggctgccccctcccctcgccccgaccgctcccctgctggtgagggcctgcggaggcggcggcggcggcgcccttggtggcagtggtggcggcggagcagcctcccgggatcgtgtccggagctcgaggagagggtggtgcccggcgagctatgcacgggggcggcggcgtctcctcctgttccgcctcctcagtctcctcggtctcgcagaatccgccggcggcggcggcgccaggacatggagctcgagaacatcgtggccaactcgctgctgctgaaagcgcgtcaaggaggatatggcaaaaaaagtggtcgtagtaaaaaatggaaggagatactgacactgcctcctgtcagccagtgcagtgagcttagacattccattgaaaaggattatagcagtctttgtgacaagcaaccgataggaagacgtctcttcaggcagttctgtgataccaaacccactctaaagaggcacattgaattcttggatgcagtggcagaatatgaagttgccgatgatgaggaccgaagtgattgtggactgtcaatcttagatagattcttcaatgataagttggcagcccctttaccagaaatacctccagatgttgtgacagaatgtagattgggactgaaggaggagaacccttccaaaaaagcctttgaggaatgtactagagttgcccataactacctaagaggggaaccatttgaagaataccaagaaagctcatatttttctcagtttttacaatggaaatggctggaaaggcaacccgtaacaaagaacacatttagacattacagagttctaggaaaaggcggatttggagagcagtcccctgtggggtgtgcagtggatgggagttggaagaaacagcagcctaatgttgatgacacagaggcacg

SEQ ID NO: 61280 - DNA, 4520 bp, Homo sapiens
tgtaagtagggtgggacagagatggcacctgggggttctgaggcacccgctcctctctgagacagacagggatcaggagccggactgggaccagaccaccagcaacacaccagaggatgttctctaaataagaccatggcacttaagaacattaactaccttctcatcttctacctcagtttctcactgcttatctacataaaaaattccttttgcaataaaaacaacaccaggtgcctctcaaattcttgccaaaacaattctacatgcaaagatttttcaaaagacaatgattgttcttgttcagacacagccaataatttggacaaagactgtgacaacatgaaagacccttgcttctccaatccctgtcaaggaagtgccacttgtgtgaacaccccaggagaaaggagctttctgtgcaaatgtcctcctgggtacagtgggacaatctgtgaaactaccattggttcctgtggcaagaactcctgccaacatggaggtatttgccatcaggaccctatttatcctgtctgcatctgccctgctggatatgctggaagattctgtgagatagatcacgatgagtgtgcttccagcccttgccaaaatggggccgtgtgccaggatggaattgatggttactcctgcttctgtgtcccaggatatcaaggcagacactgcgacttggaagtggatgaatgtgcttcagatccctgcaagaacgaggctacatgcctcaatgaaataggaagatatacttgtatctgtccccacaattattctggtgtaaactgtgaattggaaattgacgaatgttggtcccagccttgtttaaatggtgcaacttgtcaggatgctctgggggcctatttctgcgactgtgcccctggattcctgggggatcactgtgaactcaacactgatgagtgtgccagtcaaccttgtctccatggagggctgtgtgtggatggagaaaacagatatagctgtaactgcacgggtagtggattcacagggacacactgtgagaccttgatgcctctttgttggtcaaaaccttgtcacaataatgctacatgtgaggacagtgttgacaattacacttgtcactgctggcctggatacacaggtgcccagtgtgagatcgacctcaatgaatgcaatagtaacccctgccagtccaatggggaatgtgtggagctgtcctcagagaaacaatatggacgcatcactggactgccttcttctttcagctaccatgaagcctcaggttatgtctgtatctgtcagcctggattcacaggaatccactgcgaagaagacgtcaatgaatgttcttcaaacccttgccaaaatggtggtacttgtgagaacttgcctgggaattatacttgccattgcccatttgataacctttctagaactttttatggaggaagggactgttctgatattctcctgggctgtacccatcagcaatgtctaaataatggaacatgcatccctcacttccaagatggccagcatggattcagctgcctgtgtccatctggctacaccgggtccctgtgtgaaatcgcaaccacactttcatttgagggcgatggcttcctgtgggtcaaaagtggctcagtgacaaccaagggctcagtttgtaacatagccctcaggtttcagactgttcagccaatggctcttctacttttccgaagcaacagggatgtgtttgtgaagctggagctgctaagtggctacattcacttatcaattcaggtcaataatcagtcaaaggtgcttctgttcatttcccacaacaccagcgatggagagtggcatttcgtggaggtaatatttgcagaggctgtgacccttaccttaatcgacgactcctgtaaggagaaatgcatcgcgaaagctcctactccacttgaaagtgatcaatcaatatgtgcttttcagaactcctttttgggtggtttaccagtgggaatgaccagcaatggtgttgctctgcttaacttctataatatgccatccacaccttcgtttgtaggctgtctccaagacattaaaattgattggaatcacattaccctggagaacatctcgtctggctcatcattaaatgtcaaggcaggctgtgtgagaaaggattggtgtgaaagccaaccttgtcaaagcagaggacgctgcatcaacttgtggctgagttaccagtgtgactgccacaggccctatgaaggccccaactgtctgagagagtatgtggcaggcagatttggccaggatgactccactggttatgtcatctttactcttgatgagagctatggagacaccatcagcctctccatgtttgtccgaacgcttcaaccatcaggcttacttctagctttggaaaacagcacttatcaatatatccgtgtctggctagagcgcggcagactagcaatgctgactccaaactctcccaaattagtagtaaaatttgttcttaatgatggaaatgtccacttgatatctttgaaaatcaagccatataaaattgaactgtatcagtcttcacaaaacctaggatttatttctgcttctacgtggaaaatcgaaaagggagatgtcatctacattggtggcctacctgacaagcaagagactgaacttaatggtggattcttcaaaggctgtatccaagatgtaagactaaacaaccaaaatctggaattctttccaaatccaacaaacaatgcatctctcaatccagttcttgtcaatgtaacccaaggctgtgctggagacaacagctgcaagtccaacccctgtcacaatggaggtgtttgccattcccggtgggatgacttctcctgttcctgtcctgccctcacaagtgggaaagcctgtgaggaggttcagtggtgtggattcagcccgtgtcctcacggagcccagtgccagccggtgcttcaaggatttgaatgtattgcaaatgctgtttttaatggacaaagcggtcaaatattattcagaagcaatgggaatattaccagagaactcaccaatatcacatttggtttcagaacaagggatgcaaatgtaataatattgcatgcagaaaaagagcctgaatttcttaatattagcattcaagattccagattattctttcaattgcaaagtggcaacagcttttatatgctaagtctgacaagtttgcagtcagtgaatgatggcacatggcacgaagtgaccctttccatgacagacccactgtcccagacctccaggtggcaaatggaagtggacaacgaaacaccttttgtgaccagcacaattgctactggaagcctcaactttttgaaggataatacagatatttatgtgggagacagagctattgacaatataaagggcctgcaagggtgtctaagtacaatagaaatcggaggcatttatctctcttactttgaaaatgttcatggtttcattaataaacctcaggaagagcaatttctcaaaatctctaccaattcagtggtcactggctgtttgcagttaaatgtctgcaactccaacccctgtttgcatggaggaaactgtgaagacatctatagctcttatcattgctcctgtcccttgggatggtcagggaaacactgtgaactcaacatcgatgaatgcttttcaaacccctgtatccatggcaactgctctgacagagttgcagcctaccactgcacatgtgagcctggatacactggtgtgaactgtgaagtggatatagacaactgccagagtcaccagtgtgcaaatggagccacctgcattagtcatactaatggctattcttgcctctgttttggaaattttacaggaaaattttgcagacagagcagattaccctcaacagtctgtgggaatgagaagacaaatctcacttgctacaatggaggcaactgcacagagttccagactgaattaaaatgtatgtgccggccaggttttactggagaatggtgtgaaaaggacattgatgagtgtgcctctgatccgtgtgtcaatggaggtctgtgccaggacttactcaacaaattccagtgcctctgtgatgttgcctttgctggcgagcgctgcgaggtggacgtaagcagcctctccttttatgtctctctcttattctggcagaatctttttcagcttctttcttacctcattttgcgtatgaatgacgagccagttgttgagtggggtgaacaggaagattattaacatacatttgaacattcccaaatgaaaaaaaaagccattgaatttcaagaaatgccttgattcattttagatctctggggaagggaaaaaggaaataaaaaccatctcaataattaaggtaaattcaaggcttattttaaacatatcagaagcactttgtctgtgtataaaatattttcctattctaactttaaatatgaaaaaagtgttcttaatataactagaaatatctccttattgtgtgtatttagtac

SEQ ID NO: 61281 - DNA, 4919 bp, Homo sapiens
tgtaagtagggtgggacagagatggcacctgggggttctgaggcacccgctcctctctgagacagacagggatcaggagccggactgggaccagaccaccagcaacacaccagaggatgttctctaaataagaccatggcacttaagaacattaactaccttctcatcttctacctcagtttctcactgcttatctacataaaaaattccttttgcaataaaaacaacaccaggtgcctctcaaattcttgccaaaacaattctacatgcaaagatttttcaaaagacaatgattgttcttgttcagacacagccaataatttggacaaagactgtgacaacatgaaagacccttgcttctccaatccctgtcaaggaagtgccacttgtgtgaacaccccaggagaaaggagctttctgtgcaaatgtcctcctgggtacagtgggacaatctgtgaaactaccattggttcctgtggcaagaactcctgccaacatggaggtatttgccatcaggaccctatttatcctgtctgcatctgccctgctggatatgctggaagattctgtgagatagatcacgatgagtgtgcttccagcccttgccaaaatggggccgtgtgccaggatggaattgatggttactcctgcttctgtgtcccaggatatcaaggcagacactgcgacttggaagtggatgaatgtgcttcagatccctgcaagaacgaggctacatgcctcaatgaaataggaagatatacttgtatctgtccccacaattattctggtgtaaactgtgaattggaaattgacgaatgttggtcccagccttgtttaaatggtgcaacttgtcaggatgctctgggggcctatttctgcgactgtgcccctggattcctgggggatcactgtgaactcaacactgatgagtgtgccagtcaaccttgtctccatggagggctgtgtgtggatggagaaaacagatatagctgtaactgcacgggtagtggattcacagggacacactgtgagaccttgatgcctctttgttggtcaaaaccttgtcacaataatgctacatgtgaggacagtgttgacaattacacttgtcactgctggcctggatacacaggtgcccagtgtgagatcgacctcaatgaatgcaatagtaacccctgccagtccaatggggaatgtgtggagctgtcctcagagaaacaatatggacgcatcactggactgccttcttctttcagctaccatgaagcctcaggttatgtctgtatctgtcagcctggattcacaggaatccactgcgaagaagacgtcaatgaatgttcttcaaacccttgccaaaatggtggtacttgtgagaacttgcctgggaattatacttgccattgcccatttgataacctttctagaactttttatggaggaagggactgttctgatattctcctgggctgtacccatcagcaatgtctaaataatggaacatgcatccctcacttccaagatggccagcatggattcagctgcctgtgtccatctggctacaccgggtccctgtgtgaaatcgcaaccacactttcatttgagggcgatggcttcctgtgggtcaaaagtggctcagtgacaaccaagggctcagtttgtaacatagccctcaggtttcagactgttcagccaatggctcttctacttttccgaagcaacagggatgtgtttgtgaagctggagctgctaagtggctacattcacttatcaattcaggtcaataatcagtcaaaggtgcttctgttcatttcccacaacaccagcgatggagagtggcatttcgtggaggtaatatttgcagaggctgtgacccttaccttaatcgacgactcctgtaaggagaaatgcatcgcgaaagctcctactccacttgaaagtgatcaatcaatatgtgcttttcagaactcctttttgggtggtttaccagtgggaatgaccagcaatggtgttgctctgcttaacttctataatatgccatccacaccttcgtttgtaggctgtctccaagacattaaaattgattggaatcacattaccctggagaacatctcgtctggctcatcattaaatgtcaaggcaggctgtgtgagaaaggattggtgtgaaagccaaccttgtcaaagcagaggacgctgcatcaacttgtggctgagttaccagtgtgactgccacaggccctatgaaggccccaactgtctgagagagtatgtggcaggcagatttggccaggatgactccactggttatgtcatctttactcttgatgagagctatggagacaccatcagcctctccatgtttgtccgaacgcttcaaccatcaggcttacttctagctttggaaaacagcacttatcaatatatccgtgtctggctagagcgcggcagactagcaatgctgactccaaactctcccaaattagtagtaaaatttgttcttaatgatggaaatgtccacttgatatctttgaaaatcaagccatataaaattgaactgtatcagtcttcacaaaacctaggatttatttctgcttctacgtggaaaatcgaaaagggagatgtcatctacattggtggcctacctgacaagcaagagactgaacttaatggtggattcttcaaaggctgtatccaagatgtaagactaaacaaccaaaatctggaattctttccaaatccaacaaacaatgcatctctcaatccagttcttgtcaatgtaacccaaggctgtgctggagacaacagctgcaagtccaacccctgtcacaatggaggtgtttgccattcccggtgggatgacttctcctgttcctgtcctgccctcacaagtgggaaagcctgtgaggaggttcagtggtgtggattcagcccgtgtcctcacggagcccagtgccagccggtgcttcaaggatttgaatgtattgcaaatgctgtttttaatggacaaagcggtcaaatattattcagaagcaatgggaatattaccagagaactcaccaatatcacatttggtttcagaacaagggatgcaaatgtaataatattgcatgcagaaaaagagcctgaatttcttaatattagcattcaagattccagattattctttcaattgcaaagtggcaacagcttttatatgctaagtctgacaagtttgcagtcagtgaatgatggcacatggcacgaagtgaccctttccatgacagacccactgtcccagacctccaggtggcaaatggaagtggacaacgaaacaccttttgtgaccagcacaattgctactggaagcctcaactttttgaaggataatacagatatttatgtgggagacagagctattgacaatataaagggcctgcaagggtgtctaagtacaatagaaatcggaggcatttatctctcttactttgaaaatgttcatggtttcattaataaacctcaggaagagcaatttctcaaaatctctaccaattcagtggtcactggctgtttgcagttaaatgtctgcaactccaacccctgtttgcatggaggaaactgtgaagacatctatagctcttatcattgctcctgtcccttgggatggtcagggaaacactgtgaactcaacatcgatgaatgcttttcaaacccctgtatccatggcaactgctctgacagagttgcagcctaccactgcacatgtgagcctggatacactggtgtgaactgtgaagtggatatagacaactgccagagtcaccagtgtgcaaatggagccacctgcattagtcatactaatggctattcttgcctctgttttggaaattttacaggaaaattttgcagacagagcagattaccctcaacagtctgtgggaatgagaagacaaatctcacttgctacaatggaggcaactgcacagagttccagactgaattaaaatgtatgtgccggccaggttttactggagaatggtgtgaaaaggacattgatgagtgtgcctctgatccgtgtgtcaatggaggtctgtgccaggacttactcaacaaattccagtgcctctgtgatgttgcctttgctggcgagcgctgcgaggtggacttggcagatgacttgatctccgacattttcaccactattggctcagtgactgtcgccttgttactgatcctcttgctggccattgttgcttctgttgtcacctccaacaaaagggcaactcagggaacctacagccccagccgtcaggagaaggagggctcccgagtggaaatgtggaacttgatgccaccccctgcaatggagagactgatttaggagcattgtgtcccttcgagatggggatccacacactgtgaatgtgatgactgtacttcaggtatctctgacatacctgacaatgttaatctgcaactgggattacactggaactacaggaatgattcctttgaccaccttaaaaactttcacagtggttccgctcgacaccattgttttattatattatatcagccaattgcaaaaaaagtctgtgccagtaatttcagccttataattagcaaaaacatcttccagagaataaagtcttctgtggctttagtggctatcactgaaactctttcctcttttcaacctgggaacaaattttagttttcattttaggtttctgtactttctgtagtttctgtgtaaactgccatatgtttacatggaaactacaggaaaaaattggctacatttctcacttctcctatcatgtggtcaaagttattgttgtataccagcgatgggatgtatacttttgtccttcattcatggattcagagaaagctctgggaatgacttatggtccaaaaaagtgacccaatggcaacaaataa

SEQ ID NO: 61282 - DNA, 313 bp, Homo sapiens
gtacagattatttccattaaaccccaaatgtgttaaagaaattttaagaaacatctccgacattatcaagtatgtataaagtatgtgtggatgggtagataagactgtgctgttccagagagataaggcaaactttttcttcccatttcacaaccaatgtattcaacagggacctgggtttctgctgttctgtttattttgaaggtgtgaaaaggacattgatgagtgtgcctctgatccgtgtgtcaatggaggtctgtgccaggacttactcaacaaattccagtgcctctgtgatgttgcctttgctggc

SEQ ID NO: 61283 - DNA, 5035 bp, Homo sapiens
tgtaagtagggtgggacagagatggcacctgggggttctgaggcacccgctcctctctgagacagacagggatcaggagccggactgggaccagaccaccagcaacacaccagaggatgttctctaaataagaccatggcacttaagaacattaactaccttctcatcttctacctcagtttctcactgcttatctacataaaaaattccttttgcaataaaaacaacaccaggtgcctctcaaattcttgccaaaacaattctacatgcaaagatttttcaaaagacaatgattgttcttgttcagacacagccaataatttggacaaagactgtgacaacatgaaagacccttgcttctccaatccctgtcaaggaagtgccacttgtgtgaacaccccaggagaaaggagctttctgtgcaaatgtcctcctgggtacagtgggacaatctgtgaaactaccattggttcctgtggcaagaactcctgccaacatggaggtatttgccatcaggaccctatttatcctgtctgcatctgccctgctggatatgctggaagattctgtgagatagatcacgatgagtgtgcttccagcccttgccaaaatggggccgtgtgccaggatggaattgatggttactcctgcttctgtgtcccaggatatcaaggcagacactgcgacttggaagtggatgaatgtgcttcagatccctgcaagaacgaggctacatgcctcaatgaaataggaagatatacttgtatctgtccccacaattattctggtgtaaactgtgaattggaaattgacgaatgttggtcccagccttgtttaaatggtgcaacttgtcaggatgctctgggggcctatttctgcgactgtgcccctggattcctgggggatcactgtgaactcaacactgatgagtgtgccagtcaaccttgtctccatggagggctgtgtgtggatggagaaaacagatatagctgtaactgcacgggtagtggattcacagggacacactgtgagaccttgatgcctctttgttggtcaaaaccttgtcacaataatgctacatgtgaggacagtgttgacaattacacttgtcactgctggcctggatacacaggtgcccagtgtgagatcgacctcaatgaatgcaatagtaacccctgccagtccaatggggaatgtgtggagctgtcctcagagaaacaatatggacgcatcactggactgccttcttctttcagctaccatgaagcctcaggttatgtctgtatctgtcagcctggattcacaggaatccactgcgaagaagacgtcaatgaatgttcttcaaacccttgccaaaatggtggtacttgtgagaacttgcctgggaattatacttgccattgcccatttgataacctttctagaactttttatggaggaagggactgttctgatattctcctgggctgtacccatcagcaatgtctaaataatggaacatgcatccctcacttccaagatggccagcatggattcagctgcctgtgtccatctggctacaccgggtccctgtgtgaaatcgcaaccacactttcatttgagggcgatggcttcctgtgggtcaaaagtggctcagtgacaaccaagggctcagtttgtaacatagccctcaggtttcagactgttcagccaatggctcttctacttttccgaagcaacagggatgtgtttgtgaagctggagctgctaagtggctacattcacttatcaattcaggtcaataatcagtcaaaggtgcttctgttcatttcccacaacaccagcgatggagagtggcatttcgtggaggtaatatttgcagaggctgtgacccttaccttaatcgacgactcctgtaaggagaaatgcatcgcgaaagctcctactccacttgaaagtgatcaatcaatatgtgcttttcagaactcctttttgggtggtttaccagtgggaatgaccagcaatggtgttgctctgcttaacttctataatatgccatccacaccttcgtttgtaggctgtctccaagacattaaaattgattggaatcacattaccctggagaacatctcgtctggctcatcattaaatgtcaaggcaggctgtgtgagaaaggattggtgtgaaagccaaccttgtcaaagcagaggacgctgcatcaacttgtggctgagttaccagtgtgactgccacaggccctatgaaggccccaactgtctgagagagtatgtggcaggcagatttggccaggatgactccactggttatgtcatctttactcttgatgagagctatggagacaccatcagcctctccatgtttgtccgaacgcttcaaccatcaggcttacttctagctttggaaaacagcacttatcaatatatccgtgtctggctagagcgcggcagactagcaatgctgactccaaactctcccaaattagtagtaaaatttgttcttaatgatggaaatgtccacttgatatctttgaaaatcaagccatataaaattgaactgtatcagtcttcacaaaacctaggatttatttctgcttctacgtggaaaatcgaaaagggagatgtcatctacattggtggcctacctgacaagcaagagactgaacttaatggtggattcttcaaaggctgtatccaagatgtaagactaaacaaccaaaatctggaattctttccaaatccaacaaacaatgcatctctcaatccagttcttgtcaatgtaacccaaggctgtgctggagacaacagctgcaagtccaacccctgtcacaatggaggtgtttgccattcccggtgggatgacttctcctgttcctgtcctgccctcacaagtgggaaagcctgtgaggaggttcagtggtgtggattcagcccgtgtcctcacggagcccagtgccagccggtgcttcaaggatttgaatgtattgcaaatgctgtttttaatggacaaagcggtcaaatattattcagaagcaatgggaatattaccagagaactcaccaatatcacatttggtttcagaacaagggatgcaaatgtaataatattgcatgcagaaaaagagcctgaatttcttaatattagcattcaagattccagattattctttcaattgcaaagtggcaacagcttttatatgctaagtctgacaagtttgcagtcagtgaatgatggcacatggcacgaagtgaccctttccatgacagacccactgtcccagacctccaggtggcaaatggaagtggacaacgaaacaccttttgtgaccagcacaattgctactggaagcctcaactttttgaaggataatacagatatttatgtgggagacagagctattgacaatataaagggcctgcaagggtgtctaagtacaatagaaatcggaggcatttatctctcttactttgaaaatgttcatggtttcattaataaacctcaggaagagcaatttctcaaaatctctaccaattcagtggtcactggctgtttgcagttaaatgtctgcaactccaacccctgtttgcatggaggaaactgtgaagacatctatagctcttatcattgctcctgtcccttgggatggtcagggaaacactgtgaactcaacatcgatgaatgcttttcaaacccctgtatccatggcaactgctctgacagagttgcagcctaccactgcacatgtgagcctggatacactggtgtgaactgtgaagtggatatagacaactgccagagtcaccagtgtgcaaatggagccacctgcattagtcatactaatggctattcttgcctctgttttggaaattttacaggaaaattttgcagacagagcagattaccctcaacagtctgtgggaatgagaagacaaatctcacttgctacaatggaggcaactgcacagagttccagactgaattaaaatgtatgtgccggccaggttttactggagaatggtgtgaaaaggacattgatgagtgtgcctctgatccgtgtgtcaatggaggtctgtgccaggacttactcaacaaattccagtgcctctgtgatgttgcctttgctggcgagcgctgcgaggtggactactgagtggtaccagcttgctctggttggtcttcattcctgagtagttccattgtcctgaatatttatttgcctttgctatagaattcgcatcccaatgatttcaatctttccagttggcagatgacttgatctccgacattttcaccactattggctcagtgactgtcgccttgttactgatcctcttgctggccattgttgcttctgttgtcacctccaacaaaagggcaactcagggaacctacagccccagccgtcaggagaaggagggctcccgagtggaaatgtggaacttgatgccaccccctgcaatggagagactgatttaggagcattgtgtcccttcgagatggggatccacacactgtgaatgtgatgactgtacttcaggtatctctgacatacctgacaatgttaatctgcaactgggattacactggaactacaggaatgattcctttgaccaccttaaaaactttcacagtggttccgctcgacaccattgttttattatattatatcagccaattgcaaaaaaagtctgtgccagtaatttcagccttataattagcaaaaacatcttccagagaataaagtcttctgtggctttagtggctatcactgaaactctttcctcttttcaacctgggaacaaattttagttttcattttaggtttctgtactttctgtagtttctgtgtaaactgccatatgtttacatggaaactacaggaaaaaattggctacatttctcacttctcctatcatgtggtcaaagttattgttgtataccagcgatgggatgtatacttttgtccttcattcatggattcagagaaagctctgggaatgacttatggtccaaaaaagtgacccaatggcaacaaataa

SEQ ID NO: 61284 - DNA, 4354 bp, Homo sapiens
tgtaagtagggtgggacagagatggcacctgggggttctgaggcacccgctcctctctgagacagacagggatcaggagccggactgggaccagaccaccagcaacacaccagaggatgttctctaaataagaccatggcacttaagaacattaactaccttctcatcttctacctcagtttctcactgcttatctacataaaaaattccttttgcaataaaaacaacaccaggtgcctctcaaattcttgccaaaacaattctacatgcaaagatttttcaaaagacaatgattgttcttgttcagacacagccaataatttggacaaagactgtgacaacatgaaagacccttgcttctccaatccctgtcaaggaagtgccacttgtgtgaacaccccaggagaaaggagctttctgtgcaaatgtcctcctgggtacagtgggacaatctgtgaaactaccattggttcctgtggcaagaactcctgccaacatggaggtatttgccatcaggaccctatttatcctgtctgcatctgccctgctggatatgctggaagattctgtgagatagatcacgatgagtgtgcttccagcccttgccaaaatggggccgtgtgccaggatggaattgatggttactcctgcttctgtgtcccaggatatcaaggcagacactgcgacttggaagtggatgaatgtgcttcagatccctgcaagaacgaggctacatgcctcaatgaaataggaagatatacttgtatctgtccccacaattattctggtgtaaactgtgaattggaaattgacgaatgttggtcccagccttgtttaaatggtgcaacttgtcaggatgctctgggggcctatttctgcgactgtgcccctggattcctgggggatcactgtgaactcaacactgatgagtgtgccagtcaaccttgtctccatggagggctgtgtgtggatggagaaaacagatatagctgtaactgcacgggtagtggattcacagggacacactgtgagaccttgatgcctctttgttggtcaaaaccttgtcacaataatgctacatgtgaggacagtgttgacaattacacttgtcactgctggcctggatacacaggtgcccagtgtgagatcgacctcaatgaatgcaatagtaacccctgccagtccaatggggaatgtgtggagctgtcctcagagaaacaatatggacgcatcactggactgccttcttctttcagctaccatgaagcctcaggttatgtctgtatctgtcagcctggattcacaggaatccactgcgaagaagacgtcaatgaatgttcttcaaacccttgccaaaatggtggtacttgtgagaacttgcctgggaattatacttgccattgcccatttgataacctttctagaactttttatggaggaagggactgttctgatattctcctgggctgtacccatcagcaatgtctaaataatggaacatgcatccctcacttccaagatggccagcatggattcagctgcctgtgtccatctggctacaccgggtccctgtgtgaaatcgcaaccacactttcatttgagggcgatggcttcctgtgggtcaaaagtggctcagtgacaaccaagggctcagtttgtaacatagccctcaggtttcagactgttcagccaatggctcttctacttttccgaagcaacagggatgtgtttgtgaagctggagctgctaagtggctacattcacttatcaattcaggtcaataatcagtcaaaggtgcttctgttcatttcccacaacaccagcgatggagagtggcatttcgtggaggtaatatttgcagaggctgtgacccttaccttaatcgacgactcctgtaaggagaaatgcatcgcgaaagctcctactccacttgaaagtgatcaatcaatatgtgcttttcagaactcctttttgggtggtttaccagtgggaatgaccagcaatggtgttgctctgcttaacttctataatatgccatccacaccttcgtttgtaggctgtctccaagacattaaaattgattggaatcacattaccctggagaacatctcgtctggctcatcattaaatgtcaaggcaggctgtgtgagaaaggattggtgtgaaagccaaccttgtcaaagcagaggacgctgcatcaacttgtggctgagttaccagtgtgactgccacaggccctatgaaggccccaactgtctgagagagtatgtggcaggcagatttggccaggatgactccactggttatgtcatctttactcttgatgagagctatggagacaccatcagcctctccatgtttgtccgaacgcttcaaccatcaggcttacttctagctttggaaaacagcacttatcaatatatccgtgtctggctagagcgcggcagactagcaatgctgactccaaactctcccaaattagtagtaaaatttgttcttaatgatggaaatgtccacttgatatctttgaaaatcaagccatataaaattgaactgtatcagtcttcacaaaacctaggatttatttctgcttctacgtggaaaatcgaaaagggagatgtcatctacattggtggcctacctgacaagcaagagactgaacttaatggtggattcttcaaaggctgtatccaagatgtaagactaaacaaccaaaatctggaattctttccaaatccaacaaacaatgcatctctcaatccagttcttgtcaatgtaacccaaggctgtgctggagacaacagctgcaagtccaacccctgtcacaatggaggtgtttgccattcccggtgggatgacttctcctgttcctgtcctgccctcacaagtgggaaagcctgtgaggaggttcagtggtgtggattcagcccgtgtcctcacggagcccagtgccagccggtgcttcaaggatttgaatgtattgcaaatgctgtttttaatggacaaagcggtcaaatattattcagaagcaatgggaatattaccagagaactcaccaatatcacatttggtttcagaacaagggatgcaaatgtaataatattgcatgcagaaaaagagcctgaatttcttaatattagcattcaagattccagattattctttcaattgcaaagtggcaacagcttttatatgctaagtctgacaagtttgcagtcagtgaatgatggcacatggcacgaagtgaccctttccatgacagacccactgtcccagacctccaggtggcaaatggaagtggacaacgaaacaccttttgtgaccagcacaattgctactggaagcctcaactttttgaaggataatacagatatttatgtgggagacagagctattgacaatataaagggcctgcaagggtgtctaagtacaatagaaatcggaggcatttatctctcttactttgaaaatgttcatggtttcattaataaacctcaggaagagcaatttctcaaaatctctaccaattcagtggtcactggctgtttgcagttaaatgtctgcaactccaacccctgtttgcatggaggaaactgtgaagacatctatagctcttatcattgctcctgtcccttgggatggtcagggaaacactgtgaactcaacatcgatgaatgcttttcaaacccctgtatccatggcaactgctctgacagagttgcagcctaccactgcacatgtgagcctggatacactggtgtgaactgtgaagtggatatagacaactgccagagtcaccagtgtgcaaatggagccacctgcattagtcatactaatggctattcttgcctctgttttggaaattttacaggaaaattttgcagacagagcagattaccctcaacagtctgtgggaatgagaagacaaatctcacttgctacaatggaggcaactgcacagagttccagactgaattaaaatgtatgtgccggccaggttttactggagaatggtgtgaaaaggacattgatgagtgtgcctctgatccgtgtgtcaatggaggtctgtgccaggacttactcaacaaattccagtgcctctgtgatgttgcctttgctggcgagcgctgcgaggtggacgcgaccctgagattgccatactgtgaagaagcttggaatgaaaataacatgtcaagagagagtcccagccatgccagacatccctgctgaacccggcctcagtcaccgtgcctgctggatgcaatcacttagtgacccacgtgagaacagcaaaggaaccaccagctcaatccacaaaatcatgagaaacagtaaattgttttaagccattaaa

SEQ ID NO: 61285 - DNA, 664 bp, Homo sapiens
tcaaggagagctaaaccaccttttgtaatgtttggtttctcactgttatcttcctttcctataattaatttattttaatctacaaattgacatagggctaaaagcttcaatattttacaaaatattaattaatgtaattgttcccaattattagaaacttttttccatttttcaaaatgtttgccaacttcacacaagtgtgtaaaaatagggctctggattttcaaaagcacatacatgaataatttattagctattccaggcaagctaagtactagaataaactagataaaaacttggctttaagcatgtactttgatatttataaaacaaaggtgtttttttttcatttctgcatctgaatcaatacaaatttacacatgaagaattttggctgtaaattaaaattttagagatttttactactgccctcacctctgcctcctcttaactgttctcttccttactctccctctcttaacactttctctcaaattaattatcttttagttagtgatgacattatttttcccagctggtacaggtaatatttctcacaaccaagccttaatcatttttaaaaaatacactcaactctaattctggcctaaatattatttttctgaaaaagcttctgatttaagattgattccaatagacacta

SEQ ID NO: 61286 - DNA, 2708 bp, Homo sapiens
  misc_feature (2707)..(2707): n is a, c, g, or t
gggagcttgtctgaggctggagctctattgtctgaatccaggggcagaaagaactgagggctcttttacggcatccacctggaggctgcctgcaggcttgggttgctaagtgcactgcttaatttagaagcgccttttatcctggctctcttgaccagtcaaagttgtggtcgctgttttctacaaggactggggaaagaaagggtggaattaattaaacctggaggaagggactttgaagggcggagctaaggtcaaagaaagaaccctttaaataaagggcccacactggctgccagggagtgcgcaggactggcaagagggaagccgggctgctccacgcctttcacgccttccacctcctgcgtgtccatctgtgagaaggagccagagcccaagggagatgatggagcctgaggagtacagagagagagggagagagatggtggattacatctgccagtacctgagcactgtgcgggagagacgtgtgacgccagacgtgcagcctggctacctgcgagcccagctgcctgagagtgctcctgaggaccccgacagctgggacagcatctttggggacattgaacgaatcatcatgcctggggtggtacattggcagagcccccatatgcacgcctactacccagccctcacctcttggccctccctgctaggagacatgctggctgatgccatcaactgcttgggattcacctgggcatccagccctgcgtgtacagagctggagatgaacgtcatggactggttggcaaaaatgctgggacttccagagcacttcttgcaccaccaccccagcagccagggcggaggcgtcctgcagcagcacggtcagtgaatccactttgattgccctgctggcagcaaggaagaacaaaatcctggaaatgaaaacgtctgagcccgatgctgatgagtcctgcctaaatgcccgactcgtggcctatgcctctgaccaggctcactcctctgtggaaaaggctggtttgatttcccttgtgaagatgaaatttctgcctgtggatgacaacttctcactccgaggggaagctcttcagaaggccatcgaggaagacaagcagcggggcttggtgcccgtctttgtctgtgcaacactagggaccactggggtctgtgcatttgactgcctgtcagagctgggccccatctgtgcccgtgaggggctgtggctccacatcgatgctgcttatgcaggcactgccttcctgtgccccgagttccgggggtttctgaaggggattgagtatgccgactccttcacctttaatccttccaagtggatgatggtgcattttgactgtactgggttctgggtcaaggacaagtacaagctgcagcagaccttcagtgtgaatcccatctacctcaggcatgccaactcaggcgtggccaccgacttcatgcactggcagatccccctgagccgacggtttcgctctgttaaactctggttcgtgattcggtccttcggggtgaagaatcttcaagcacatgtcagacatggtactgaaatggctaaatattttgaatctctggtcagaaacgacccttcctttgaaattcctgccaagaggcaccttggcctggtggtttttcgtctaaagggtcctaattgtctcacagaaaatgtgttaaaggaaatagctaaagctggccgtctcttcctcatcccggccactatccaggacaagttaatcatccgtttcactgtgacatcccagtttaccactagggatgacatcctgagagactggaatctcattcgagatgctgccactctcatcctgagtcagcactgtacttcccaacccagccctcgggttgggaacctcatctcccaaatcaggggtgccagagcctgggcctgtggaacgtcccttcagtctgtcagtggggcaggagatgatccagtccaggccaggaagatcatcaagcagcctcagcgtgtgggagccggtcccatgaaaagggaaaatggcctccatcttgaaaccctgctggacccagttgatgactgcttttcagaagaggccccagatgccaccaagcacaagctgtcctccttcctgttcagttacttgtctgtgcagactaagaagaagacggtgcgctccctcagttgcaacagtgtgccagtgagtgctcagaagccactgcccacagaggcctctgtgaagaatgggggctcctccagggtcagaatcttttccaggtttccagaagacatgatgatgctgaagaaaagtgccttcaaaaaactcatcaaattctacagcgtccccagctttcctgaatgcagctctcaatgtggactccagctgccctgttgccctctgcaggccatggtttagacacagggccttcagccagagtctgaggatatacttcagggactctgtgaacccctcacaattgtatgccaactttgtgtgcttatgtgtacatgcatttttcttggggcgagttcataattttaatcaaattctcataggggttcatgacccacaataggatacaaacgaagagtttaagccagcatgatccagatgggttcagcagtctggtcagtgagaaagggccgagggtagacaggcagcttctgtggttcagcttgtgacatgatatataacacagaaataaattatgcttgtccctgaaacaaaana

SEQ ID NO: 61287 - DNA, 3533 bp, Homo sapiens
  misc_feature (3532)..(3532): n is a, c, g, or t
gggagcttgtctgaggctggagctctattgtctgaatccaggggcagaaagaactgagggctcttttacggcatccacctggaggctgcctgcaggcttgggttgctaagtgcactgcttaatttagaagcgccttttatcctggctctcttgaccagtcaaagttgtggtcgctgttttctacaaggactggggaaagaaagggtggaattaattaaacctggaggaagggactttgaagggcggagctaaggtcaaagaaagaaccctttaaataaagggcccacactggctgccagggagtgcgcaggactggcaagagggaagccgggctgctccacgcctttcacgccttccacctcctgcgtgtccatctgtgagaaggagccagagcccaagggagatgatggagcctgaggagtacagagagagagggagagagatggtggattacatctgccagtacctgagcactgtgcgggagagacgtgtgacgccagacgtgcagcctggctacctgcgagcccagctgcctgagagtgctcctgaggaccccgacagctgggacagcatctttggggacattgaacgaatcatcatgcctggggtggtacattggcagagcccccatatgcacgcctactacccagccctcacctcttggccctccctgctaggagacatgctggctgatgccatcaactgcttgggattcacctgggcatccagccctgcgtgtacagagctggagatgaacgtcatggactggttggcaaaaatgctgggacttccagagcacttcttgcaccaccaccccagcagccagggcggaggcgtcctgcagcagcacggtcagtgaatccactttgattgccctgctggcagcaaggaagaacaaaatcctggaaatgaaaacgtctgagcccgatgctgatgagtcctgcctaaatgcccgactcgtggcctatgcctctgaccaggctcactcctctgtggaaaaggctggtttgatttcccttgtgaagatgaaatttctgcctgtggatgacaacttctcactccgaggggaagctcttcagaaggccatcgaggaagacaagcagcggggcttggtgcccgtctttgtctgtgcaacactagggaccactggggtctgtgcatttgactgcctgtcagagctgggccccatctgtaagtatcttccctctgtggctaggaagacaaggaatacatttttaaatgtctcctaaagcaaggacctgaaaccagctctatgggattattcttgttcctctttggtcaatgcagagacatgggaagaaccaccaaaggtcatgagggtctcttccagggatccctggacattgcctttcccagtggtgtgacaagagttagaggtggcctaccttgcctcctgtcctaggaggcgacagtaggagagccttcggttttctcatcctcttacttgtatgttgaactttacttaatgcaggctatatccaaaatacagtgtgaattaggctagaatagaaatgctttctattctaccttcagaaaaggaaaagggtagggtaggggaaatcatgggagagattaaaggcagagaggaaacccagatgggactgtttaatccccaagcaagaaaccactaggaaagagagataccttccctctaacttttgtattcggtgcactgacattgctctctgtgctggtgggaaattgatttctgtgccaggatgttctaggctgaggccaagagggtgctggccctttacccagtggaagaaaaaggcaagggtgaggctttgtagactttcccattcggaggtaatgatgcctccttcagccccacttcttcaaactgactccacctgctcccatctccacacccctccgtttctcatttagccaaagcacatcatccttgcagcccaccactcagcttggccaggtgcgagacatctttccccacttcatacctcccctccggccaggtgatgtttgcctcctcaggtgcccgtgaggggctgtggctccacatcgatgctgcttatgcaggcactgccttcctgtgccccgagttccgggggtttctgaaggggattgagtatgccgactccttcacctttaatccttccaagtggatgatggtgcattttgactgtactgggttctgggtcaaggacaagtacaagctgcagcagaccttcagtgtgaatcccatctacctcaggcatgccaactcaggcgtggccaccgacttcatgcactggcagatccccctgagccgacggtttcgctctgttaaactctggttcgtgattcggtccttcggggtgaagaatcttcaagcacatgtcagacatggtactgaaatggctaaatattttgaatctctggtcagaaacgacccttcctttgaaattcctgccaagaggcaccttggcctggtggtttttcgtctaaagggtcctaattgtctcacagaaaatgtgttaaaggaaatagctaaagctggccgtctcttcctcatcccggccactatccaggacaagttaatcatccgtttcactgtgacatcccagtttaccactagggatgacatcctgagagactggaatctcattcgagatgctgccactctcatcctgagtcagcactgtacttcccaacccagccctcgggttgggaacctcatctcccaaatcaggggtgccagagcctgggcctgtggaacgtcccttcagtctgtcagtggggcaggagatgatccagtccaggccaggaagatcatcaagcagcctcagcgtgtgggagccggtcccatgaaaagggaaaatggcctccatcttgaaaccctgctggacccagttgatgactgcttttcagaagaggccccagatgccaccaagcacaagctgtcctccttcctgttcagttacttgtctgtgcagactaagaagaagacggtgcgctccctcagttgcaacagtgtgccagtgagtgctcagaagccactgcccacagaggcctctgtgaagaatgggggctcctccagggtcagaatcttttccaggtttccagaagacatgatgatgctgaagaaaagtgccttcaaaaaactcatcaaattctacagcgtccccagctttcctgaatgcagctctcaatgtggactccagctgccctgttgccctctgcaggccatggtttagacacagggccttcagccagagtctgaggatatacttcagggactctgtgaacccctcacaattgtatgccaactttgtgtgcttatgtgtacatgcatttttcttggggcgagttcataattttaatcaaattctcataggggttcatgacccacaataggatacaaacgaagagtttaagccagcatgatccagatgggttcagcagtctggtcagtgagaaagggccgagggtagacaggcagcttctgtggttcagcttgtgacatgatatataacacagaaataaattatgcttgtccctgaaacaaaana

SEQ ID NO: 61288 - DNA, 260 bp, Homo sapiens
gaaaatgttaagactttgaagtctcaaaccttgagtttaattttaaatgaaagatcttgtgagtacaatatgttatgaactatatagataatttattgagagaactgtatagaagcccataactctttttatcatttgttcattgacaatatttattgaatccccatatgtcaagcacagtgcacattacggatttagggatgtggtggttagtaaaacaggtacggtttctgcttttactaaatgtgcagtctagtgca

SEQ ID NO: 61289 - DNA, 292 bp, Homo sapiens
  misc_feature (285)..(285): n is a, c, g, or t
  misc_feature (287)..(287): n is a, c, g, or t
ggaggcacaagagcccaaccaactgtcccatttttgccctgacctttgccctggtagtcctggcctttcccgcctacctgctgggcattgacagcgggcgactgcaggagaagctgaccagccgcaagatggacagccgctggggcgggcgcagcgagtccatcaatgtgaccctcaacgtggagcaggcagcctacacccgtgatgccctggccaaggggctctatgcccgcctcttcgacttcctcgtggagcatcaaccgtgctatgcatgaacacaccccngnggtac

SEQ ID NO: 61290 - DNA, 1007 bp, Homo sapiens
tgctgggattacaggcaggagccaccatgcccggctgagagcagagattttatctgtcttgttcattacagtatccccagtacccggaatactggcaggcacacagtaggtgctcaatgaatgaatggtcaggcactaaaaagggctcttccccaaccactgatcatttattcctccattcatccccagtggagagagtggagctgggaagacagtggcagccaaatatatcatgggctacatctccaaggtgtctggcggaggcgagaaggtccagcacgtcaaagatatcatcctgcagtccaacccgctgctcgaggccttcggcaacgccaagactgtgcgcaacaacaattccagccgctttggcaagtactttgagatccagttcagccgaggtggggagccagatgggggcaagatctccaacttcttgctggagaagtcccgcgtggtcatgcaaaatgaaaatgagaggaacttccacatctactaccagctgctggaaggggcctcccaggagcaaaggcagaacctgggcctcatgacaccggactactattactacctcaaccaatcggacacctaccaggtggacggcacggacgacagaagcgactttggtgagactctgagtgctatgcaggttattgggatcccgcccagcatccagcagctggtcctgcagctcgtggcggggatcttgcacctggggaacatcagtttctgtgaagacgggaattacgcccgagtggagagtgtggacctcctggcctttcccgcctacctgctgggcattgacagcgggcgactgcaggagaagctgaccagccgcaagatggacagccgctggggcgggcgcagcgagtccatcaatgtgaccctcaacgtggagcaggcagcctacacccgtgatgccctggccaaggggctctatgcccgcctcttcgacttcctcgtggagcggccatcaaccgtgctaagcagtaaccccacagaagagcgtc

SEQ ID NO: 61291 - DNA, 1072 bp, Homo sapiens
tgctgggattacaggcaggagccaccatgcccggctgagagcagagattttatctgtcttgttcattacagtatccccagtacccggaatactggcaggcacacagtaggtgctcaatgaatgaatggtcaggcactaaaaagggctcttccccaaccactgatcatttattcctccattcatccccagtggagagagtggagctgggaagacagtggcagccaaatatatcatgggctacatctccaaggtgtctggcggaggcgagaaggtccagcacgtcaaagatatcatcctgcagtccaacccgctgctcgaggccttcggcaacgccaagactgtgcgcaacaacaattccagccgctttggcaagtactttgagatccagttcagccgaggtggggagccagatgggggcaagatctccaacttcttgctggagaagtcccgcgtggtcatgcaaaatgaaaatgagaggaacttccacatctactaccaggtgcagggaaggggccgggggagagggagcaccacctggagcccagcggggtggacaatgggaagctgctggaaggggcctcccaggagcaaaggcagaacctgggcctcatgacaccggactactattactacctcaaccaatcggacacctaccaggtggacggcacggacgacagaagcgactttggtgagactctgagtgctatgcaggttattgggatcccgcccagcatccagcagctggtcctgcagctcgtggcggggatcttgcacctggggaacatcagtttctgtgaagacgggaattacgcccgagtggagagtgtggacctcctggcctttcccgcctacctgctgggcattgacagcgggcgactgcaggagaagctgaccagccgcaagatggacagccgctggggcgggcgcagcgagtccatcaatgtgaccctcaacgtggagcaggcagcctacacccgtgatgccctggccaaggggctctatgcccgcctcttcgacttcctcgtggagcggccatcaaccgtgctaagcagtaaccccacagaagagcgtc

SEQ ID NO: 61292 - DNA, 432 bp, Homo sapiens
tgctgggattacaggcaggagccaccatgcccggctgagagcagagattttatctgtcttgttcattacagtatccccagtacccggaatactggcaggcacacagtaggtgctcaatgaatgaatggtcaggcactaaaaagggctcttccccaaccactgatcatttattcctccattcatccccagtggagagagtggagctgggaagacagtggcagccaaatatatcatgggctacatctccaaggtgtctggcggaggcgagaaggtccaggtgagacgaggaaaacagaaggataagctgggtcgccctcacctgcatggtagtgcagccccacccatctgcactcctgcctcagtctgacttcttcccactccacctgcctctgccccagcacgtcaaagatatcatcctgcagtccaacccgc

SEQ ID NO: 61293 - DNA, 122 bp, Homo sapiens
atggccagatatgggggcctgttcccaacactccagcctgtgtgaagcccagagggtttggcatgggaatggctgcagtggaacacagcaagggacatccatccctcaaagcttgccatgtt

SEQ ID NO: 61294 - DNA, 434 bp, Homo sapiens
ggtatcaggaatcaaaattaatcagggatcttttcacactgctgttttttcctctttggtccttctatcactaaaactcatctcattcagccttacagcataactaattatttgttttcctcactacattgtacatgtgggaattacagataaacggaagccggctggggtggtggctcacgcctgtaatcccaacactttgggaggccaaggcaggcggatcacctgaggtcaggagttcgagattagtctggccaacatggtgaaaccccatctctactaaaaatacgaaattagccaggtgtggtggcacacatctgtagtcccagctactctggaggctgagacaggagaatcgcttgaacccaggaagtggaggttgcagtgagctgagatcacaccactgcactccagcctgggagagacagagtgag

SEQ ID NO: 61295 - DNA, 566 bp, Homo sapiens
gtgtggagtagctactgacagcacacccccaaccccacctgccagtccctccttttagtaaagcttagcacaatggagggggcaagaagaccaagatggagaaactgagtgtgatcccccaaaccacataagagatccatggctcactatgctgtgcacacacccaggaagggaatcctgttacaggacggggaccaggccctgtttccaacagtggcaccccttcccttggtatcatggcagggcccttgctgctgaggactgatctttgcatcctagacttgctccctggtacagttttacccaacccttgtgcaccagcacctcgtgacagggtcgtgtctgcccatccacccttttctgccccaggatgagacctggaagccaatcaagtttatctttcattcatccatccacttcttcaataaacattgaagacttcttatgttgccactgccccctccctagagccccttgcctgctcagtggcacccactaccctccttctctgccttgtgtcagaatctgctctcaggaaagaggttgataaacccatttgcactgat

SEQ ID NO: 61296 - DNA, 5558 bp, Homo sapiens
gcaggactgagcagctaggcgcgagcgaaaacaaacagctggggctgcgagcgcccccgccccggccccgagagcacgccggcccagtcccccacctggggcgcccgtctgcccaccatgaggaagatccgcgccaatgccatcgccatcctgaccgtagcctggatcctgggcactttctactacttatggcaggacaaccgagcccacgcagcatcctccggcggccggggcgcgcagagggcaggcaggaggtcggagcagctccgcgaggaccgcaccatcccgctcattgtgacaggaactccctcgaaaggctttgatgagaaggcctacctgtcggccaagcagctgaaggctggagaggacccctacagacagcacgccttcaaccagctggagagtgacaagctgagcccagaccggcccatccgggacacccgccattacagctgcccatctgtgtcctactcctcggacctgccagccaccagcgtcatcatcaccttccacaatgaggcccgttccaccctgctgcgcacagtgaagagtgtcctgaaccgaactcctgccaacttgatccaggagatcattttagtggatgacttcagctcagatccggaagactgtctactcctgaccaggatccccaaggtcaagtgcctgcgcaatgatcggcgggaagggctgatccggtcccgagtgcgtggggcggacgtggctgcagctaccgttctcacctttctggatagccactgcgaagtgaacaccgagtggctgccgcccatgctgcagcgggtgaaggaggaccacacccgcgtggtgagtcccatcattgatgtcatcagtctggataattttgcctaccttgcagcatctgctgaccttcgtggagggttcgactggagcctgcatttcaagtgggagcagatccctcttgagcagaagatgacccggacagaccccaccaggcccataaggacgcctgtcatagctggaggaatcttcgtgatcgacaagtcctggtttaaccacttgggaaagtatgatgcccagatggacatctgggggggagagaattttgagctctccttcagggtgtggatgtgtggtggcagtctggagatcgtcccctgcagccgggtgggccatgtcttcaggaaacggcacccctacaacttccctgagggtaatgccctcacctacatcaggaatactaagcgcactgcagaagtgtggatggatgaatacaagcaatactactatgaggcccggccctcggccatcgggaaggccttcggcagtgtggctacgcggatagagcagaggaagaagatgaactgcaagtccttccgctggtacctggagaacgtctacccagagctcacggtccccgtgaaggaagcactccccggcatcattaagcagggggtgaactgcttagaatctcagggccagaacacagctggtgacttcctgcttggaatggggatctgcagagggtctgccaagaacccgcagcccgcccaggcatggctgttcagtgaccacctcatccagcagcaggggaagtgcctggctgccacctccaccttaatgtcctcccctggatccccagtcatactgcagatgtgcaaccctagagaaggcaagcaggtgagtctccttgcctctggcccagaggcccagcagcccgaggggccatgcctcagggtggcagaccttggcaggagagcccctgattgactcaaataagcccttcagagcgaggatctgtggggagggggagcaaagtctacatctaggtcaagccaattattctgcccatgaggaaatacttctttgggtaattatttgtttaatgccatcctgccaggctgtgagctccatgaaggcagggaccacttgtcttgttaacactgtatccctagctcctgacaaccaccacagttcaaataagtgttagcttttactgacagtctgtgctagaagtttgaaatagatcatctcatctaatcctcccagccacccagtgacgtgggttctagtactacctccattttataagtgagtaagctgaggctcgctgaatctaaagaatatatgtcagatcacacagctgagaaggggtggagctgggattcaaacccaggtcagtgacttctaggcccacagtcttaacccagcacatagtagatgttcaataagtatttcttgactgttggcagactagggaaactgagctccagacacagtgatgtccaagctggcatgaccagcctcacgtgagcactgctttttccattgatccgacactctcacccacactgtcaccactaatcctgggagacaggtcagggtcaaggaagaaagtgatgcacagagaggtggagtcacttgctcagggtacacagcaaccagtgacagtggatttccagaatccagccagctctcttctgtgctactcccttcctgtcttggagggctccctcaccacccagggaatgggacccaaggcccagaggctgctccagcacttcccctgctcaccctcctcagaagccctccctgtgcctgccactggctagcctgcctcagtcggtgcaagcagtgaggagggtgcctgggtctctgatttggcctgcatggttttcctcctacccctttttctttgcttgggtcagcacgttttttaaaggatgaacagcagtttgctgtgccattctggaaagcagccacagcctctccctccggcctgtgtgtgtctgagggatctgtgtgcccagcccacttgctggacctgtgggacactttaagcgcttttggatggtggggggatgcagcccaccctcggccctgccctgcagtggggctggtgcagtgtctcctgcacctagagcacccacctctctgagggcaaatccttgagcccacgcccaccccctcccactgaggaattatctccgagcaaagcctccactcaattgcccctctggggctgaatcacacatttccccctttgtgctgacccagcctacggggtgtgtaggtatctccttggccccattcattctgcccctgcaagtcctgccaggctcccgatggcattctgggtgcctgtgcccctcttctcccaggaggacaggatgagccagctatcccactgccaatgccttctggaatccgggccgtccttcttggtcccctgctggtcctatttccaaggctagctgggtttcctgtatccgagaggctcctgtgcctcagacctggtgtgatggagtcagcaggccccagctcagtcttccctccccctcccttcactcagtctcctcacttataaaataaggggctccctcccctgcttacctcacaaggaatccgcaagaaccaagatgtggagatgggacagtgggtgatgtgacattgtttctcagacaagcccagaattgagtggcctggagagtcaagaagccctgagattgtgcctaatagcactgataagaagtgagaatcccgctgtttggggagcacttcctaatgattgggtgattcagtcattcgttcatcttaaaacaaaatgacggctgggtgcagtggctcatgcctgtaatcccagcactttgggaggctgagatgggtggatcatgaggtcaggagttcgagaccagcctgaccaaaatggtgaaaccccgtctctactaaaaacacaaaaattagccgggcgtggtggcgcgcgtctgtaatcccagctactcaggaggctgagacaggagaatcgcttgaacccgggaggcagaggtagcagtgagccgagatcgtgtcactgcactcctgcctgggtgacagagcgagactcagtctcaaacaaacaaaatgtcactgggtgcctaccttgtgccagagaatgtacagatcatgttggccacaaggatgaacggacatggtccttgacccccagggaatttgcactttagtggaagagaaagaagggagtaagacactatattacagaaggctagatgctgaggtagctccaagcaccacgactccctggggtgaggatggccatactctctccagctgggcattgctggaggtttggcctacatgaggtaaatgtcaaggactagaagagcatgaagaaacaggaggggggatccaaaggcccttgacctttaggctctctgcgggggccatgtgggcccagagaggctgggtctcagccctacccatcacgtccttgcattcccactgggagcccaggctccgcccctgccttccaccctgtgtgcacatccccccgcagccctagccctatccctgcagctgggtgggctcatctctctcccctcagctgctccctgtccaccaactgccctcagagccctctgggcttcctccacatggtcacaagcactcctgcctctaatcgaagacacggtgaatgagagaagatggaagaggggaggtggttgcaatgggaggcaaataggagagaaacccaaactagacctatcttactattattcttccctgagccttgaaacctgggtctctgcctctcatcccttctcataaatgttccaagcaacactccatcctccacccaggcacttccgtaatgttctacaggagcaactcttctcccccttgtcaaacccggggtcggggaggcaccaggaggtgaaggcactgaccaggagcccctgcatgactctgtgatgcgagacctccagtctcccaccaccctgctggccccacacttcatccctacaaagaaggcagcttcccactagggggtgtagattactggcctcacaggtcagaagcttaggaagaataaatcttgtttacagaaataaaagatttacctaggccaggactgacaagctcaagtgcctacagggagctggtgggaaaaccccaataggagaaaagtcgggaccaggcaggaactatggtgacctgcagaacaagagccccatctaaggcagagggcaaatcctcagccccagcaactgatgccatgtaagaaactgggtccaataactacatagaagctggaaatgcagatttgcacgtggcaaccaagctaaattgtaaataaacacaggggacttctgctttgcctcctcctctgatctggacaggaacttctgcaaactacagaaaagcaagagccctgctgggaagggcagggcttaaagctggtgttagaggcaggatgggggcagcctcttacataggaacacacagcctgatttaaatgaggggcatgactgggcatggtagctcatgcctgtaatcccagtgctttggaaggccaagacaggtggatcacttgaggtgagacgttctagctagaccagcctgggcaacatagcaagacccagtgctctgcacttatcagccggtcctttgtggcaacgcagccctgttctgtttttgcttttcctcttcttgaccaaagcatgtgccactagctgtccttgaggacctcgtctttatgaaacacacacctggaataaaaccacttcttacatgtcaaaaaaaac

SEQ ID NO: 61297 - DNA, 439 bp, Homo sapiens
  misc_feature (385)..(385): n is a, c, g, or t
  misc_feature (400)..(400): n is a, c, g, or t
  misc_feature (425)..(425): n is a, c, g, or t
attcggcactagggggaagcctcctgccacagcttaggacagaactgggcccagggaaaggcctctccccagaggatggactagaaggcctgggcacactcgggcatggacctttggggctggggagcaggggctgcgctgttgaatgtaagagccaagtgtctgtggtccgcagcacctgctctggagggctctccagcagtttcgcctcctgactctcaccagcgtcctctcggcagcactcccgtgcccaagcgcacccctctggacttgccagcgcaggccccttcgctcccagggccatgctttgcctgtcctctgtcgtgatgtttcttccgcagccaggtgcagcctcagatcccctgttcatctgggaagcctttgntgtgggtcagatcanggtctgcaattattcagccggttcnttttgggcaaggag

SEQ ID NO: 61298 - DNA, 1966 bp, Homo sapiens
gcccggagaaagcaaggacagaagcccacacaggggtcttttgggtcatgaggcccagctgtgcaggcaggcagggccaggggaaattgggcagcatggatggagaggctgaaggctgggaagagggaaggggagaggggcagcctgcaggggtagctgaagaacaggaaggaggtgagaagcccggtgacctgtcagagatgccaagcccagggtggcactgggttgggtggggacggatggtgtcttggcagcaaaggatgggtaatttgcaaatgaacatggatagaagagcagcaaagcaccaaaagaacaaggtctcttacccaggacacagtcccttccacactttaccagccccagggtctgagcccgacgctgcctcttccggtcctgtgcctgtgggtgcccacattcttagcaagaggctgcagagggatctttaggggaagattcgggcgtagtttattaaacagactccacttctatttggccatgtgtcaggctgagacctctctctcgggcattaatgaacagctagtgccctgtccctgccgccaggacccactgaaaggacgggtagccacacacatccctgagtagtcccagcctcatttgtcatttttgactcctgctttctcaaaggtttttgcctctgtcaatacagcatcatgggtggttggaaagaagggaacttcccttctggaccaagaacagcccctaagtcattagggttcaacctcacccttattcccctccccgctacaggagcccctaagtcattagggctcaacctcacccttattcccctccctactacaggagggattttcttgaagggtcagctattgcactgtgctgggaggctggctgtggctcctgtttgtgaagagaactcccagttccttttcacagccgctgagaacacatccacacatctaccccacggccttgtcttggaactgctcctgctatccccacaccctgcttcctcaccccactggctcttgggcaaatgactgttggtaccaggaccctgggggtctcccctacaaagcagaccagcctggggcagatatacctaccacaggagccccctgtctttcataggccaaggatccacatacccatagagttcatggattctagagggtctaggaatctcttgaaattgtccctaaaatactgcatgtgtgtgcatacatgcattttcctggggaaaaagtccatggcttctaaaagaggtccctgatccccaaagggcctgaacctctgctctggattgaagccactgtctgcccaagctgccaccccctaatcttcctccctggcgtgctcaaactgccatcgcctgctccctccacacggcccttggggtcagcagccaagtgtctgtggtccgcagcacctgctctggagggctctccagcagtttcgcctcctgactctcaccagcgtcctctcggcagcactcccgtgcccaagcgcacccctctggacttgccagcgcaggccccttcgctcccagggccatgctttgcctgtcctctgtcgtgatgtttcttccgcagccaggtgcagcctcagatcccctgttcatctgggaagcctcctgccacagcttaggacagaactgggcccagggcaaaggcctctccccagaggatggactagaaggcctgggccacactcgggcatggacctttggggctggggagcaggggctgcgcctgttgaatgtaagaggactgctgaccagagggccttcaagagggtctctctgtcctttgctgtggtcagatcaggctctgcacttatcagccggtcctttgtggcaacgcagccctgttctgtttttgcttttcctcttcttgaccaaagcatgtgccactagctgtccttgaggacctcgtctttatgaaacacacacctggaataaaaccacttcttacatgtcaaaaaaaac

SEQ ID NO: 61299 - DNA, 2940 bp, Homo sapiens
gcaggactgagcagctaggcgcgagcgaaaacaaacagctggggctgcgagcgcccccgccccggccccgagagcacgccggcccagtcccccacctggggcgcccgtctgcccaccatgaggaagatccgcgccaatgccatcgccatcctgaccgtagcctggatcctgggcactttctactacttatggcaggacaaccgagcccacgcagcatcctccggcggccggggcgcgcagagggcaggcaggaggtcggagcagctccgcgaggaccgcaccatcccgctcattgtgacaggaactccctcgaaaggctttgatgagaaggcctacctgtcggccaagcagctgaaggctggagaggacccctacagacagcacgccttcaaccagctggagagtgacaagctgagcccagaccggcccatccgggacacccgccattacagctgcccatctgtgtcctactcctcggacctgccagccaccagcgtcatcatcaccttccacaatgaggcccgttccaccctgctgcgcacagtgaagagtgtcctgaaccgaactcctgccaacttgatccaggagatcattttagtggatgacttcagctcagatccggaagactgtctactcctgaccaggatccccaaggtcaagtgcctgcgcaatgatcggcgggaagggctgatccggtcccgagtgcgtggggcggacgtggctgcagctaccgttctcacctttctggatagccactgcgaagtgaacaccgagtggctgccgcccatgctgcagcgggtgaaggaggaccacacccgcgtggtgagtcccatcattgatgtcatcagtctggataattttgcctaccttgcagcatctgctgaccttcgtggagggttcgactggagcctgcatttcaagtgggagcagatccctcttgagcagaagatgacccggacagaccccaccaggcccataaggacgcctgtcatagctggaggaatcttcgtgatcgacaagtcctggtttaaccacttgggaaagtatgatgcccagatggacatctgggggggagagaattttgagctctccttcagggtgtggatgtgtggtggcagtctggagatcgtcccctgcagccgggtgggccatgtcttcaggaaacggcacccctacaacttccctgagggtaatgccctcacctacatcaggaatactaagcgcactgcagaagtgtggatggatgaatacaagcaatactactatgaggcccggccctcggccatcgggaaggccttcggcagtgtggctacgcggatagagcagaggaagaagatgaactgcaagtccttccgctggtacctggagaacgtctacccagagctcacggtccccgtgaaggaagcactccccggcatcattaagcagggggtgaactgcttagaatctcagggccagaacacagctggtgacttcctgcttggaatggggatctgcagagggtctgccaagaacccgcagcccgcccaggcatggctgttcagtgaccacctcatccagcagcaggggaagtgcctggctgccacctccaccttaatgtcctcccctggatccccagtcatactgcagatgtgcaaccctagagaaggcaagcagaaatggaggagaaaaggatctttcatccagcattcagtcagtggcctctgcctggagacaaagcctgcccagctggtgaccagcaagtgtcaggctgacgcccaggcccagcagtggcagctgttgccacacacatgacggagggattttcttgaagggtcagctattgcactgtgctgggaggctggctgtggctcctgtttgtgaagagaactcccagttccttttcacagccgctgagaacacatccacacatctaccccacggccttgtcttggaactgctcctgctatccccacaccctgcttcctcaccccactggctcttgggcaaatgactgttggtaccaggaccctgggggtctcccctacaaagcagaccagcctggggcagatatacctaccacaggagccccctgtctttcataggccaaggatccacatacccatagagttcatggattctagagggtctaggaatctcttgaaattgtccctaaaatactgcatgtgtgtgcatacatgcattttcctggggaaaaagtccatggcttctaaaagaggtccctgatccccaaagggcctgaacctctgctctggattgaagccactgtctgcccaagctgccaccccctaatcttcctccctggcgtgctcaaactgccatcgcctgctccctccacacggcccttggggtcagcagccaagtgtctgtggtccgcagcacctgctctggagggctctccagcagtttcgcctcctgactctcaccagcgtcctctcggcagcactcccgtgcccaagcgcacccctctggacttgccagcgcaggccccttcgctcccagggccatgctttgcctgtcctctgtcgtgatgtttcttccgcagccaggtgcagcctcagatcccctgttcatctgggaagcctcctgccacagcttaggacagaactgggcccagggcaaaggcctctccccagaggatggactagaaggcctgggccacactcgggcatggacctttggggctggggagcaggggctgcgcctgttgaatgtaagaggactgctgaccagagggccttcaagagggtctctctgtcctttgctgtggtcagatcaggctctgcacttatcagccggtcctttgtggcaacgcagccctgttctgtttttgcttttcctcttcttgaccaaagcatgtgccactagctgtccttgaggacctcgtctttatgaaacacacacctggaataaaaccacttcttacatgtcaaaaaaaac

SEQ ID NO: 61300 - DNA, 350 bp, Homo sapiens
gggcttaaagctggtgttagaggcaggatgggggcagcctcttacataggaacacacagcctgatttaaatgaggggcatgactgggcatggtagctcatgcctgtaatcccagtgctttggaaggccaagacaggtggatcacttgaggtgagacgttctagctagaccagcctgggcaacatagcaagacccagtctctgcaaaaaatttaaaaattagctgggcgtggtggcatgcaggtgtagtcctagctactcagaggctgaggcaagaggattgcttgaactcaggagttcgaggctgcagtgagctgtggtagcaccactgtaagaacaaggtcatgcctaa

SEQ ID NO: 61301 - DNA, 2501 bp, Homo sapiens
gcaggactgagcagctaggcgcgagcgaaaacaaacagctggggctgcgagcgcccccgccccggccccgagagcacgccggcccagtcccccacctggggcgcccgtctgcccaccatgaggaagatccgcgccaatgccatcgccatcctgaccgtagcctggatcctgggcactttctactacttatggcaggacaaccgagcccacgcagcatcctccggcggccggggcgcgcagagggcaggcaggaggtcggagcagctccgcgaggaccgcaccatcccgctcattgtgacaggaactccctcgaaaggctttgatgagaaggcctacctgtcggccaagcagctgaaggctggagaggacccctacagacagcacgccttcaaccagctggagagtgacaagctgagcccagaccggcccatccgggacacccgccattacagctgcccatctgtgtcctactcctcggacctgccagccaccagcgtcatcatcaccttccacaatgaggcccgttccaccctgctgcgcacagtgaagagtgtcctgaaccgaactcctgccaacttgatccaggagatcattttagtggatgacttcagctcagatccggaagactgtctactcctgaccaggatccccaaggtcaagtgcctgcgcaatgatcggcgggaagggctgatccggtcccgagtgcgtggggcggacgtggctgcagctaccgttctcacctttctggatagccactgcgaagtgaacaccgagtggctgccgcccatgctgcagcgggtgaaggaggaccacacccgcgtggtgagtcccatcattgatgtcatcagtctggataattttgcctaccttgcagcatctgctgaccttcgtggagggttcgactggagcctgcatttcaagtgggagcagatccctcttgagcagaagatgacccggacagaccccaccaggcccataaggacgcctgtcatagctggaggaatcttcgtgatcgacaagtcctggtttaaccacttgggaaagtatgatgcccagatggacatctgggggggagagaattttgagctctccttcagggtgtggatgtgtggtggcagtctggagatcgtcccctgcagccgggtgggccatgtcttcaggaaacggcacccctacaacttccctgagggtaatgccctcacctacatcaggaatactaagcgcactgcagaagtgtggatggatgaatacaagcaatactactatgaggcccggccctcggccatcgggaaggccttcggcagtgtggctacgcggatagagcagaggaagaagatgaactgcaagtccttccgctggtacctggagaacgtctacccagagctcacggtccccgtgaaggaagcactccccggcatcattaagcagggggtgaactgcttagaatctcagggccagaacacagctggtgacttcctgcttggaatggggatctgcagagggtctgccaagaacccgcagcccgcccaggcatggctgttcagtgaccacctcatccagcagcaggggaagtgcctggctgccacctccaccttaatgtcctcccctggatccccagtcatactgcagatgtgcaaccctagagaaggcaagcagaaatggaggagaaaaggatctttcatccagcattcagtcagtggcctctgcctggagacaaagcctgcccagctggtgaccagcaagtgtcaggctgacgcccaggcccagcagtggcagctgttgccacacacatgacgggcctgaacctctgctctggattgaagccactgtctgcccaagctgccaccccctaatcttcctccctggcgtgctcaaactgccatcgcctgctccctccacacggcccttggggtcagcagccaagtgtctgtggtccgcagcacctgctctggagggctctccagcagtttcgcctcctgactctcaccagcgtcctctcggcagcactcccgtgcccaagcgcacccctctggacttgccagcgcaggccccttcgctcccagggccatgctttgcctgtcctctgtcgtgatgtttcttccgcagccaggtgcagcctcagatcccctgttcatctgggaagcctcctgccacagcttaggacagaactgggcccagggcaaaggcctctccccagaggatggactagaaggcctgggccacactcgggcatggacctttggggctggggagcaggggctgcgcctgttgaatgtaagaggactgctgaccagagggccttcaagagggtctctctgtcctttgctgtggtcagatcaggctctgcacttatcagccggtcctttgtggcaacgcagccctgttctgtttttgcttttcctcttcttgaccaaagcatgtgccactagctgtccttgaggacctcgtctttatgaaacacacacctggaataaaaccacttcttacatgtcaaaaaaaac

SEQ ID NO: 61302 - DNA, 321 bp, Homo sapiens
ccaggcactcaggctggctgtcccttttctcctcctgcccaccccatccactctgagcatcaatgcagccggccagttgcaggcaaccaggcagcaccctggctgcccaggcaggctaagaggcccccacccactcccccctcctttgccagtggaaaagcttgccgtagggcatagctttcccagccttccctgcttcagaggcaggagcatggcactctgggagttgtagtgctcataacactcaggcgatccctgtgcaaataactggagagaggactatggtatggggaagagaaatgagaataagcaggagtggct

SEQ ID NO: 61303 - DNA, 516 bp, Homo sapiens
aagaccccctttattaaccctgtactggcacttaaaacatactctattgtatttgccagctccttggcctgtctgcaagttccttcaggcatgctgccatcattctcatttatcactgtatctcctgtgcccagctttaaaaatattaggtaaatgagtgaaaaaagaaaatgtactatagttgcctctgttagaatgtttttctcccatgcaattccagatctacaagcagacctgcttattgagtttattgaatttctacctttttttctgaaaatcagaatatctcagggtccataaatctgtgagaaactcgtgggaagcagagcagcacataacagcaagatgattttccccttccttttgtctttaggggtcaagaattcttgtctcatggttcaggcattgtgttaactatttctgtgcattctttaagcatagttgtaactgtagttttgattgaaatattaacctataagtgatttggaatatcaaaataaacattcatatcacaga

SEQ ID NO: 61304 - DNA, 344 bp, Homo sapiens
agctagagtagctgctgggaagtatttctctcagtttcccgggagcagtgtgggtcgtgattctggattggccctccagggcagctagagtagctgctgggaagtatttctcagtttcccagtgcaccccatgtttctagtagaaaacacaattggtaattaaatattggaagtagtttctaacaattggatactcacctgagaacataaatttgctctctgaaataagcggtgggctttaaataattgcctttgtgaatatgaaatttaagtattagatgcacgattaggatcgattgtaacaaaacagtgatatctaaaatataccttcatgttttcaaagt

SEQ ID NO: 61305 - DNA, 599 bp, Homo sapiens
acaactgtaaataataaaaacttaacatacttggtacaaacttaatcaaatatttaatatcttagagttaacatattaagataacaggttatttgcccaaagtcataaggtgaagtagaggcaggaattgggcttcctagcctggagtccttttctccacctcaaggggctacgcagacctccaactaaatgctgagtttctcggtactgaaacagccctaggagaatgaataggacacagcgccatccctggccagtactatcaggtactacagtttggataccataacctacagtgtagccaggacctccctgaccagcccatctcttcccagcagccaccgtggtcctgagagctgggttaagccatcacctttaaaatcctgggaccacacttgtgcaatgcatgaatgggagaccctcagcttgttagccacgaagcacagatgagttcagtagacagccaagagaatcacaagtcatggcgtgggggcagccaaagacattcattcattcagtgactcttgattgagctctcacaagttaatacaccgtagtccctggcacagatgttatgaacctcaaggagtcttctgtat

SEQ ID NO: 61306 - DNA, 392 bp, Homo sapiens
tgagccatcgcgcccagaagagcttattctaaaattgaacttcttgcccctctaagtactgtcatgccatgggtggagaaatttaggaaagttctggaaatccctccctaaagaatttcaaatgtgtaagaacatttaaaaagtgttaaggcaatttaagtgagttctgagtaattggtacacaagaagctgttattactgctcatcttgattcaaacattaagcgaagaggcttacaagtaaactcagaacagtgagataaatgataggccaaaaattccaggaactgctgagtcaggagagcgtttttcaagacatctggccccaagaaaatctacttaaagcataaggagaactggctgacaatttctgaacccctggtgattatatgt

SEQ ID NO: 61307 - DNA, 422 bp, Homo sapiens
gatccacacttgggaaagtatattccatggtacctatagacagatatatgtgctttaccatgtatatgtgaaacttttctaatttaactttcctgttaaattagaactcggtagcataaattaatactgttgagtatacttagggatttgcatagatttaaaattgtgcatatgttccctagggccatggcgttaattggtttattagtcaggtggagtgcagagcctgaggtcaggacagttgtccttgaacatggaaatgaagagtggataatcaccatgtgttattgtttgggctgattttatctttaatgggtgattcagagtcctgattaatatttagagcagtgactgctggcctcctacctgctcattatcttcagaactttaaataaaatacttgatttctacccaagatggta

SEQ ID NO: 61308 - DNA, 393 bp, Homo sapiens
gatcagtatagatgaatgtgcagcaatttgctgactagtaatatgactcacgtaggtgtactacatacacccttctgctttcctatgaccggaattcatctctagagaccaagtttctcatttcggtttcacatttgccaataaaaggatagcaacactttcctaaagcaagttgctccctgccctgcttaaagcctggggtggcccagtcatggcaaggaccagcaggaaaagctttcttgaaaactgcttgtgcttgcaacaggcagtttcgcagttgatcccttcatagttttcttgctgattttgtgaagtgtcaggcattgctgatggcgtcacacagcttttttaaattgaggttatttgtatgaacaatattttatagtttgatgg

SEQ ID NO: 61309 - DNA, 481 bp, Homo sapiens
tgttacatactgatctacactttaaaataatatatatactgaaatctgtattcagatctcattgcaagcaaatatagatgaataaagacccagtctctgatataccaagcctcaaccagccctaacaaatgctgcttttcgacgggcaggtcaaaagcttgcctccatgatctgatgtagaattcatctctagagaccaagtttctcatttcggtttcacatttgccaataaaaggatagcaacactttcctaaagcaagttgctccctgccctgcttaaagcctggggtggcccagtcatggcaaggaccagcaggaaaagctttcttgaaaactgcttgtgcttgcaacaggcagtttcgcagttgatcccttcatagttttcttgctgattttgtgaagtgtcaggcattgctgatggcgtcacacagcttttttaaattgaggttatttgtatgaacaatattttatagtttgatgg

SEQ ID NO: 61310 - DNA, 243 bp, Homo sapiens
gtctcaggttttttcatctgtgaaatgtgagcagaaaccccagcccggcatacctcctacgggtaggttgtgatcctgatgtgatcctcaacaagacctggagatctccaggtctggctggggggatgaatctgcgagagacaccatcctggcgaggagtttcaataaatggctctgctgggtcgacccagcaagtacagggacaggacacacacccaaagagaagagaagcctggagtaggg

SEQ ID NO: 61311 - DNA, 216 bp, Homo sapiens
tagcatccaggggaagttcaattaatatttgtgaaaaatactgaaattaaagagacaagtagaagaaaatgaaataattaagtagattgagaaaagttgccagaaagcttggagaaaaaccaagatatgtaatttttgcagaagtcaaaggtagaaactattctgagatcaaagtcctataaacagagtcaaatgcttccaagaggtaaataagag

SEQ ID NO: 61312 - DNA, 374 bp, Homo sapiens
aaatattaatttttatccctaatgccagaaaaatacactgctatggcatttcaaaattgtagccatgaaatagaatgagatgtgatgtcatcacgtttttaggataatttctcactgccactagaaaaatacttcagcagaattcatgaggattatgtatattttataatcagtctcctcctaccatttatggtgctctttagaggtgataattctgtcttttgaagatctctggatcacaggaacaagagtgatggcaacaccaagagcaagccagggccctcctgaaactccccccttcctcactcactcttcactgcagcctctgagaagggaccttggccctgtaccaacttccttctccatccaaagtg

SEQ ID NO: 61313 - DNA, 248 bp, Homo sapiens
gaatttctcttgatttatttctcagtttgggtttgtgcttttgaaaaaggaaaataatgatcctgaaatcagtaggctttgtctttgccaaaaaatgtggacatgttgatcttaggggggctgattatataaaacaatagaaatgtagtcttagatgaaaatctgtaaagatgtaagaatgctgaactaacatgaaaatcaggggctgagaaaatgctggattgagaataatgtgataatgaaggttt

SEQ ID NO: 61314 - DNA, 2336 bp, Homo sapiens
gtctcttaaaacccactggacgttggcacagtgctgggatgactatggagacccaaatgtctcagaatgtatgtcccagaaacctgtggctgcttcaaccattgacagttttgctgctgctggcttctgcagacagtcaagctgcagctcccccaaaggctgtgctgaaacttgagcccccgtggatcaacgtgctccaggaggactctgtgactctgacatgccagggggctcgcagccctgagagcgactccattcagtggttccacaatgggaatctcattcccacccacacgcagcccagctacaggttcaaggccaacaacaatgacagcggggagtacacgtgccagactggccagaccagcctcagcgaccctgtgcatctgactgtgctttccgaatggctggtgctccagacccctcacctggagttccaggagggagaaaccatcatgctgaggtgccacagctggaaggacaagcctctggtcaaggtcacattcttccagaatggaaaatcccagaaattctcccgtttggatcccaccttctccatcccacaagcaaaccacagtcacagtggtgattaccactgcacaggaaacataggctacacgctgttctcatccaagcctgtgaccatcactgtccaagtgcccagcatgggcagctcttcaccaatggggatcattgtggctgtggtcattgcgactgctgtagcagccattgttgctgctgtagtggccttgatctactgcaggaaaaagcggatttcagccaattccactgatcctgtgaaggctgcccaatttgagccacctggacgtcaaatgattgccatcagaaagagacaacttgaagaaaccaacaatgactatgaaacagctgacggcggctacatgactctgaaccccagggcacctactgacgatgataaaaacatctacctgactcttcctcccaacgaccatgtcaacagtaataactaaagagtaacgttatgccatgtggtcatactctcagcttgctgagtggatgacaaaaagaggggaattgttaaaggaaaatttaaatggagactggaaaaatcctgagcaaacaaaaccacctggcccttagaaatagctttaactttgcttaaactacaaacacaagcaaaacttcacggggtcatactacatacaagcataagcaaaacttaacttggatcatttctggtaaatgcttatgttagaaataagacaaccccagccaatcacaagcagcctactaacatataattaggtgactagggactttctaagaagatacctacccccaaaaaacaattatgtaattgaaaaccaaccgattgcctttattttgcttccacattttcccaataaatacttgcctgtgacattttgccactggaacactaaacttcatgaattgcgcctcagatttttcctttaacatcttttttttttttgacagagtctcaatctgttacccaggctggagtgcagtggtgctatcttggctcactgcaaacccgcctcccaggtttaagcgattctcatgcctcagcctcccagtagctgggattagaggcatgtgccatcatacccagctaatttttgtattttttattttttttttttagtagagacagggtttcgcaatgttggccaggccgatctcgaacttctggcctctagcgatctgcccgcctcggcctcccaaagtgctgggatgaccagcatcagccccaatgtccagcctctttaacatcttctttcctatgccctctctgtggatccctactgctggtttctgccttctccatgctgagaacaaaatcacctattcactgcttatgcagtcggaagctccagaagaacaaagagcccaattaccagaaccacattaagtctccattgttttgccttgggatttgagaagagaattagagaggtgaggatctggtatttcctggactaaattccccttggggaagacgaagggatgctgcagttccaaaagagaaggactcttccagagtcatctacctgagtcccaaagctccctgtcctgaaagccacagacaatatggtcccaaatgactgactgcaccttctgtgcctcagccgttcttgacatcaagaatcttctgttccacatccacacagccaatacaattagtcaaaccactgttattaacagatgtagcaacatgagaaacgcttatgttacaggttacatgagagcaatcatgtaagtctatatgacttcagaaatgttaaaatagactaacctctaacaacaaattaaaagtgattgtttcaaggtga

SEQ ID NO: 61315 - DNA, 2414 bp, Homo sapiens
gtctcttaaaacccactggacgttggcacagtgctgggatgactatggagacccaaatgtctcagaatgtatgtcccagaaacctgtggctgcttcaaccattgacagttttgctgctgctggcttctgcagacagtcaagctgcagctcccccaaaggctgtgctgaaacttgagcccccgtggatcaacgtgctccaggaggactctgtgactctgacatgccagggggctcgcagccctgagagcgactccattcagtggttccacaatgggaatctcattcccacccacacgcagcccagctacaggttcaaggccaacaacaatgacagcggggagtacacgtgccagactggccagaccagcctcagcgaccctgtgcatctgactgtgctttccgaatggctggtgctccagacccctcacctggagttccaggagggagaaaccatcatgctgaggtgccacagctggaaggacaagcctctggtcaaggtcacattcttccagaatggaaaatcccagaaattctcccgtttggatcccaccttctccatcccacaagcaaaccacagtcacagtggtgattaccactgcacaggaaacataggctacacgctgttctcatccaagcctgtgaccatcactgtccaagtgcccagcatgggcagctcttcaccaatggggatcattgtggctgtggtcattgcgactgctgtagcagccattgttgctgctgtagtggccttgatctactgcaggaaaaagcggatttcagccaattccactgatcctgtgaaggctgcccaatttgagccacctggacgtcaaatgattgccatcagaaagagacaacttgaagaaaccaacaatgactatgaaacagctgacggcggctacatgactctgaaccccagggcacctactgacgatgataaaaacatctacctgactcttcctcccaacgaccatgtcaacagtaataactaaagagtaacgttatgccatgtggtcatactctcagcttgctgagtggatgacaaaaagaggggaattgttaaaggaaaatttaaatggagactggaaaaatcctgagcaaacaaaaccacctggcccttagaaatagctttaactttgcttaaactacaaacacaagcaaaacttcacggggtcatactacatacaagcataagcaaaacttaacttggatcatttctggtaaatgcttatgttagaaataagacaaccccagccaatcacaagcagcctactaacatataattaggtgactagggactttctaagaagatacctacccccaaaaaacaattatgtaattgaaaaccaaccgattgcctttattttgcttccacattttcccaataaatacttgcctgtgacattttgccactggaacactaaacttcatgaattgcgcctcagatttttcctttaacatcttttttttttttgacagagtctcaatctgttacccaggctggagtgcagtggtgctatcttggctcactgcaaacccgcctcccaggtttaagcgattctcatgcctcagcctcccagtagctgggattagaggcatgtgccatcatacccagctaatttttgtattttttattttttttttttagtagagacagggtttcgcaatgttggccaggccgatctcgaacttctggcctctagcgatctgcccgcctcggcctcccaaagtgctgggatgaccagcatcagccccaatgtccagcctctttaacatcttctttcctatgccctctctgtggatccctactgctggtttctgccttctccatgctgagaacaaaatcacctattcactgcttatgcagtcggaagctccagaagaacaaagagcccaattaccagaaccacattaagtctccattgttttgccttgggatttgagaagagaattagagaggtgaggatctggtatttcctggactaaattccccttggggaagacgaagggatgctgcagttccaaaagagaaggactcttccagagtcatctacctgagtcccaaagctccctgtcctgaaagccacagacaatatggtcccaaatgactgactgcaccttctgtgcctcagccgttcttgacatcaagaatcttctgttccacatccacacagccaatacaattagtcaaaccactgttattaacagatgtagcaacatgagaaacgcttatgttacaggttacatgagagcaatcatgtaagtctatatgacttcagaaatgttaaaatagactaacctctaacaacaaattaaaagtgattgtttcaaggtgatgcaattattgatgacctattttatttttctataatgatcatatattacctttgtaataaaacattataaccaaaaca

SEQ ID NO: 61316 - DNA, 531 bp, Homo sapiens
  misc_feature (18)..(18): n is a, c, g, or t
  misc_feature (24)..(24): n is a, c, g, or t
tgcgggtgctcagaggtnccggantggcaacagtaataactaaagagtaacgttatgccatgtggtcatactctcagcttgctgagtggatgacaaaaagaggggaattgttaaaggaaaatttaaatggagactggaaaaatcctgagcaaacaaaaccacctggcccttagaaatagctttaactttgcttaaactacaaacacaagcaaaacttcacggggtcatactacatacaagcataagcaaaacttaacttggatcatttctggtaaatgcttatgttagaaataagacaaccccagccaatcacaagcagcctactaacatataattaggtgactagggactttctaagaagatacctacccccaaaaaacaattatgtaattgaaatggtcgccaatccgcggattggcgaccatttcacaacataaatatctccttcatgcagggataagccttattattaaggcagccttccttcatacctacctaaaattagcaacactaaagaaataagaaacttgt

SEQ ID NO: 61317 - DNA, 483 bp, Homo sapiens
catgctcaccagtgtgctttcattcatttggtggagaaacctgggtagggaggaggcacaagtccagccacagaaaccctgtgccagtgaggctggggatgtggtgaatcttgcattggtgagtgactcagacacagaagagcttcaggtgacaagcactgggacatagcattggaggtgggaggtgggacagggagaatacaaacgttgtcattaaaatagtaaccccccatcctgccctaatgtctgtcttccctagtgcccagcatgggcagctcttcaccaatggggatcattgtggctgtggtcattgcgactgctgtagcagccattgttgctgctgtagtggccttgatctactgcaggaaaaagcggatttcaggtttgtagctcctcccagtcccttttgttatcagtttccatttggcccagggcctaaccccagacattgccagaatcccgctcttagggctagatatgcat

SEQ ID NO: 61318 - DNA, 2846 bp, Homo sapiens
gtctcttaaaacccactggacgttggcacagtgctgggatgactatggagacccaaatgtctcagaatgtatgtcccagaaacctgtggctgcttcaaccattgacagttttgctgctgctgggagtgagggtcattctgaaatggggcaatttcagacactcctactgcctggactccaggtaccagtgtggtaaggagcaggcctgggccctggaagcaggggatagattgaaagaggagagaggaccctgaattcttaagtgttccaatggttcctaaggtcagaactcagaggtagtttcatagtccctggaaagtccattctgcaccaaacattcatgtgtactttgtagtcatgaggaggaacaggaaatgagataaaggggacatatgaagtgaatacttttataaaagatcaactggaaacaggatcttgagatgggtcctggagaaggaagagcccaagctcacctccccagcatttcacatacgcagctaaatttgaagccgtgttctcctgctcgacgttgatccactctcttctcttttacagcttctgcagacagtcaagctgcagctcccccaaaggctgtgctgaaacttgagcccccgtggatcaacgtgctccaggaggactctgtgactctgacatgccagggggctcgcagccctgagagcgactccattcagtggttccacaatgggaatctcattcccacccacacgcagcccagctacaggttcaaggccaacaacaatgacagcggggagtacacgtgccagactggccagaccagcctcagcgaccctgtgcatctgactgtgctttccgaatggctggtgctccagacccctcacctggagttccaggagggagaaaccatcatgctgaggtgccacagctggaaggacaagcctctggtcaaggtcacattcttccagaatggaaaatcccagaaattctcccgtttggatcccaccttctccatcccacaagcaaaccacagtcacagtggtgattaccactgcacaggaaacataggctacacgctgttctcatccaagcctgtgaccatcactgtccaagtgcccagcatgggcagctcttcaccaatggggatcattgtggctgtggtcattgcgactgctgtagcagccattgttgctgctgtagtggccttgatctactgcaggaaaaagcggatttcagccaattccactgatcctgtgaaggctgcccaatttgagccacctggacgtcaaatgattgccatcagaaagagacaacttgaagaaaccaacaatgactatgaaacagctgacggcggctacatgactctgaaccccagggcacctactgacgatgataaaaacatctacctgactcttcctcccaacgaccatgtcaacagtaataactaaagagtaacgttatgccatgtggtcatactctcagcttgctgagtggatgacaaaaagaggggaattgttaaaggaaaatttaaatggagactggaaaaatcctgagcaaacaaaaccacctggcccttagaaatagctttaactttgcttaaactacaaacacaagcaaaacttcacggggtcatactacatacaagcataagcaaaacttaacttggatcatttctggtaaatgcttatgttagaaataagacaaccccagccaatcacaagcagcctactaacatataattaggtgactagggactttctaagaagatacctacccccaaaaaacaattatgtaattgaaaaccaaccgattgcctttattttgcttccacattttcccaataaatacttgcctgtgacattttgccactggaacactaaacttcatgaattgcgcctcagatttttcctttaacatcttttttttttttgacagagtctcaatctgttacccaggctggagtgcagtggtgctatcttggctcactgcaaacccgcctcccaggtttaagcgattctcatgcctcagcctcccagtagctgggattagaggcatgtgccatcatacccagctaatttttgtattttttattttttttttttagtagagacagggtttcgcaatgttggccaggccgatctcgaacttctggcctctagcgatctgcccgcctcggcctcccaaagtgctgggatgaccagcatcagccccaatgtccagcctctttaacatcttctttcctatgccctctctgtggatccctactgctggtttctgccttctccatgctgagaacaaaatcacctattcactgcttatgcagtcggaagctccagaagaacaaagagcccaattaccagaaccacattaagtctccattgttttgccttgggatttgagaagagaattagagaggtgaggatctggtatttcctggactaaattccccttggggaagacgaagggatgctgcagttccaaaagagaaggactcttccagagtcatctacctgagtcccaaagctccctgtcctgaaagccacagacaatatggtcccaaatgactgactgcaccttctgtgcctcagccgttcttgacatcaagaatcttctgttccacatccacacagccaatacaattagtcaaaccactgttattaacagatgtagcaacatgagaaacgcttatgttacaggttacatgagagcaatcatgtaagtctatatgacttcagaaatgttaaaatagactaacctctaacaacaaattaaaagtgattgtttcaaggtgatgcaattattgatgacctattttatttttctataatgatcatatattacctttgtaataaaacattataaccaaaaca

SEQ ID NO: 61319 - DNA, 1891 bp, Homo sapiens
aatagaatcgagctcgtaccagatccccttctccatcccacaagcaaaccacagtcacagtggtgattaccactgcacaggaaacataggctacacgctgttctcatccaagcctgtgaccatcactgtccaagtgcccagcatgggcagctcttcaccaatggggatcattgtggctgtggtcattgcgactgctgtagcagccattgttgctgctgtagtggccttgatctactgcaggaaaaagcggatttcagccaattccactgatcctgtgaaggctgcccaatttgagccacctggacgtcaaatgattgccatcagaaagagacaacttgaagaaaccaacaatgactatgaaacagctgacggcggctacatgactctgaaccccagggcacctactgacgatgataaaaacatctacctgactcttcctcccaacgaccatgtcaacagtaataactaaagagtaacgttatgccatgtggtcatactctcagcttgctgagtggatgacaaaaagaggggaattgttaaaggaaaatttaaatggagactggaaaaatcctgagcaaacaaaaccacctggcccttagaaatagctttaactttgcttaaactacaaacacaagcaaaacttcacggggtcatactacatacaagcataagcaaaacttaacttggatcatttctggtaaatgcttatgttagaaataagacaaccccagccaatcacaagcagcctactaacatataattaggtgactagggactttctaagaagatacctacccccaaaaaacaattatgtaattgaaaaccaaccgattgcctttattttgcttccacattttcccaataaatacttgcctgtgacattttgccactggaacactaaacttcatgaattgcgcctcagatttttcctttaacatcttttttttttttgacagagtctcaatctgttacccaggctggagtgcagtggtgctatcttggctcactgcaaacccgcctcccaggtttaagcgattctcatgcctcagcctcccagtagctgggattagaggcatgtgccatcatacccagctaatttttgtattttttattttttttttttagtagagacagggtttcgcaatgttggccaggccgatctcgaacttctggcctctagcgatctgcccgcctcggcctcccaaagtgctgggatgaccagcatcagccccaatgtccagcctctttaacatcttctttcctatgccctctctgtggatccctactgctggtttctgccttctccatgctgagaacaaaatcacctattcactgcttatgcagtcggaagctccagaagaacaaagagcccaattaccagaaccacattaagtctccattgttttgccttgggatttgagaagagaattagagaggtgaggatctggtatttcctggactaaattccccttggggaagacgaagggatgctgcagttccaaaagagaaggactcttccagagtcatctacctgagtcccaaagctccctgtcctgaaagccacagacaatatggtcccaaatgactgactgcaccttctgtgcctcagccgttcttgacatcaagaatcttctgttccacatccacacagccaatacaattagtcaaaccactgttattaacagatgtagcaacatgagaaacgcttatgttacaggttacatgagagcaatcatgtaagtctatatgacttcagaaatgttaaaatagactaacctctaacaacaaattaaaagtgattgtttcaaggtgatgcaattattgatgacctattttatttttctataatgatcatatattacctttgtaataaaacattataaccaaaaca

SEQ ID NO: 61320 - DNA, 2291 bp, Homo sapiens
gtctcttaaaacccactggacgttggcacagtgctgggatgactatggagacccaaatgtctcagaatgtatgtcccagaaacctgtggctgcttcaaccattgacagttttgctgctgctggcttctgcagacagtcaagctgcagctcccccaaaggctgtgctgaaacttgagcccccgtggatcaacgtgctccaggaggactctgtgactctgacatgccagggggctcgcagccctgagagcgactccattcagtggttccacaatgggaatctcattcccacccacacgcagcccagctacaggttcaaggccaacaacaatgacagcggggagtacacgtgccagactggccagaccagcctcagcgaccctgtgcatctgactgtgctttccgaatggctggtgctccagacccctcacctggagttccaggagggagaaaccatcatgctgaggtgccacagctggaaggacaagcctctggtcaaggtcacattcttccagaatggaaaatcccagaaattctcccgtttggatcccaccttctccatcccacaagcaaaccacagtcacagtggtgattaccactgcacaggaaacataggctacacgctgttctcatccaagcctgtgaccatcactgtccaagccaattccactgatcctgtgaaggctgcccaatttgagccacctggacgtcaaatgattgccatcagaaagagacaacttgaagaaaccaacaatgactatgaaacagctgacggcggctacatgactctgaaccccagggcacctactgacgatgataaaaacatctacctgactcttcctcccaacgaccatgtcaacagtaataactaaagagtaacgttatgccatgtggtcatactctcagcttgctgagtggatgacaaaaagaggggaattgttaaaggaaaatttaaatggagactggaaaaatcctgagcaaacaaaaccacctggcccttagaaatagctttaactttgcttaaactacaaacacaagcaaaacttcacggggtcatactacatacaagcataagcaaaacttaacttggatcatttctggtaaatgcttatgttagaaataagacaaccccagccaatcacaagcagcctactaacatataattaggtgactagggactttctaagaagatacctacccccaaaaaacaattatgtaattgaaaaccaaccgattgcctttattttgcttccacattttcccaataaatacttgcctgtgacattttgccactggaacactaaacttcatgaattgcgcctcagatttttcctttaacatcttttttttttttgacagagtctcaatctgttacccaggctggagtgcagtggtgctatcttggctcactgcaaacccgcctcccaggtttaagcgattctcatgcctcagcctcccagtagctgggattagaggcatgtgccatcatacccagctaatttttgtattttttattttttttttttagtagagacagggtttcgcaatgttggccaggccgatctcgaacttctggcctctagcgatctgcccgcctcggcctcccaaagtgctgggatgaccagcatcagccccaatgtccagcctctttaacatcttctttcctatgccctctctgtggatccctactgctggtttctgccttctccatgctgagaacaaaatcacctattcactgcttatgcagtcggaagctccagaagaacaaagagcccaattaccagaaccacattaagtctccattgttttgccttgggatttgagaagagaattagagaggtgaggatctggtatttcctggactaaattccccttggggaagacgaagggatgctgcagttccaaaagagaaggactcttccagagtcatctacctgagtcccaaagctccctgtcctgaaagccacagacaatatggtcccaaatgactgactgcaccttctgtgcctcagccgttcttgacatcaagaatcttctgttccacatccacacagccaatacaattagtcaaaccactgttattaacagatgtagcaacatgagaaacgcttatgttacaggttacatgagagcaatcatgtaagtctatatgacttcagaaatgttaaaatagactaacctctaacaacaaattaaaagtgattgtttcaaggtgatgcaattattgatgacctattttatttttctataatgatcatatattacctttgtaataaaacattataaccaaaaca

SEQ ID NO: 61321 - DNA, 1783 bp, Homo sapiens
actttctctttctttttctctctcatgttactttctctttctgtcttcctttttaatgccatggagtactatattcttcaaagttccaacaaagatgcactacatttggacaatgtggaaatggccctcagccttctcttcctgatgtgccaattccactgatcctgtgaaggctgcccaatttgagccacctggacgtcaaatgattgccatcagaaagagacaacttgaagaaaccaacaatgactatgaaacagctgacggcggctacatgactctgaaccccagggcacctactgacgatgataaaaacatctacctgactcttcctcccaacgaccatgtcaacagtaataactaaagagtaacgttatgccatgtggtcatactctcagcttgctgagtggatgacaaaaagaggggaattgttaaaggaaaatttaaatggagactggaaaaatcctgagcaaacaaaaccacctggcccttagaaatagctttaactttgcttaaactacaaacacaagcaaaacttcacggggtcatactacatacaagcataagcaaaacttaacttggatcatttctggtaaatgcttatgttagaaataagacaaccccagccaatcacaagcagcctactaacatataattaggtgactagggactttctaagaagatacctacccccaaaaaacaattatgtaattgaaaaccaaccgattgcctttattttgcttccacattttcccaataaatacttgcctgtgacattttgccactggaacactaaacttcatgaattgcgcctcagatttttcctttaacatcttttttttttttgacagagtctcaatctgttacccaggctggagtgcagtggtgctatcttggctcactgcaaacccgcctcccaggtttaagcgattctcatgcctcagcctcccagtagctgggattagaggcatgtgccatcatacccagctaatttttgtattttttattttttttttttagtagagacagggtttcgcaatgttggccaggccgatctcgaacttctggcctctagcgatctgcccgcctcggcctcccaaagtgctgggatgaccagcatcagccccaatgtccagcctctttaacatcttctttcctatgccctctctgtggatccctactgctggtttctgccttctccatgctgagaacaaaatcacctattcactgcttatgcagtcggaagctccagaagaacaaagagcccaattaccagaaccacattaagtctccattgttttgccttgggatttgagaagagaattagagaggtgaggatctggtatttcctggactaaattccccttggggaagacgaagggatgctgcagttccaaaagagaaggactcttccagagtcatctacctgagtcccaaagctccctgtcctgaaagccacagacaatatggtcccaaatgactgactgcaccttctgtgcctcagccgttcttgacatcaagaatcttctgttccacatccacacagccaatacaattagtcaaaccactgttattaacagatgtagcaacatgagaaacgcttatgttacaggttacatgagagcaatcatgtaagtctatatgacttcagaaatgttaaaatagactaacctctaacaacaaattaaaagtgattgtttcaaggtgatgcaattattgatgacctattttatttttctataatgatcatatattacctttgtaataaaacattataaccaaaaca

SEQ ID NO: 61322 - DNA, 1947 bp, Homo sapiens
tacagacagaggtttgcaggaaagagtgggcgtggactgcttactgggaagcactgttaatggctggtgctccagacccctcacctggagttccaggagggagaaaccatcatgctgaggtgccacagctggaaggacaagcctctggtcaaggtcacattcttccagaatggaaaatcccagaaattctcccgtttggatcccaccttctccatcccacaagcaaaccacagtcacagtggtgattaccactgcacaggaaacataggctacacgctgttctcatccaagcctgtgaccatcactgtccaagccaattccactgatcctgtgaaggctgcccaatttgagccacctggacgtcaaatgattgccatcagaaagagacaacttgaagaaaccaacaatgactatgaaacagctgacggcggctacatgactctgaaccccagggcacctactgacgatgataaaaacatctacctgactcttcctcccaacgaccatgtcaacagtaataactaaagagtaacgttatgccatgtggtcatactctcagcttgctgagtggatgacaaaaagaggggaattgttaaaggaaaatttaaatggagactggaaaaatcctgagcaaacaaaaccacctggcccttagaaatagctttaactttgcttaaactacaaacacaagcaaaacttcacggggtcatactacatacaagcataagcaaaacttaacttggatcatttctggtaaatgcttatgttagaaataagacaaccccagccaatcacaagcagcctactaacatataattaggtgactagggactttctaagaagatacctacccccaaaaaacaattatgtaattgaaaaccaaccgattgcctttattttgcttccacattttcccaataaatacttgcctgtgacattttgccactggaacactaaacttcatgaattgcgcctcagatttttcctttaacatcttttttttttttgacagagtctcaatctgttacccaggctggagtgcagtggtgctatcttggctcactgcaaacccgcctcccaggtttaagcgattctcatgcctcagcctcccagtagctgggattagaggcatgtgccatcatacccagctaatttttgtattttttattttttttttttagtagagacagggtttcgcaatgttggccaggccgatctcgaacttctggcctctagcgatctgcccgcctcggcctcccaaagtgctgggatgaccagcatcagccccaatgtccagcctctttaacatcttctttcctatgccctctctgtggatccctactgctggtttctgccttctccatgctgagaacaaaatcacctattcactgcttatgcagtcggaagctccagaagaacaaagagcccaattaccagaaccacattaagtctccattgttttgccttgggatttgagaagagaattagagaggtgaggatctggtatttcctggactaaattccccttggggaagacgaagggatgctgcagttccaaaagagaaggactcttccagagtcatctacctgagtcccaaagctccctgtcctgaaagccacagacaatatggtcccaaatgactgactgcaccttctgtgcctcagccgttcttgacatcaagaatcttctgttccacatccacacagccaatacaattagtcaaaccactgttattaacagatgtagcaacatgagaaacgcttatgttacaggttacatgagagcaatcatgtaagtctatatgacttcagaaatgttaaaatagactaacctctaacaacaaattaaaagtgattgtttcaaggtgatgcaattattgatgacctattttatttttctataatgatcatatattacctttgtaataaaacattataaccaaaaca

SEQ ID NO: 61323 - DNA, 2048 bp, Homo sapiens
tggttggttaacatcaggttactcttttgtaaggatgccaattgaaactggcctgtttgggaaattagatttttaggttattaggttattatctctctctcctgatttttccaaaggccagataagaatgtagtttctgtttggtgacttgaaactttatcgtgggtgattccattttgatttttagtctgttctgtttgggcctagtgcaggagcttagtgcaaaacaacagcctcctaaaatttaaaagactttaaagaacatacatgagtttttcatcagataatatttatttgtattcattaatttatttgattggttaagtcttggctcccgagaatctttgctcagaggaatttttcaatccttggctattattctccttatagttattgtatttacctccccggtgtattgaattatcctatgggttttaaatgctttcctgcagccacctggacgtcaaatgattgccatcagaaagagacaacttgaagaaaccaacaatgactatgaaacagctgacggcggctacatgactctgaaccccagggcacctactgacgatgataaaaacatctacctgactcttcctcccaacgaccatgtcaacagtaataactaaagagtaacgttatgccatgtggtcatactctcagcttgctgagtggatgacaaaaagaggggaattgttaaaggaaaatttaaatggagactggaaaaatcctgagcaaacaaaaccacctggcccttagaaatagctttaactttgcttaaactacaaacacaagcaaaacttcacggggtcatactacatacaagcataagcaaaacttaacttggatcatttctggtaaatgcttatgttagaaataagacaaccccagccaatcacaagcagcctactaacatataattaggtgactagggactttctaagaagatacctacccccaaaaaacaattatgtaattgaaaaccaaccgattgcctttattttgcttccacattttcccaataaatacttgcctgtgacattttgccactggaacactaaacttcatgaattgcgcctcagatttttcctttaacatcttttttttttttgacagagtctcaatctgttacccaggctggagtgcagtggtgctatcttggctcactgcaaacccgcctcccaggtttaagcgattctcatgcctcagcctcccagtagctgggattagaggcatgtgccatcatacccagctaatttttgtattttttattttttttttttagtagagacagggtttcgcaatgttggccaggccgatctcgaacttctggcctctagcgatctgcccgcctcggcctcccaaagtgctgggatgaccagcatcagccccaatgtccagcctctttaacatcttctttcctatgccctctctgtggatccctactgctggtttctgccttctccatgctgagaacaaaatcacctattcactgcttatgcagtcggaagctccagaagaacaaagagcccaattaccagaaccacattaagtctccattgttttgccttgggatttgagaagagaattagagaggtgaggatctggtatttcctggactaaattccccttggggaagacgaagggatgctgcagttccaaaagagaaggactcttccagagtcatctacctgagtcccaaagctccctgtcctgaaagccacagacaatatggtcccaaatgactgactgcaccttctgtgcctcagccgttcttgacatcaagaatcttctgttccacatccacacagccaatacaattagtcaaaccactgttattaacagatgtagcaacatgagaaacgcttatgttacaggttacatgagagcaatcatgtaagtctatatgacttcagaaatgttaaaatagactaacctctaacaacaaattaaaagtgattgtttcaaggtgatgcaattattgatgacctattttatttttctataatgatcatatattacctttgtaataaaacattataaccaaaaca

SEQ ID NO: 61324 - DNA, 1659 bp, Homo sapiens
gagcacacgaggaggaggctgccgtgagctataatcacaccactgcagtctagtctgggtgacagagtgagaccccgtggcttaaaagaacagggggggacagaaatcagattccgggccgatagacttgcagatcacggcaaatacatgactctgaaccccagggcacctactgacgatgataaaaacatctacctgactcttcctcccaacgaccatgtcaacagtaataactaaagagtaacgttatgccatgtggtcatactctcagcttgctgagtggatgacaaaaagaggggaattgttaaaggaaaatttaaatggagactggaaaaatcctgagcaaacaaaaccacctggcccttagaaatagctttaactttgcttaaactacaaacacaagcaaaacttcacggggtcatactacatacaagcataagcaaaacttaacttggatcatttctggtaaatgcttatgttagaaataagacaaccccagccaatcacaagcagcctactaacatataattaggtgactagggactttctaagaagatacctacccccaaaaaacaattatgtaattgaaaaccaaccgattgcctttattttgcttccacattttcccaataaatacttgcctgtgacattttgccactggaacactaaacttcatgaattgcgcctcagatttttcctttaacatcttttttttttttgacagagtctcaatctgttacccaggctggagtgcagtggtgctatcttggctcactgcaaacccgcctcccaggtttaagcgattctcatgcctcagcctcccagtagctgggattagaggcatgtgccatcatacccagctaatttttgtattttttattttttttttttagtagagacagggtttcgcaatgttggccaggccgatctcgaacttctggcctctagcgatctgcccgcctcggcctcccaaagtgctgggatgaccagcatcagccccaatgtccagcctctttaacatcttctttcctatgccctctctgtggatccctactgctggtttctgccttctccatgctgagaacaaaatcacctattcactgcttatgcagtcggaagctccagaagaacaaagagcccaattaccagaaccacattaagtctccattgttttgccttgggatttgagaagagaattagagaggtgaggatctggtatttcctggactaaattccccttggggaagacgaagggatgctgcagttccaaaagagaaggactcttccagagtcatctacctgagtcccaaagctccctgtcctgaaagccacagacaatatggtcccaaatgactgactgcaccttctgtgcctcagccgttcttgacatcaagaatcttctgttccacatccacacagccaatacaattagtcaaaccactgttattaacagatgtagcaacatgagaaacgcttatgttacaggttacatgagagcaatcatgtaagtctatatgacttcagaaatgttaaaatagactaacctctaacaacaaattaaaagtgattgtttcaaggtgatgcaattattgatgacctattttatttttctataatgatcatatattacctttgtaataaaacattataaccaaaaca

SEQ ID NO: 61325 - DNA, 1465 bp, Homo sapiens
  misc_feature (18)..(18): n is a, c, g, or t
  misc_feature (24)..(24): n is a, c, g, or t
tgcgggtgctcagaggtnccggantggcaacagtaataactaaagagtaacgttatgccatgtggtcatactctcagcttgctgagtggatgacaaaaagaggggaattgttaaaggaaaatttaaatggagactggaaaaatcctgagcaaacaaaaccacctggcccttagaaatagctttaactttgcttaaactacaaacacaagcaaaacttcacggggtcatactacatacaagcataagcaaaacttaacttggatcatttctggtaaatgcttatgttagaaataagacaaccccagccaatcacaagcagcctactaacatataattaggtgactagggactttctaagaagatacctacccccaaaaaacaattatgtaattgaaaaccaaccgattgcctttattttgcttccacattttcccaataaatacttgcctgtgacattttgccactggaacactaaacttcatgaattgcgcctcagatttttcctttaacatcttttttttttttgacagagtctcaatctgttacccaggctggagtgcagtggtgctatcttggctcactgcaaacccgcctcccaggtttaagcgattctcatgcctcagcctcccagtagctgggattagaggcatgtgccatcatacccagctaatttttgtattttttattttttttttttagtagagacagggtttcgcaatgttggccaggccgatctcgaacttctggcctctagcgatctgcccgcctcggcctcccaaagtgctgggatgaccagcatcagccccaatgtccagcctctttaacatcttctttcctatgccctctctgtggatccctactgctggtttctgccttctccatgctgagaacaaaatcacctattcactgcttatgcagtcggaagctccagaagaacaaagagcccaattaccagaaccacattaagtctccattgttttgccttgggatttgagaagagaattagagaggtgaggatctggtatttcctggactaaattccccttggggaagacgaagggatgctgcagttccaaaagagaaggactcttccagagtcatctacctgagtcccaaagctccctgtcctgaaagccacagacaatatggtcccaaatgactgactgcaccttctgtgcctcagccgttcttgacatcaagaatcttctgttccacatccacacagccaatacaattagtcaaaccactgttattaacagatgtagcaacatgagaaacgcttatgttacaggttacatgagagcaatcatgtaagtctatatgacttcagaaatgttaaaatagactaacctctaacaacaaattaaaagtgattgtttcaaggtgatgcaattattgatgacctattttatttttctataatgatcatatattacctttgtaataaaacattataaccaaaaca

SEQ ID NO: 61326 - DNA, 1521 bp, Homo sapiens
ccagcagtagggatccacagagagggcataggaaagaagatgttaaagaggctggacattggggctgatgctgggcacttggacaacagtaataactaaagagtaacgttatgccatgtggtcatactctcagcttgctgagtggatgacaaaaagaggggaattgttaaaggaaaatttaaatggagactggaaaaatcctgagcaaacaaaaccacctggcccttagaaatagctttaactttgcttaaactacaaacacaagcaaaacttcacggggtcatactacatacaagcataagcaaaacttaacttggatcatttctggtaaatgcttatgttagaaataagacaaccccagccaatcacaagcagcctactaacatataattaggtgactagggactttctaagaagatacctacccccaaaaaacaattatgtaattgaaaaccaaccgattgcctttattttgcttccacattttcccaataaatacttgcctgtgacattttgccactggaacactaaacttcatgaattgcgcctcagatttttcctttaacatcttttttttttttgacagagtctcaatctgttacccaggctggagtgcagtggtgctatcttggctcactgcaaacccgcctcccaggtttaagcgattctcatgcctcagcctcccagtagctgggattagaggcatgtgccatcatacccagctaatttttgtattttttattttttttttttagtagagacagggtttcgcaatgttggccaggccgatctcgaacttctggcctctagcgatctgcccgcctcggcctcccaaagtgctgggatgaccagcatcagccccaatgtccagcctctttaacatcttctttcctatgccctctctgtggatccctactgctggtttctgccttctccatgctgagaacaaaatcacctattcactgcttatgcagtcggaagctccagaagaacaaagagcccaattaccagaaccacattaagtctccattgttttgccttgggatttgagaagagaattagagaggtgaggatctggtatttcctggactaaattccccttggggaagacgaagggatgctgcagttccaaaagagaaggactcttccagagtcatctacctgagtcccaaagctccctgtcctgaaagccacagacaatatggtcccaaatgactgactgcaccttctgtgcctcagccgttcttgacatcaagaatcttctgttccacatccacacagccaatacaattagtcaaaccactgttattaacagatgtagcaacatgagaaacgcttatgttacaggttacatgagagcaatcatgtaagtctatatgacttcagaaatgttaaaatagactaacctctaacaacaaattaaaagtgattgtttcaaggtgatgcaattattgatgacctattttatttttctataatgatcatatattacctttgtaataaaacattataaccaaaaca

SEQ ID NO: 61327 - DNA, 1707 bp, Homo sapiens
tggttggttaacatcaggttactcttttgtaaggatgccaattgaaactggcctgtttgggaaattagatttttaggttattaggttattatctctctctcctgatttttccaaaggccagataagaatgtagtttctgtttggtgacttgaaactttatcgtgggtgattccattttgatttttagtctgttctgtttgggcctagtgcaggagcttagtgcaaaacaacagcctcctaaaatttaaaagactttaaagaacatacatgagtttttcatcagataatatttatttgtattcattaatttatttgattggttaagtcttggctcccgagaatctttgctcagaggaatttttcaatccttggctattattctccttatagttattgtatttacctccccggtgtattgaattatcctatgggttttaaatgctttcctgcagccacctggacgtcaaatgattgccatcagaaagagacaacttgaagaaaccaacaatgactatgaaacagctgacggcggctacatgactctgaaccccagggcacctactgacgatgataaaaacatctacctgactcttcctcccaacgaccatgtcaacagtaataactaaagagtaacgttaaccaaccgattgcctttattttgcttccacattttcccaataaatacttgcctgtgacattttgccactggaacactaaacttcatgaattgcgcctcagatttttcctttaacatcttttttttttttgacagagtctcaatctgttacccaggctggagtgcagtggtgctatcttggctcactgcaaacccgcctcccaggtttaagcgattctcatgcctcagcctcccagtagctgggattagaggcatgtgccatcatacccagctaatttttgtattttttattttttttttttagtagagacagggtttcgcaatgttggccaggccgatctcgaacttctggcctctagcgatctgcccgcctcggcctcccaaagtgctgggatgaccagcatcagccccaatgtccagcctctttaacatcttctttcctatgccctctctgtggatccctactgctggtttctgccttctccatgctgagaacaaaatcacctattcactgcttatgcagtcggaagctccagaagaacaaagagcccaattaccagaaccacattaagtctccattgttttgccttgggatttgagaagagaattagagaggtgaggatctggtatttcctggactaaattccccttggggaagacgaagggatgctgcagttccaaaagagaaggactcttccagagtcatctacctgagtcccaaagctccctgtcctgaaagccacagacaatatggtcccaaatgactgactgcaccttctgtgcctcagccgttcttgacatcaagaatcttctgttccacatccacacagccaatacaattagtcaaaccactgttattaacagatgtagcaacatgagaaacgcttatgttacaggttacatgagagcaatcatgtaagtctatatgacttcagaaatgttaaaatagactaacctctaacaacaaattaaaagtgattgtttcaaggtgatgcaattattgatgacctattttatttttctataatgatcatatattacctttgtaataaaacattataaccaaaaca

SEQ ID NO: 61328 - DNA, 786 bp, Homo sapiens
  misc_feature (17)..(17): n is a, c, g, or t
gattcggagctcggtancctgagagacagggtttcgcaatgttggccaggccgatctcgaacttctggcctctagcgatctgcccgcctcggcctcccaaagtgctgggatgaccagcatcagccccaatgtccagcctctttaacatcttctttcctatgccctctctgtggatccctactgctggtttctgccttctccatgctgagaacaaaatcacctattcactgcttatgcagtcggaagctccagaagaacaaagagcccaattaccagaaccacattaagtctccattgttttgccttgggatttgagaagagaattagagaggtgaggatctggtatttcctggactaaattccccttggggaagacgaagggatgctgcagttccaaaagagaaggactcttccagagtcatctacctgagtcccaaagctccctgtcctgaaagccacagacaatatggtcccaaatgactgactgcaccttctgtgcctcagccgttcttgacatcaagaatcttctgttccacatccacacagccaatacaattagtcaaaccactgttattaacagatgtagcaacatgagaaacgcttatgttacaggttacatgagagcaatcatgtaagtctatatgacttcagaaatgttaaaatagactaacctctaacaacaaattaaaagtgattgtttcaaggtgatgcaattattgatgacctattttatttttctataatgatcatatattacctttgtaataaaacattataaccaaaaca

SEQ ID NO: 61329 - DNA, 2019 bp, Homo sapiens
gtctcttaaaacccactggacgttggcacagtgctgggatgactatggagacccaaatgtctcagaatgtatgtcccagaaacctgtggctgcttcaaccattgacagttttgctgctgctggcttctgcagacagtcaagctgcagctcccccaaaggctgtgctgaaacttgagcccccgtggatcaacgtgctccaggaggactctgtgactctgacatgccagggggctcgcagccctgagagcgactccattcagtggttccacaatgggaatctcattcccacccacacgcagcccagctacaggttcaaggccaacaacaatgacagcggggagtacacgtgccagactggccagaccagcctcagcgaccctgtgcatctgactgtgctttccgaatggctggtgctccagacccctcacctggagttccaggagggagaaaccatcatgctgaggtgccacagctggaaggacaagcctctggtcaaggtcacattcttccagaatggaaaatcccagaaattctcccgtttggatcccaccttctccatcccacaagcaaaccacagtcacagtggtgattaccactgcacaggaaacataggctacacgctgttctcatccaagcctgtgaccatcactgtccaagtgcccagcatgggcagctcttcaccaatggggatcattgtggctgtggtcattgcgactgctgtagcagccattgttgctgctgtagtggccttgatctactgcaggaaaaagcggatttcagccaattccactgatcctgtgaaggctgcccaatttgagccacctggacgtcaaatgattgccatcagaaagagacaacttgaagaaaccaacaatgactatgaaacagctgacggcggctacatgactctgaaccccagggcacctactgacgatgataaaaacatctacctgactcttcctcccaacgaccatgtcaacagtaataactaaagagtaacgttaaccaaccgattgcctttattttgcttccacattttcccaataaatacttgcctgtgacattttgccactggaacactaaacttcatgaattgcgcctcagatttttcctttaacatcttttttttttttgacagagtctcaatctgttacccaggctggagtgcagtggtgctatcttggctcactgcaaacccgcctcccaggtttaagcgattctcatgcctcagcctcccagtagctgggattagaggcatgtgccatcatacccagctaatttttgtattttttattttttttttttagtagagacagggtttcgcaatgttggccaggccgatctcgaacttctggcctctagcgatctgcccgcctcggcctcccaaagtgctgggatgaccagcatcagccccaatgtccagcctctttaacatcttctttcctatgccctctctgtggatccctactgctggtttctgccttctccatgctgagaaccaattaccagaaccacattaagtctccattgttttgccttgggatttgagaagagaattagagaggtgaggatctggtatttcctggactaaattccccttggggaagacgaagggatgctgcagttccaaaagagaaggactcttccagagtcatctacctgagtcccaaagctccctgtcctgaaagccacagacaatatggtcccaaatgactgactgcaccttctgtgcctcagccgttcttgacatcaagaatcttctgttccacatccacacagccaatacaattagtcaaaccactgttattaacagatgtagcaacatgagaaacgcttatgttacaggttacatgagagcaatcatgtaagtctatatgacttcagaaatgttaaaatagactaacctctaacaacaaattaaaagtgattgtttcaaggtgatgcaattattgatgacctattttatttttctataatgatcatatattacctttgtaataaaacattataaccaaaaca

SEQ ID NO: 61330 - DNA, 1394 bp, Homo sapiens
gtctcttaaaacccactggacgttggcacagtgctgggatgactatggagacccaaatgtctcagaatgtatgtcccagaaacctgtggctgcttcaaccattgacagttttgctgctgctggcttctgcagacagtcaagctgcagctcccccaaaggctgtgctgaaacttgagcccccgtggatcaacgtgctccaggaggactctgtgactctgacatgccagggggctcgcagccctgagagcgactccattcagtggttccacaatgggaatctcattcccacccacacgcagcccagctacaggttcaaggccaacaacaatgacagcggggagtacacgtgccagactggccagaccagcctcagcgaccctgtgcatctgactgtgctttccgaatggctggtgctccagacccctcacctggagttccaggagggagaaaccatcatgctgaggtgccacagctggaaggacaagcctctggtcaaggtcacattcttccagaatggaaaatcccagaaattctcccgtttggatcccaccttctccatcccacaagcaaaccacagtcacagtggtgattaccactgcacaggaaacataggctacacgctgttctcatccaagcctgtgaccatcactgtccaagtgcccagcatgggcagctcttcaccaatggggatcattgtggctgtggtcattgcgactgctgtagcagccattgttgctgctgtagtggccttgatctactgcaggaaaaagcggatttcagccaattccactgatcctgtgaaggctgcccaatttgagccacctggacgtcaaatgattgccatcagaaagagacaacttgaagaaaccaacaatgactatgaaacagctgacggcggctacatgactctgaaccccagggcacctactgacgatgataaaaacatctacctgactcttcctcccaacgaccatgtcaacagtaataactaaagagtaacgttatgccatgtggtcatactctcagcttgctgagtggatgacaaaaagaggggaattgttaaaggaaaatttaaatggagactggaaaaatcctgagcaaacaaaaccacctggcccttagaaatagctttaactttgcttaaactacaaacacaagcaaaacttcacggggtcatactacatacaagcataagcaaaacttaacttggatcatttctggtaaatgcttatgttagaaataagacaaccccagccaatcacaagcagcctactaacatataattaggtgactagggactttctaagaagatacctacccccaaaaaacaattatgtaattgaaaaccaaccgattgcactccagcctgggcaacaagagtgaaactccgtctc

SEQ ID NO: 61331 - DNA, 1071 bp, Homo sapiens
gtctcttaaaacccactggacgttggcacagtgctgggatgactatggagacccaaatgtctcagaatgtatgtcccagaaacctgtggctgcttcaaccattgacagttttgctgctgctggcttctgcagacagtcaagctgcagctcccccaaaggctgtgctgaaacttgagcccccgtggatcaacgtgctccaggaggactctgtgactctgacatgccagggggctcgcagccctgagagcgactccattcagtggttccacaatgggaatctcattcccacccacacgcagcccagctacaggttcaaggccaacaacaatgacagcggggagtacacgtgccagactggccagaccagcctcagcgaccctgtgcatctgactgtgctttccgaatggctggtgctccagacccctcacctggagttccaggagggagaaaccatcatgctgaggtgccacagctggaaggacaagcctctggtcaaggtcacattcttccagaatggaaaatcccagaaattctcccgtttggatcccaccttctccatcccacaagcaaaccacagtcacagtggtgattaccactgcacaggaaacataggctacacgctgttctcatccaagcctgtgaccatcactgtccaagtgcccagcatgggcagctcttcaccaatggggatcattgtggctgtggtcattgcgactgctgtagcagccattgttgctgctgtagtggccttgatctactgcaggaaaaagcggatttcagccaattccactgatcctgtgaaggctgcccaatttgagccacctggacgtcaaatgattgccatcagaaagagacaacttgaagaaaccaacaatgactatgaaacagctgacggcggctacatgactctgaaccccagggcacctactgacgatgataaaaacatctacctgactcttcctcccaacgaccatgtcaacagtaataactaaagagtaacgttatgccatgtggtcatactctcagcttgctgagtggatgaaaggggatctggtaccgagctcgattcta

SEQ ID NO: 61332 - DNA, 883 bp, Homo sapiens
gtctcttaaaacccactggacgttggcacagtgctgggatgactatggagacccaaatgtctcagaatgtatgtcccagaaacctgtggctgcttcaaccattgacagttttgctgctgctgggagtgagggtcattctgaaatggggcaatttcagacactcctactgcctggactccaggtaccagtgtggtaaggagcaggcctgggccctggaagcaggggatagattgaaagaggagagaggaccctgaattcttaagtgttccaatggttcctaaggtcagaactcagaggtagtttcatagtccctggaaagtccattctgcaccaaacattcatgtgtactttgtagtcatgaggaggaacaggaaatgagataaaggggacatatgaagtgaatacttttataaaagatcaactggaaacaggatcttgagatgggtcctggagaaggaagagcccaagctcacctccccagcatttcacatacgcagctaaatttgaagccgtgttctcctgctcgacgttgatccactctcttctcttttacagcttctgcagacagtcaagctgcagctcccccaaaggctgtgctgaaacttgagcccccgtggatcaacgtgctccaggaggactctgtgactctgacatgccagggggctcgcagccctgagagcgactccattcagtggttccacaatgggaatctcattcccacccacacgcagcccagctacaggttcaaggccaacaacaatgacagcggggagtacacgtgccagactggccagaccagcctcagcgaccctgtgcatctgactgtgctttccggtcagtggaggaaggccccagggtggacctgggagggccaggacggatg

SEQ ID NO: 61333 - DNA, 1369 bp, Homo sapiens
aaataaagaaaattaacgccatccgaagagacagagaagacaagaaaatcacagattccactgacctgtgaaggctgcccaatttgagccacctggacgtcaaatgattgccatcagaaagagacaacttgaagaaaccaacaatgactatgaaacagctgacggcggctacatgactctgaaccccagggcacctactgacgatgataaaaacatctacctgactcttcctcccaacgaccatgtctgcagttaccagaaggatgtgaccttctcagagaagtcattccaggcagattagaaacatgacccacagtctccttgatggtttgtacagctgatctctcaagcagcaatctctaccagctgtcactggtgctctcggagagaggattaaccaagaaacccagcccaggaacagtactgacctctacttctggactcctgcctccctcttaaaaagtcccttgaacttcctagtgggttctaacctgtcaaaggagaaaatagccacctatggagtaagggtttttagtttctctttttacaaatggaagtttcctttgaatcaggcaagtaacgttaaatagaagccaacttttaagtttctccttataacacactgctaaattataacaccagactataccacatactctccagctgccagctattgcagttgccatccttgttactatagtggtaagtatctctgcctgtcatgcatgagagagggggtcgattccctgacagggaggttacggaaaattgtgtggggattttgtcaaccttcaaaagtctcagaaatgtctccttgttttggctttcagcggaaatccgaacaccagaagatctgaatggaatgttctggattgaagaaagtgggaaatggcctcaattcacaaagtcacagcctgatagaaaccagtgtgactttactgcccagtgaacccatctcgtcctccagcctttaggaggtaggttggactggagcctgcagtagtttactctccacctgagtcctggtctccggctgggaacccacttaggccatagagaaaaacgcacactgtgcctctccaccgggcctctggagacgaggctcctcggggatacaaacagtggggagaacatgagggacatcctgaccgtacactgcgtcctcctttcccaggtgttgcgttctctcttgggttgagtggcgaggtctctcccgagtcccagggccacagtgcaatgtcacatctcctttgtggaaagtgactggtaaaagagaacaaaactggaggaacctaaagtcttcggccacctggtttaatttattcaagagtgattaatcctagatgagaaaaagaattgaaatggatcg

SEQ ID NO: 61334 - DNA, 219 bp, Homo sapiens
tatggttttgcagcctcagcatcagcgtgggcaggcccttttcaacagcagtgccctggctaatccttttctttttccccacagccaattccactgatcctgtgaaggctgcccaatttgagatgagtaatcccagccatctccttttcttcctgccttgtcccttctctcctgtttcctctctttttgcctttgttaatgcaaaattaaaatggagac

SEQ ID NO: 61335 - DNA, 846 bp, Homo sapiens
tgagaacaaaatcacctattcactgcttatgcagtcggaagctccagaagaacaaagagcccaattaccagaaccacattaagtctccattgttttgccttgggatttgagaagagaattagagaggtgaggatctggtatttcctggactaaattccccttggggaagacgaagggatgctgcagttccaaaagagaaggactcttccagagtcatctacctgagtcccaaagctccctgtcctgaaagccacagacaatatggtcccaaatgactgactgcaccttctgtgcctcagccgttcttgacatcaagaatcttctgttccacatccacacagccaatacaattagtcaaaccactgttattaacagatgtagcaacatgagaaacgcttatgttacaggttacatgagagcaatcatgtaagtctatatgacttcagaaatgttaaaatagactaacctctaacaacaaattaaaagtgattgtttcaaggtgatgcaattattgatgacctattttatttttctataatgatcatatattacctttgtaataaaacattataaccaaaacattctgtttaccttttcagggctgtattgattggggtgtagactgaactatccggggtctgtttcttttcggtgatgaaagtcttgagaaggtagtaatggataagatgtgaaggagaggagagatggagatttggagtgtagggtgagtgcccctcttcttaaaactgaatactcttcttctaatgaacttgtattcttgtttccatgtcttcttgcctttccttctatggcaaataaagcattcactttgttttggaacacaag

SEQ ID NO: 61336 - DNA, 912 bp, Homo sapiens
gtctcttaaaacccactggacgttggcacagtgctgggatgactatggagacccaaatgtctcagaatgtatgtcccagaaacctgtggctgcttcaaccattgacagttttgctgctgctggcagctcccccaaaggctgtgctgaaacttgagcccccgtggatcaacgtgctccaggaggactctgtgactctgacatgccagggggctcgcagccctgagagcgactccattcagtggttccacaatgggaatctcattcccacccacacgcagcccagctacaggttcaaggccaacaacaatgacagcggggagtacacgtgccagactggccagaccagcctcagcgaccctgtgcatctgactgtgctttccgaatggctggtgctccagacccctcacctggagttccaggagggagaaaccatcatgctgaggtgccacagctggaaggacaagcctctggtcaaggtcacattcttccagaatggaaaatcccagaaattctcccgtttggatcccaccttctccatcccacaagcaaaccacagtcacagtggtgattaccactgcacaggaaacataggctacacgctgttctcatccaagcctgtgaccatcactgtccaaggtatggggagtctgccaagatgtagggaggggagaagaggggatggacaagggctgaggtcacatgggcctacatggaggtctgagaaagcccatagcagcaaaattgggcactggagcaaagaggagtggggtggaagcctggctaagtattgaccaacaagtaggggccagagcttggagccctcacgtcccaggtaataggtagtcaggctgttgtttcactttgaaatgtaggccccagactaaagatggcagtgaagcagagctccctcat

SEQ ID NO: 61337 - DNA, 3360 bp, Homo sapiens
gtctcttaaaacccactggacgttggcacagtgctgggatgactatggagacccaaatgtctcagaatgtatgtcccagaaacctgtggctgcttcaaccattgacagttttgctgctgctggcttctgcagacagtcaagctgcagctcccccaaaggctgtgctgaaacttgagcccccgtggatcaacgtgctccaggaggactctgtgactctgacatgccagggggctcgcagccctgagagcgactccattcagtggttccacaatgggaatctcattcccacccacacgcagcccagctacaggttcaaggccaacaacaatgacagcggggagtacacgtgccagactggccagaccagcctcagcgaccctgtgcatctgactgtgctttccgaatggctggtgctccagacccctcacctggagttccaggagggagaaaccatcatgctgaggtgccacagctggaaggacaagcctctggtcaaggtcacattcttccagaatggaaaatcccagaaattctcccgtttggatcccaccttctccatcccacaagcaaaccacagtcacagtggtgattaccactgcacaggaaacataggctacacgctgttctcatccaagcctgtgaccatcactgtccaagtgcccagcatgggcagctcttcaccaatggggatcattgtggctgtggtcattgcgactgctgtagcagccattgttgctgctgtagtggccttgatctactgcaggaaaaagcggatttcagccaattccactgatcctgtgaaggctgcccaatttgagatgagtaatcccagccatctccttttcttcctgccttgtcccttctctcctgtttcctctctttttgcctttgttaatgcaaaattaaaatggagactgggcctgaaaactcctgagcaaacaaagccacccaggccttagaaatagccttatcattgcttaaactgcaaacataagtgaaactcaagttggattgtaactaaaaataggtaatacttaacttggatcatttctggtaaatgtttatgttagacagaaataagatttaaccctagccaatcgtaagcagccttcagataaaatgaattatgtgactaagaacacttcaataaggtacctcacccaaaagacaattatgtaactgcaaacctatcaaatttctttattttacttccacattttcccaattaatacctgtctctgactttctgtcattaaaacattagacctcttttggtttggtgtcacccaattcatgaattgcttcttactcaaatgaactctttaaaattgtattgtgccttagatttttctttaacagtttggtgtcagaagtaggatataaagtagaatctcccccaaagatccctaagagcaatgggtgaccaggcataggtacccattaagcccattgtgttcactggtttcttcctgcatttgtgagtcactaggtaagtccctctcagatatcaggcttgcaacttgtgtcctgagctctctgagtttatttgagtaattttatttctcatttgattcagcggttaatctgggtatttgacaagttcatctgtttccaacaggaactatactaggtccagtatagtgtactagtttccagacaaggtctgatttctggattgggatccagaggtcaaattgggtacttgacagattgaactaggtgttcaacagaaactgaactgggggtccagttgcagtcctgcagccacctggacgtcaaatgattgccatcagaaagagacaacttgaagaaaccaacaatgactatgaaacagctgacggcggctacatgactctgaaccccagggcacctactgacgatgataaaaacatctacctgactcttcctcccaacgaccatgtcaacagtaataactaaagagtaacgttatgccatgtggtcatactctcagcttgctgagtggatgacaaaaagaggggaattgttaaaggaaaatttaaatggagactggaaaaatcctgagcaaacaaaaccacctggcccttagaaatagctttaactttgcttaaactacaaacacaagcaaaacttcacggggtcatactacatacaagcataagcaaaacttaacttggatcatttctggtaaatgcttatgttagaaataagacaaccccagccaatcacaagcagcctactaacatataattaggtgactagggactttctaagaagatacctacccccaaaaaacaattatgtaattgaaaaccaaccgattgcctttattttgcttccacattttcccaataaatacttgcctgtgacattttgccactggaacactaaacttcatgaattgcgcctcagatttttcctttaacatcttttttttttttgacagagtctcaatctgttacccaggctggagtgcagtggtgctatcttggctcactgcaaacccgcctcccaggtttaagcgattctcatgcctcagcctcccagtagctgggattagaggcatgtgccatcatacccagctaatttttgtattttttattttttttttttagtagagacagggtttcgcaatgttggccaggccgatctcgaacttctggcctctagcgatctgcccgcctcggcctcccaaagtgctgggatgaccagcatcagccccaatgtccagcctctttaacatcttctttcctatgccctctctgtggatccctactgctggtttctgccttctccatgctgagaacaaaatcacctattcactgcttatgcagtcggaagctccagaagaacaaagagcccaattaccagaaccacattaagtctccattgttttgccttgggatttgagaagagaattagagaggtgaggatctggtatttcctggactaaattccccttggggaagacgaagggatgctgcagttccaaaagagaaggactcttccagagtcatctacctgagtcccaaagctccctgtcctgaaagccacagacaatatggtcccaaatgactgactgcaccttctgtgcctcagccgttcttgacatcaagaatcttctgttccacatccacacagccaatacaattagtcaaaccactgttattaacagatgtagcaacatgagaaacgcttatgttacaggttacatgagagcaatcatgtaagtctatatgacttcagaaatgttaaaatagactaacctctaacaacaaattaaaagtgattgtttcaaggtgatgcaattattgatgacctattttatttttctataatgatcatatattacctttgtaataaaacattataaccaaaaca

SEQ ID NO: 61338 - DNA, 2016 bp, Homo sapiens
catgctcaccagtgtgctttcattcatttggtggagaaacctgggtagggaggaggcacaagtccagccacagaaaccctgtgccagtgaggctggggatgtggtgaatcttgcattggtgagtgactcagacacagaagagcttcaggtgacaagcactgggacatagcattggaggtgggaggtgggacagggagaatacaaacgttgtcattaaaatagtaaccccccatcctgccctaatgtctgtcttccctagtgcccagcatgggcagctcttcaccaatggggatcattgtggctgtggtcattgcgactgctgtagcagccattgttgctgctgtagtggccttgatctactgcaggaaaaagcggatttcagccaattccactgatcctgtgaaggctgcccaatttgagccacctggacgtcaaatgattgccatcagaaagagacaacttgaagaaaccaacaatgactatgaaacagctgacggcggctacatgactctgaaccccagggcacctactgacgatgataaaaacatctacctgactcttcctcccaacgaccatgtcaacagtaataactaaagagtaacgttatgccatgtggtcatactctcagcttgctgagtggatgacaaaaagaggggaattgttaaaggaaaatttaaatggagactggaaaaatcctgagcaaacaaaaccacctggcccttagaaatagctttaactttgcttaaactacaaacacaagcaaaacttcacggggtcatactacatacaagcataagcaaaacttaacttggatcatttctggtaaatgcttatgttagaaataagacaaccccagccaatcacaagcagcctactaacatataattaggtgactagggactttctaagaagatacctacccccaaaaaacaattatgtaattgaaaaccaaccgattgcctttattttgcttccacattttcccaataaatacttgcctgtgacattttgccactggaacactaaacttcatgaattgcgcctcagatttttcctttaacatcttttttttttttgacagagtctcaatctgttacccaggctggagtgcagtggtgctatcttggctcactgcaaacccgcctcccaggtttaagcgattctcatgcctcagcctcccagtagctgggattagaggcatgtgccatcatacccagctaatttttgtattttttattttttttttttagtagagacagggtttcgcaatgttggccaggccgatctcgaacttctggcctctagcgatctgcccgcctcggcctcccaaagtgctgggatgaccagcatcagccccaatgtccagcctctttaacatcttctttcctatgccctctctgtggatccctactgctggtttctgccttctccatgctgagaacaaaatcacctattcactgcttatgcagtcggaagctccagaagaacaaagagcccaattaccagaaccacattaagtctccattgttttgccttgggatttgagaagagaattagagaggtgaggatctggtatttcctggactaaattccccttggggaagacgaagggatgctgcagttccaaaagagaaggactcttccagagtcatctacctgagtcccaaagctccctgtcctgaaagccacagacaatatggtcccaaatgactgactgcaccttctgtgcctcagccgttcttgacatcaagaatcttctgttccacatccacacagccaatacaattagtcaaaccactgttattaacagatgtagcaacatgagaaacgcttatgttacaggttacatgagagcaatcatgtaagtctatatgacttcagaaatgttaaaatagactaacctctaacaacaaattaaaagtgattgtttcaaggtgatgcaattattgatgacctattttatttttctataatgatcatatattacctttgtaataaaacattataaccaaaaca

SEQ ID NO: 61339 - DNA, 2018 bp, Homo sapiens
gtctcttaaaacccactggacgttggcacagtgctgggatgactatggagacccaaatgtctcagaatgtatgtcccagaaacctgtggctgcttcaaccattgacagttttgctgctgctggcttctgcagacagtcaagctgcagctcccccaaaggctgtgctgaaacttgagcccccgtggatcaacgtgctccaggaggactctgtgactctgacatgccagggggctcgcagccctgagagcgactccattcagtggttccacaatgggaatctcattcccacccacacgcagcccagctacaggttcaaggccaacaacaatgacagcggggagtacacgtgccagactggccagaccagcctcagcgaccctgtgcatctgactgtgctttccgaatggctggtgctccagacccctcacctggagttccaggagggagaaaccatcatgctgaggtgccacagctggaaggacaagcctctggtcaaggtcacattcttccagaatggaaaatcccagaaattctcccgtttggatcccaccttctccatcccacaagcaaaccacagtcacagtggtgattaccactgcacaggaaacataggctacacgctgttctcatccaagcctgtgaccatcactgtccaagtgcccagcatgggcagctcttcaccaatggggatcattgtggctgtggtcattgcgactgctgtagcagccattgttgctgctgtagtggccttgatctactgcaggaaaaagcggatttcagccaattccactgatcctgtgaaggctgcccaatttgagccacctggacgtcaaatgattgccatcagaaagagacaacttgaagaaaccaacaatgactatgaaacagctgacggcggctacatgactctgaaccccagggcacctactgacgatgataaaaacatctacctgactcttcctcccaacgaccatgtcaacagtaataactaaagagtaacgttatgccatgtggtcatactctcagcttgctgagtggatgacaaaaagaggggaattgttaaaggaaaatttaaatggagactggaaaaatcctgagcaaacaaaaccacctggcccttagaaatagctttaactttgcttaaactacaaacacaagcaaaacttcacggggtcatactacatacaagcataagcaaaacttaacttggatcatttctggtaaatgcttatgttagaaataagacaaccccagccaatcacaagcagcctactaacatataattaggtgactagggactttctaagaagatacctacccccaaaaaacaattatgtaattgaaaaccaaccgattgcctttattttgcttccacattttcccaataaatacttgcctgtgacattttgccactggaacactaaacttcatgaattgcgcctcagatttttcctttaacatcttttttttttttgacagagtctcaatctgttacccaggctggagtgcagtggtgctatcttggctcactgcaaacccgcctcccaggtttaagcgattctcatgcctcagcctcccagtagctgggattagaggcatgtgccatcatacccagctaatttttgtattttttattttttttttttagtagagacagggtttcgcaatgttggccaggccgatctcgaacttctggcctctagcgatctgcccgcctcggcctcccaaagtgctgggatgaccagcatcagccccaatgtccagcctctttaacatcttctttcctatgccctctctgtggatccctactgctggtttctgccttctccatgctgagaacaaaatcacctattcactgcttatgcagtcggaagctccagaagaacaaagagcccaattaccagaaccacatgccactggatgggggcatgagggcatgccactggatgagggcatgagggcatgccactggatgagggcatgggggcatgccactggatgagggcatggggtaccga

SEQ ID NO: 61340 - DNA, 1802 bp, Homo sapiens
gtctcttaaaacccactggacgttggcacagtgctgggatgactatggagacccaaatgtctcagaatgtatgtcccagaaacctgtggctgcttcaaccattgacagttttgctgctgctggcttctgcagacagtcaagctgcagctcccccaaaggctgtgctgaaacttgagcccccgtggatcaacgtgctccaggaggactctgtgactctgacatgccagggggctcgcagccctgagagcgactccattcagtggttccacaatgggaatctcattcccacccacacgcagcccagctacaggttcaaggccaacaacaatgacagcggggagtacacgtgccagactggccagaccagcctcagcgaccctgtgcatctgactgtgctttccgaatggctggtgctccagacccctcacctggagttccaggagggagaaaccatcatgctgaggtgccacagctggaaggacaagcctctggtcaaggtcacattcttccagaatggaaaatcccagaaattctcccgtttggatcccaccttctccatcccacaagcaaaccacagtcacagtggtgattaccactgcacaggaaacataggctacacgctgttctcatccaagcctgtgaccatcactgtccaagtgcccagcatgggcagctcttcaccaatggggatcattgtggctgtggtcattgcgactgctgtagcagccattgttgctgctgtagtggccttgatctactgcaggaaaaagcggatttcagccaattccactgatcctgtgaaggctgcccaatttgagccacctggacgtcaaatgattgccatcagaaagagacaacttgaagaaaccaacaatgactatgaaacagctgacggcggctacatgactctgaaccccagggcacctactgacgatgataaaaacatctacctgactcttcctcccaacgaccatgtcaacagtaataactaaagagtaacgttatgccatgtggtcatactctcagcttgctgagtggatgacaaaaagaggggaattgttaaaggaaaatttaaatggagactggaaaaatcctgagcaaacaaaaccacctggcccttagaaatagctttaactttgcttaaactacaaacacaagcaaaacttcacggggtcatactacatacaagcataagcaaaacttaacttggatcatttctggtaaatgcttatgttagaaataagacaaccccagccaatcacaagcagcctactaacatataattaggtgactagggactttctaagaagatacctacccccaaaaaacaattatgtaattgaaatggtcgccaatccgcggattggcgaccatttcaaaccttcagtagaggaaggaggaagagtagcatttaaaatgtacactaggactggttaggttgcttttcctagttagcactgatcttagaaagaaggttggtaggcatattccaactgccacagcacccttcctgtttcaaatgtggcaggttattcattttgtgtgcagtttgtctcctccaatgattagacgaaagagttttctgaccatcattcaaaaggaatgtgagaagttaatgaatcctagaggaaagcggctgagaaaaggcatctggcatttggttgagagcctctctatgtggtgctagtcaaactacttttacatggagcctgaattcaggacagaaaacactgctccttctcctcgctctcagttgttgggaaagcatggttacattgaaatgtcccaatccggggatcctt

SEQ ID NO: 61341 - DNA, 2276 bp, Homo sapiens
gtctcttaaaacccactggacgttggcacagtgctgggatgactatggagacccaaatgtctcagaatgtatgtcccagaaacctgtggctgcttcaaccattgacagttttgctgctgctggcttctgcagacagtcaagctgcagctcccccaaaggctgtgctgaaacttgagcccccgtggatcaacgtgctccaggaggactctgtgactctgacatgccagggggctcgcagccctgagagcgactccattcagtggttccacaatgggaatctcattcccacccacacgcagcccagctacaggttcaaggccaacaacaatgacagcggggagtacacgtgccagactggccagaccagcctcagcgaccctgtgcatctgactgtgctttccgaatggctggtgctccagacccctcacctggagttccaggagggagaaaccatcatgctgaggtgccacagctggaaggacaagcctctggtcaaggtcacattcttccagaatggaaaatcccagaaattctcccgtttggatcccaccttctccatcccacaagcaaaccacagtcacagtggtgattaccactgcacaggaaacataggctacacgctgttctcatccaagcctgtgaccatcactgtccaagtgcccagcatgggcagctcttcaccaatggggatcattgtggctgtggtcattgcgactgctgtagcagccattgttgctgctgtagtggccttgatctactgcaggaaaaagcggatttcagccaattccactgatcctgtgaaggctgcccaatttgagccacctggacgtcaaatgattgccatcagaaagagacaacttgaagaaaccaacaatgactatgaaacagctgacggcggctacatgactctgaaccccagggcacctactgacgatgataaaaacatctacctgactcttcctcccaacgaccatgtcggctgtattgattggggtgtagactgaactatccggggtctgtttcttttcggtgatgaaagtcttgagaagcaaataaagcattcactttgttttggaacacaagttctcagaaaggcaaactttaggtgaatcgtcagtggagactgctgacttcctgcactgctattttcccagtgcagttaccagaaggatgtgaccttctcagagaagtcattccaggcagattagaaacatgacccacagtctccttgatggtttgtacagctgatctctcaagcagcaatctctaccagctgtcactggtgctctcggagagaggattaaccaagaaacccagcccaggaacagtactgacctctacttctggactcctgcctccctcttaaaaagtcccttgaacttcctagtgggttctaacctgtcaaaggagaaaatagccacctatggagtaagggtttttagtttctctttttacaaatggaagtttcctttgaatcaggcaagtaacgttaaatagaagccaacttttaagtttctccttataacacactgctaaattataacaccagactataccacatactctccagctgccagctattgcagttgccatccttgttactatagtggtaagtatctctgcctgtcatgcatgagagagggggtcgattccctgacagggaggttacggaaaattgtgtggggattttgtcaaccttcaaaagtctcagaaatgtctccttgttttggctttcagcggaaatccgaacaccagaagatctgaatggaatgttctggattgaagaaagtgggaaatggcctcaattcacaaagtcacagcctgatagaaaccagtgtgactttactgcccagtgaacccatctcgtcctccagcctttaggaggtaggttggactggagcctgcagtagtttactctccacctgagtcctggtctccggctgggaacccacttaggccatagagaaaaacgcacactgtgcctctccaccgggcctctggagacgaggctcctcggggatacaaacagtggggagaacatgagggacatcctgaccgtacactgcgtcctcctttcccaggtgttgcgttctctcttgggttgagtggcgaggtctctcccgagtcccagggccacagtgcaatgtcacatctcctttgtggaaagtgactggtaaaagagaacaaaactggaggaacctaaagtcttcggccacctggtttaatttattcaagagtgattaatcctagatgagaaaaagaattgaaatggatcg

SEQ ID NO: 61342 - DNA, 1119 bp, Homo sapiens
gtctcttaaaacccactggacgttggcacagtgctgggatgactatggagacccaaatgtctcagaatgtatgtcccagaaacctgtggctgcttcaaccattgacagttttgctgctgctggcttctgcagacagtcaagctgcagctcccccaaaggctgtgctgaaacttgagcccccgtggatcaacgtgctccaggaggactctgtgactctgacatgccagggggctcgcagccctgagagcgactccattcagtggttccacaatgggaatctcattcccacccacacgcagcccagctacaggttcaaggccaacaacaatgacagcggggagtacacgtgccagactggccagaccagcctcagcgaccctgtgcatctgactgtgctttccgaatggctggtgctccagacccctcacctggagttccaggagggagaaaccatcatgctgaggtgccacagctggaaggacaagcctctggtcaaggtcacattcttccagaatggaaaatcccagaaattctcccgtttggatcccaccttctccatcccacaagcaaaccacagtcacagtggtgattaccactgcacaggaaacataggctacacgctgttctcatccaagcctgtgaccatcactgtccaagtgcccagcatgggcagctcttcaccaatggggatcattgtggctgtggtcattgcgactgctgtagcagccattgttgctgctgtagtggccttgatctactgcaggaaaaagcggatttcagccaattccactgatcctgtgaaggctgcccaatttgagccacctggacgtcaaatgattgccatcagaaagagacaacttgaagaaaccaacaatgactatgaaacagctgacggcggctacatgactctgaaccccagggcacctactgacgatgataaaaacatctacctgactcttcctcccaacgaccatgtcaacagtaataactaaagagtaacgttatgccatgtggtcatactctcagcttgctgagtggatgacaaaaagaggggaattgttaaaggcccatgtatatgtgtactggctgtattcctgcgcacaccgggccacctggccg

SEQ ID NO: 61343 - DNA, 613 bp, Homo sapiens
tgtcccaaccacaaaaaattatattagttagggattctttaatttgttttgtactgaatactactttgaaacataagttaaagccattagctgtgtttttgtagggatggtgggaaggaataaaaaataaatgtattaacataaaacatactaaaacagaaatatggcaaaatgatgtaaaaagatttttcctactattctgagggctgttgaaatcccaggctattgctatatctccattgacaaagtgggataaaaaatgcctttgtcaaataattttttttctttctttaaattttagttatttattttaataatttgtccccttttatttttcttatctaggtatgtgtagcattctacaaggcatgctgggtaaaatatactatgcaaatgtgtacagtgctgcatgttttgttctccctctgctttagtggctttaaagaaaaaaacgtggtgttatttttgtgaataaaaacattaacaaagaaaatgcagagtgcatgcatagagtatcctcatttctatggatttgttttatggaatttaaatgtgtacaaaacaactgcattactttttttcttttatataataaatgaaaaaaacactgaaa

SEQ ID NO: 61344 - DNA, 232 bp, Homo sapiens
ttgatggattttttttttacattaaaatttccatccccctagagtttgatttcattgtatgaggtatggttgtcatcttattttccaaatggctagtgtgtgtctgggtaccctgtattgcttgctcatgatcttcaggtaccttttgagacttaaatattttgactccatcttgccctgacagtgtttaggtctcatcagtgattatgataatgatgatgaaggcctgtct

SEQ ID NO: 61345 - DNA, 487 bp, Homo sapiens
gctaagatcattgacgaaggtggcctcactaaacaacagattttcagtgtgcattaaacagtcttgtattggaagaagacaccatctaggacttctatagctagagaggagaagtcagtgcctggcaagctgaagccagtgctcatttaccatttggaatatcctagggcccttaagaataatgttaaatttgcgcttgccttggcagcctatatactaagaatgatgttaaatttattctggctgtgtgcagtggctcacacctgtaatcccagcactttgggagtacgaggtgggcagattagttgagctcaggagtttgagaccactctgggcaacttggcaaaagcccatctctacaaaaaatagccaggtgtggtggcttgcgcctgtagaacacacctcccaggttcaagtgattcttgtgccttagcctcccgaataactgggattacagaggtgtgccaacatgtcctgctagtttttg

SEQ ID NO: 61346 - DNA, 117 bp, Homo sapiens
aggtgagctatttttaaatttctctgatgtacctgtctagaaaaggttgctttggaataagttcagttgaattttagaactcagagaacaaaggttttcatctcaatcatctcaaga

SEQ ID NO: 61347 - DNA, 778 bp, Homo sapiens
taataacatgagtccccaagctcctctggctgtgggaccacagatgagtctttcagaggcaggatccatttttgcagatagctatgacttgtggcaatcaggcttcgtagcttggggaggtagagttacttgacatgtatcatgtaataacagcctttgagacttggcacaactgtggtgctgagaatgaaaatctaaatgattgaagttttaagtccaagtaggagttggtttgttttgccttgtttaaaaattgctgttagtcacagagtttgcaatctctggataccttcaaatcctagctctcactgtgggattcttgatctcagaggtgtttatttttcacagtcagcataggcttgcgccactgactcctccttcagtcggctttgcccaaaacaaattttagtattactggtattaagtttagtccagtggaattagaaggataattcaatagcaacagaaatataaattatattccattcccagagagagaatgcgctttggattgtttagtcctctgattaacgagtattttctcttcctgccaagaactaggtgaatcaggaattgattgcatatgcaagccctggccacagctgcacttacaggatgcctcatagacgatgaggggtctgaaaggccaacccgaggctggcagatctgaccccaaggaggtcctgctgcaaaccccctgagcctttgccattcactacttaccaaagtttgtttctggaggattttcctgtagctttgatagtttaaaaaaaaaaaa

SEQ ID NO: 61348 - DNA, 626 bp, Homo sapiens
tggaatctacggataacatcaggttctaagtcgtaagtagatttttaactactaggtttaggccaggcaggcccagggctggtttcaggcctggtgccgggctgcctgtctttgatttcacttccttgtttttttcttaaaacaggtactgagtataaaacaatataatacaatatgagaaggtctctctcttccctcaagagtgtatgactttgctgcccaggatgatcttgaaccccgggcctcaagctattaatttcttccccacttcagcctcccaaagtgctgggattacaagcctgagccactaagccgagccaagcctagtcttttttttctgaatagcactaatacctcaaaaaagacccctaaattctcagaaaagtaactattttattctcaaacatctgttgtatttttgaatagcagtagaaattctacttcaacgataaaattctttgtgttaaggcccaatttataaagcttaattttggcagtatttaaaaacaaaattcccgtagatcattattgacaggtgcattccttggagtgtgaaacctctgaaaaaaatagaaaatgtccagcttggctttatatcttggagattgcatttgttgctgctaaat

SEQ ID NO: 61349 - DNA, 486 bp, Homo sapiens
ggtcaaaatagattttggaaaacttgaaaccttttggaacctgggtagcttgaaaaaacaaaacgacagggtctccctatgttgcccaggctgatctcgaactcctgggctcaagttacactccccacttcagcctcccaaagtgctgggattacaagcctgagccactaagccgagccaagcctagtcttttttttctgaatagcactaatacctcaaaaaagacccctaaattctcagaaaagtaactattttattctcaaacatctgttgtatttttgaatagcagtagaaattctacttcaacgataaaattctttgtgttaaggcccaatttataaagcttaattttggcagtatttaaaaacaaaattcccgtagatcattattgacaggtgcattccttggagtgtgaaacctctgaaaaaaatagaaaatgtccagcttggctttatatcttggagattgcatttgttgctgctaaat

SEQ ID NO: 61350 - DNA, 601 bp, Homo sapiens
tttccctgatgactaatgatattgagcaccttctcatgtgcttattagccatttacttatttttgtgaattttatgttcaagtcttttgtccattctttaataatttttaatatttcatgatgaaaattccaaatatgcacaaccgaagagagtacgacagagccttacgtgactcttaccttgactctgtactgtagtttttcatcattccttcgtcacttgcaaattcaagtatttttcccagccattaattgagtttttgaagatgaggaattttttattttggtgaagtccagcttatgaactttttctcttacatgtagcactttctctgtccagaccgatgttatatcctgagaacctcttcacctaggaaacctaccacatatcagactcagcgtgtccataacttatcttacctcaaatccattcttcttccagtaatattacataaaggctacttgggagtgtagattctgggaaacctgaatctatgttcccgggctgcagtcttcaagcttggcccagatgaactctctatttatactaaaaatatgtaaataaataaaaataaaaagaaataaatgctactatatcggt

SEQ ID NO: 61351 - DNA, 465 bp, Homo sapiens
tgagttatactccccaaatctcaacacaatgaaatgttaggtagaagctgaaataatacaaaagtatttggcagtgtaatcattcctactgagtagatttagatcccttcagaatcatagaaccataattgaatccgtggatcgttttgaacctaagattctgtctgcatgaaacatttctttcgcattttgtcatataatgcacaagcagtttgtggaactaaggctaagtgactaataaatatatggaaaattaaataatgcaaatccatatggaaatgcctatcctccctctttgtttctgtactctgaaaatagagagtttgtctatccagacagaaattttagactgacgaaaattggaaatgactgtggttctcaaacttgaccacgtggccaccaaccagaagttacccggagggatcctataggtgctctggaatcttctctcctgtaacctaaaat

SEQ ID NO: 61352 - DNA, 411 bp, Homo sapiens
ctctttctttatttccctaatacctttccaaaggtgtcacccactatgagccaatgtggataatgctaacaatgataaaaaatggtaaccaccaaaagtattaaattaatagaggctatcactgtttgaaagttttttgtcattgccaggtaacatgccaagtgtcttactcattttaatcctcataataatactttgatgttatcattattatcctgatacggtttatatgtttgttccctccaaatctcatgttaaaatataatctccagtgttggggtgttgggaggtggggcctagtgggaagtgtttgggtcatgggtgtggatccctcatgaatagatgaatgcccttcctcgtgggtagataagtgaggtctagctctttcaggtcccacaagagcttggttgt

SEQ ID NO: 61353 - DNA, 520 bp, Homo sapiens
ccccccttaaattttaaaaaaggcaacaataccaaaatccctttcataagtgcgaatcccccaccctattgatatttattaaaaaaaaactaaagggtttaagaaaattttttaaagcctttttttttttgtctaggtagtcagtctgcacttaaatatcaatcattttccttttttgcttcttcccttaaaatttatatgtatccagtacatttaattgagaagcgtatgttttttattatgctgtattttctttttattttttaattattgtttatattttcaattcaaaaatgtacaaaataaagttacattgctggtcttgtaagagctatacagttttcctaaatgtatacctgtaactgcagcagttcacctatttcaaaaatttggaattctgttcatttgttattcttaagaccacctcaaatttaaaggctaccttattgtacgtttaaagtgtattataacagtgtggtagttaataaaacactatttttttttcttttgaaaaaaataa

SEQ ID NO: 61354 - DNA, 1746 bp, Homo sapiens
acacatacaggtgagaagaaatttgtttgttcagaatgttcaaaatgctttgtgagaagtgaccatcttgccgaacatactaaaacacagcagaataaaaaaggtattcactctagcagtacggtgctggcatctgtggaagctgcgcgagatgatactttgattactgcaggaggaacaacgcttatccttgcaaatattcaacaaggttctgtttcagggataggaactgttaatacttccgccaccagcaatcaagatatccttaccaacactgaaatacctttacagcttgtcacagtttctggaaatgagacaatggagtaaatattacacaaatacttattcattgtggttatttttatacagtagtgagaagaatattgttcctaagttcttagatatctttttattgatgtgcaaaaatttttggattgacagtaacttggttatacatgacactgaaatgccttactttgtatgatattccatagtatattaaaaatggtaaaattgcatgggttttgtaggtacttttggaatctagaagaaatgaaattttaccaagttatataaagagaaaattgaatttaacaatgcgaatggtagtctaaccaaatgcatcaatcctgtgtggtttagtgtaaaaatgagaacatgttggtatttatctattgtaagataaaaaagctggtgggtgaaagaaatcatgttatgataaaaaattttgtaattttcttgatgactggaatttttattatgcataactgacaaatcaagtttccaagcaaatgttacatagtgtaggctttacttagcttatcaatttgtcattttgaagctaattattttaattaggttaactatgtacaatattttaagcattactcttgtaagattttgaaaactacattttaacatggaactctagggatagtcaccttttaaatcctgttgaaaagccatgtttaagatttaatttgccaaaataatgtcttgttaatattctttcaataacgaagttgggcaatataaccaatgtttaacaaaagtttaaaatgtataagttgaggcatttgggtggtaagagaatgttatagtgaattatcccttttcttgactattggaggaccaaaacaataaggtgtattgcgtcttagcagtgatttttatccaatcttgtttccaaaaaccatagtctgccaggccttaaagccatcatgtaaattaccagtatatgtaacatatgcaaacattaccaaatcacttccatagtgacgatactccaaccatatggatattagtcatagaagaactagaggttttatgatatttttttaagtcctttttttttttgtctaggtagtcagtctgcacttaaatatcaatcattttccttttttgcttcttcccttaaaatttatatgtatccagtacatttaattgagaagcgtatgttttttattatgctgtattttctttttattttttaattattgtttatattttcaattcaaaaatgtacaaaataaagttacattgctggtcttgtaagagctatacagttttcctaaatgtatacctgtaactgcagcagttcacctatttcaaaaatttggaattctgttcatttgttattcttaagaccacctcaaatttaaaggctaccttattgtacgtttaaagtgtattataacagtgtggtagttaataaaacactatttttttttcttttgaaaaaaataa

SEQ ID NO: 61355 - DNA, 1036 bp, Homo sapiens
ctggcagcggagcccgcgcagggtttgccaggcgaaggcggagcgctaacgtctaacgctaacggcggtcgtgccccgccgctgctgtcacccccggccgctgctgccctccccgccgaggttctactgctctccttcttaagaagggtgggaggcactcggtctctccccacacctctcgcctgaggccaggcgccaggtgtcgcctgaagccagacagccggtttgggagcgagcctgaggtcaaccaatcaatggctcagacagataagccaacatgcatcccgccggagctgccgaaaatgctgaaggagtttgccaaagccgccattcgggcgcagccgcaggacctcatccagtggggggccgattattttgaggccctgtcccgtggagagacgcctccggtgagagagcggtctgagcgagtcgctttgtgtaactgggcagagctaacacctgagctgttaaagatcctgcattctcaggttgctggcagactgatcatccgtgcagaggagctggcccagatgtggaaagtggtgaatctcccaacagatctgtttaatagtgtgatgaatgtgggtcgcttcacggaggagatcgagtggctgaagtttttagcccttgcttgcagcgctctgggagttactattaccaaaactctcaagatagtgtgtgaggtcttatcatgtgaccacaatggtgggttgccccgaatcccattcagcaccttccagtttctctacacgtatattgccgaagtggatggggagatctgtgcatcacatgtcagcaggatgctaaactacattgaacaggaagtaattggtcctgatggtttaatcacggtgaatgactttacccaaaaccccagggtttggctggagtaacagcacaattttggcaattttaaaggaagatacagaggtgattgtacttcagaatgataaacccatataccacctaaaatcaattttcttgtacaactggtacacactaataaacaaacatgtgagatcagaaaaaaacggaa

SEQ ID NO: 61356 - DNA, 456 bp, Homo sapiens
ctggcagcggagcccgcgcagggtttgccaggcgaaggcggagcgctaacgtctaacgctaacggcggtcgtgccccgccgctgctgtcacccccggccgctgctgccctccccgccgaggttctactgctctccttcttaagaagggtgggaggcactcggtctctccccacacctctcgcctgaggccaggcgccaggtgtcgcctgaagccagacagccggtttgggagcgagcctgaggtcaaccaatcaatggctcagacagataagccaacatgcatcccgccggagctgccgaaaatgctgaaggagtttgccaaagccgccattcgggcgcagccgcaggacctcatccagtggggggccgagtacgtgctcctttctcgccttcatctcttggaggacgggcggggagagagggtcctgtaaaaccgcggaggttgtcatggctgca

SEQ ID NO: 61357 - DNA, 377 bp, Homo sapiens
cgggcaaggatgggatgcctcccctaagcgagccagattgagcagtaggacgccaggtcaataggccgtgtcctggggcaagcagcaagttagatgaccgcgtcacaccagcgtatgcacacccacctcctccctgcacgccttttcccactctcggtggaaagaagggctgggaatctccgcagcttaatctgcctttcttcattctcctgtctcaccactagatggcagcagtgcagccgggggagggaagcgacagccctgggtggatggggtgggaccagtcctgctagttcactcctttaaggagacacttcctcccctgctgttaaaactcatacttggacccaaccaaagaggctttgtatctttgagga

SEQ ID NO: 61358 - DNA, 1082 bp, Homo sapiens
ctggcagcggagcccgcgcagggtttgccaggcgaaggcggagcgctaacgtctaacgctaacggcggtcgtgccccgccgctgctgtcacccccggccgctgctgccctccccgccgaggttctactgctctccttcttaagaagggtgggaggcactcggtctctccccacacctctcgcctgaggccaggcgccaggtgtcgcctgaagccagacagccggtttgggagcgagcctgagcaatttatctcaaagcttcaagttcctgccatctacatgtgcccaggtcaaccaatcaatggctcagacagataagccaacatgcatcccgccggagctgccgaaaatgctgaaggagtttgccaaagccgccattcgggcgcagccgcaggacctcatccagtggggggccgattattttgaggccctgtcccgtggagagacgcctccggtgagagagcggtctgagcgagtcgctttgtgtaactgggcagagctaacacctgagctgttaaagatcctgcattctcaggttgctggcagactgatcatccgtgcagaggagctggcccagatgtggaaagtggtgaatctcccaacagatctgtttaatagtgtgatgaatgtgggtcgcttcacggaggagatcgagtggctgaagtttttagcccttgcttgcagcgctctgggagttactattaccaaaactctcaagatagtgtgtgaggtcttatcatgtgaccacaatggtgggttgccccgaatcccattcagcaccttccagtttctctacacgtatattgccgaagtggatggggagatctgtgcatcacatgtcagcaggatgctaaactacattgaacaggaagtaattggtcctgatggtttaatcacggtgaatgactttacccaaaaccccagggtttggctggagtaacagcacaattttggcaattttaaaggaagatacagaggtgattgtacttcagaatgataaacccatataccacctaaaatcaattttcttgtacaactggtacacactaataaacaaacatgtgagatcagaaaaaaacggaa

SEQ ID NO: 61359 - DNA, 1284 bp, Homo sapiens
ctggcagcggagcccgcgcagggtttgccaggcgaaggcggagcgctaacgtctaacgctaacggcggtcgtgccccgccgctgctgtcacccccggccgctgctgccctccccgccgaggttctactgctctccttcttaagaagggtgggaggcactcggtctctccccacacctctcgcctgaggccaggcgccaggtgtcgcctgaagccagacagccggtttgggagcgagcctgagggcaaggggaaggcaaggggatcttcaagagaatgtgactgtgggggattatggctttctggccaatttgttacctattgaacactaagttccaggcactgggctaggcactgggatggtgtggtgagcaaaaactgaccagtcctgccgtggagtttgctgggggagacacatgttactcaaagaatcacactaaggatagcaatttatctcaaagcttcaagttcctgccatctacatgtgcccaggtcaaccaatcaatggctcagacagataagccaacatgcatcccgccggagctgccgaaaatgctgaaggagtttgccaaagccgccattcgggcgcagccgcaggacctcatccagtggggggccgattattttgaggccctgtcccgtggagagacgcctccggtgagagagcggtctgagcgagtcgctttgtgtaactgggcagagctaacacctgagctgttaaagatcctgcattctcaggttgctggcagactgatcatccgtgcagaggagctggcccagatgtggaaagtggtgaatctcccaacagatctgtttaatagtgtgatgaatgtgggtcgcttcacggaggagatcgagtggctgaagtttttagcccttgcttgcagcgctctgggagttactattaccaaaactctcaagatagtgtgtgaggtcttatcatgtgaccacaatggtgggttgccccgaatcccattcagcaccttccagtttctctacacgtatattgccgaagtggatggggagatctgtgcatcacatgtcagcaggatgctaaactacattgaacaggaagtaattggtcctgatggtttaatcacggtgaatgactttacccaaaaccccagggtttggctggagtaacagcacaattttggcaattttaaaggaagatacagaggtgattgtacttcagaatgataaacccatataccacctaaaatcaattttcttgtacaactggtacacactaataaacaaacatgtgagatcagaaaaaaacggaa

SEQ ID NO: 61360 - DNA, 842 bp, Homo sapiens
atatacttttgagtaaataagctgttttgcataatcttatttttttgttttacaaacatatatatttatactgaaaaattctggaaggagacatccaatattttagggtgataccattagggatttttttgttgacttccactttttaaataaaaaaggactgtgtaatttttacgtaaaggatataactatttacaacaaaaagtaggggttagcagacggctttctaaccttgccgttgtgtaacaatagaatgcatttgtcttgcggagtccccaaaattgagtgtcaaacagaggctgggtgacctcctgtccaggattgctctcatcttatgagtccaagttttcatcttatgtattttttctcctgagaatagtcaaccaatcaatggctcagacagataagccaacatgcatcccgccggagctgccgaaaatgctgaaggagtttgccaaagccgccattcgggcgcagccgcaggacctcatccagtggggggccgagtacgtgctcctttctcgccttcatctcttggaggacgggcggggagagagggtcctgtaaaaccgcggaggttgtcatggctgcagccagggggtcgggactaactggcatcgtctttgttttagctcttgcattgctttgatgctttaaaatccacacataaatactacatctagccgggcaaggatgggatgcctcccctaagcgagccagattgagcagtaggacgccaggtcaataggccgtgtcctggggcaagcagcaagttagatgaccgcgtcacaccagcgtatgcacacccacctcctccctgcacgccttttcccactctcggt

SEQ ID NO: 61361 - DNA, 1158 bp, Homo sapiens
agcggggcattctggcgcggagcggagcgcgcggcggtcgcagctagcgggtcggccgcggaccggacgtgcagctcggattggtgggaggcactcggtctctccccacacctctcgcctgaggccaggcgccaggtgtcgcctgaagccagacagccggtttgggagcgagcctgaggtcaaccaatcaatggctcagacagataagccaacatgcatcccgccggagctgccgaaaatgctgaaggagtttgccaaagccgccattcgggcgcagccgcaggacctcatccagtggggggccgattattttgaggccctgtcccgtggagagacgcctccggtgagagagcggtctgagcgagtcgctttgtgtaactgggcagagctaacacctgagctgttaaagatcctgcattctcagcatgctcttcactaggatttgcaaaggtaactgccacacagagccatctttaccttcctaacaccccctcccgccccttgccatgtgctgggagatgtggacctggcctggggacagggtgtttctcagggccttgtctcaacttctcccacaacctctgtgttgtgtctgtcccctgccctgcaggttgctggcagactgatcatccgtgcagaggagctggcccagatgtggaaagtggtgaatctcccaacagatctgtttaatagtgtgatgaatgtgggtcgcttcacggaggagatcgagtggctgaagtttttagcccttgcttgcagcgctctgggagttactattaccaaaactctcaagatagtgtgtgaggtcttatcatgtgaccacaatggtgggttgccccgaatcccattcagcaccttccagtttctctacacgtatattgccgaagtggatggggagatctgtgcatcacatgtcagcaggatgctaaactacattgaacaggaagtaattggtcctgatggtttaatcacggtgaatgactttacccaaaaccccagggtttggctggagtaacagcacaattttggcaattttaaaggaagatacagaggtgattgtacttcagaatgataaacccatataccacctaaaatcaattttcttgtacaactggtacacactaataaacaaacatgtgagatcagaaaaaaacggaa

SEQ ID NO: 61362 - DNA, 1195 bp, Homo sapiens
ctggcagcggagcccgcgcagggtttgccaggcgaaggcggagcgctaacgtctaacgctaacggcggtcgtgccccgccgctgctgtcacccccggccgctgctgccctccccgccgaggttctactgctctccttcttaagaagggtgggaggcactcggtctctccccacacctctcgcctgaggccaggcgccaggtgtcgcctgaagccagacagccggtttgggagcgagcctgagttccaggcactgggctaggcactgggatggtgtggtgagcaaaaactgaccagtcctgccgtggagtttgctgggggagacacatgttactcaaagaatcacactaaggatagcaatttatctcaaagcttcaagttcctgccatctacatgtgcccaggtcaaccaatcaatggctcagacagataagccaacatgcatcccgccggagctgccgaaaatgctgaaggagtttgccaaagccgccattcgggcgcagccgcaggacctcatccagtggggggccgattattttgaggccctgtcccgtggagagacgcctccggtgagagagcggtctgagcgagtcgctttgtgtaactgggcagagctaacacctgagctgttaaagatcctgcattctcaggttgctggcagactgatcatccgtgcagaggagctggcccagatgtggaaagtggtgaatctcccaacagatctgtttaatagtgtgatgaatgtgggtcgcttcacggaggagatcgagtggctgaagtttttagcccttgcttgcagcgctctgggagttactattaccaaaactctcaagatagtgtgtgaggtcttatcatgtgaccacaatggtgggttgccccgaatcccattcagcaccttccagtttctctacacgtatattgccgaagtggatggggagatctgtgcatcacatgtcagcaggatgctaaactacattgaacaggaagtaattggtcctgatggtttaatcacggtgaatgactttacccaaaaccccagggtttggctggagtaacagcacaattttggcaattttaaaggaagatacagaggtgattgtacttcagaatgataaacccatataccacctaaaatcaattttcttgtacaactggtacacactaataaacaaacatgtgagatcagaaaaaaacggaa

SEQ ID NO: 61363 - DNA, 452 bp, Homo sapiens
cttaaaatatgtgaaagacataaatattagaaatgaggatttaaagttggttttctaatagcttctgaaagaaagtggtatgttgattaatgaaattctaacatggtaataatcacatagacgcataacctttaaaaaaatgtacacaaattggatcataccatagatattgtcctgctccttatgtttttcacttaatcgtgcatcttgatgttcttttatgtcagcacctgatgcagagatcgttggtacatttcatggctgtattgtgttcattgtaatttatttaccgattttcatgtcagaggacatttcttggcacttctcctttctgctaccgtgtgaagaaggacatgtttgcttcttcttccaccgtgattgtaagtctcctgaggcttccccagccctgtggaactgcaagtcaataaaaactctttcctttacaaattacc

SEQ ID NO: 61364 - DNA, 266 bp, Homo sapiens
ggacacagagagagggcaagagtggaaaatagaatgaggctcagaataccaagccttagtgccatccctatcatctgtctcactccatcactgggtgatcttgagcaagtttctttctttccgtcagcttatttcctcatctttaaggaaaatccatagtgcaagacattaaatttttttaaaaggctgaaatctcccatcagtgttagaagataataaggaagaaataaactgaaacttgcatgctctagaacttgtaaagggga

SEQ ID NO: 61365 - DNA, 998 bp, Homo sapiens
aggtgggggactaggagaggcaggtgctactagctccgcactactagttttgtgaccttgggcaagctagttaatctctgcaatggacctcatcatgaccgttgctgtacttacaatgaaaacaacttggtggatggccaccaagccatgcattattcaagcccatcttgagtgctggaccatcaataatggagagacatgatccttgctctcatggaacttatgctgtagtggaagacaacatgtaaacagctgcaatacagttaaatatttgctgtaatgaagttatatatgtagtgtaaaaagggacaggaaaaatctttaattcaaggaaatctttatgaggacgtagaacttgaacagaaatgtgaagccatctttttctcaggacatttgggaaagggaattcaaggcagccactttcatctctttaagttcataatttgctacttaacttcagatccagggaccaaaggcctgaattccagttgtgcctcaagatggtgctttccctcatttttgtagctcaagacgtacattcaactcaagagtccagctctacagcagctatatttggaaatacacatattttatgaattctaccaaatatctggctgggtagctgccctcgtcaggtggaacatgtaaccatcaaactgaagcatgaattggggattacagctgtaatgaatttccagactgaatgggatattgtacagaattcctcaggctgtaaccgctacccagagcccatgactccagacactatgattaaactatatagggaagaaggcttggcctacatctggatgccaacaccagatatgagcaccgaaggtaaggatcagaactgttctgcctccttgctgtatttcagagaaacccttgctgtctgtctgtctatctataatttaatatcttaaaaatgaatggtagaaatggaataaatataagattttagatttaatatatataatacatatgttttgacactgtgg

SEQ ID NO: 61366 - DNA, 917 bp, Homo sapiens
acctctaatttgttagcatttgaagtctattgatggatttttatcatgtggaaccatatatgcattcatggaataagtacaacttggtagacttattttaatatattgcttgatttggtttgcaaatgtccatttcctggcgttctagttaattgaaatacttgctttccccaaagcagcaacaccagtactttttctttcaataataacattggtgttcatattctaaaatatctagcttttcctgtgccagacttaaaggttagttatattttaatactacatgttttatgcagctccttaaacctcaaatcagaacaacactagtgatagttgtctccatatgttctcattagaattctaccaaatatctggctgggtagctgccctcgtcaggtggaacatgtaaccatcaaactgaagcatgaattggggattacagctgtaatgaatttccagactgaatgggatattgtacagaattcctcaggctgtaaccgctacccagagcccatgactccagacactatgattaaactatatagggaagaaggcttggcctacatctggatgccaacaccagatatgagcaccgaagatgagaagaggacagctgacatgtgctgctcggggatgtgggaagagactgcagattttggccttgggattctggattacttaaaacaaaagtaagacacaaatatctccctaaccttattatatctcgtagaagatggcagatgggtgacgactggtgcaagctcacacaggaaagaaaaatttcataagcattgaatagttgtgttactaattagtgggacaatcttcgtaactccttcttcccccacttctgcccaatatgtaataataggcatgctctgaataattgtactcaaataagaaattactcctccaaa

SEQ ID NO: 61367 - DNA, 3637 bp, Homo sapiens
tacagacaaagaacctgagacctgctagagtaagtgacttggttaagatagggagcgctccagagaccaggtccaagatcttcccccgtttcacaattagaaggcggctgtctagaggtcattcccttccttatgatcctcataaagttaatttccagtctcttggagagagaactggacgatcgcctggcttagaagttttcctccctccccgaaccccgttttctcttccatttcttccggtcgcgtgtccccagcgcccacaggtggaaatcaaccgcccgcggggttgcggggcacaaagaggcagctagcggctccgctgaccccttcccgccggcctggacgaagtctgggctcgggagccgcgtgatgcatcccaaagaaggcgcagaacagcacgtgttctccccggtgcccggggctcccacaccaccgcccaatcgctgcggccgcctagtgctcgggccgcgcctgccagccgcggggactccgggcccgggtattcgcgccgccgccgcccgccatgcgcttccgctttggggtggtggtgccacccgccgtggccggcgcccggccggagctgctggtggtggggtcgcggcccgagctggggcgttgggagccgcgcggtgccgtccgcctgaggccggccggcaccgcggcgggcgacggggccctggcgctgcaggagccgggcctgtggctcggggaggtggagctggcggccgaggaggcggcgcaggacggggcggagccgggccgcgtggacacgttctggtacaagttcctgaagcgggagccgggaggagagctctcctgggaaggcaatggacctcatcatgaccgttgctgtacttacaatgaaaacaacttggtggatggtgtgtattgtctcccaataggacactggattgaggccactgggcacaccaatgaaatgaagcacacaacagacttctattttaatattgcaggccaccaagccatgcattattcaagaattctaccaaatatctggctgggtagctgccctcgtcaggtggaacatgtaaccatcaaactgaagcatgaattggggattacagctgtaatgaatttccagactgaatgggatattgtacagaattcctcaggctgtaaccgctacccagagcccatgactccagacactatgattaaactatatagggaagaaggcttggcctacatctggatgccaacaccagatatgagcaccgaaggccgagtacagatgctgccccaggcggtgtgcctgctgcatgcgctgctggagaagggacacatcgtgtacgtgcactgcaacgctggggtgggccgctccaccgcggctgtctgcggctggctccagtatgtgatgggctggaatctgaggaaggtgcagtatttcctcatggccaagaggccggctgtctacattgacgaagaggccttggcccgggcacaagaagattttttccagaaatttgggaaggttcgttcttctgtgtgtagcctgtagctggtcagcctgcttctgccccctcctgatttccctaaggagcctgggatgatgttggtcaaatgacctagaaacaaggattctacctgaactgaaaggactgtgtgacctcccccaagccaaccactttcacctgggatgactttcgattatgctttgttttggggctgtatttttgaaatactctacaagaaagctgtggctcaacacatgagaagaagcacgaagcagttaggctgtacatcagacagaagggtaatgcgtgcagttcctgctgcctgcaggcagacgaggcctttgctttacagcactgtatgtgttgcacgatggatccgtgacagcactttcctgttgcactgaaactcttggccatgtagaggaaaagatatggagttatgtggatttcatcactagtatgtgtgcgtgagctggtcagttgccaaaggaggaaataaggttagaagcctgaaccgttacaaaagaagagctcactatggtcaaaaagtgatggctttcaggacttgttttttatcctgcctcacagttgttaaagtctgttccaaggcatcaccttccttctctacccaacaaccctgtgtaacaactaaagtagaattatctctcatttgttgttgtttttcctcaaaattaccaaacaaagcaaaaaatacccttgttttttatagttgagatgtcaagaagttaaattgaggcttaatgagcataggtagcttgtccaaggtctcatgaccagtcaagggcaagctggagttaataatctatatttatttgactcagcactgttttcatcacaacttgttttcccagcatcatgtagtgcatttagttttgtctttctcagggtatagtcaatatgcctgcaggagtttctatagcgagacatagaatagtattctgatcagttgccaaagaatctaggaaattagttgtattttgtgcaagctaatttaaaaacatgatgggctgttttaagaccagagtggaaattcatgagaggaactatactaccaaaagagcccaaatgaccaaatccatggataattgcttcacagccttggccatcctggctcagctctcaatttagtataatatgcagttcctgtgcctccagactatgcagctcatcaccctaggttctacaggaaatacagagatgaacaactttgccttcaaaaatgtgctgcctagaaacagacctgcattcaaccaactgtaatgcaggattggaccatgaatgatatgctagaatagaagaaagagaagtgtttttttaattgagagcctctatgtgcaaggtgatatataatcatatccagtttaatcttcacaatatccaatgaagaaggtctcattatctccatgataaagatggggaaactaaggtcagaagggttaactcaactgtctattgtcacatgatgaataaatagatgaagtgagatacaaagctgggtttgattcaaagcccttactttcctaattaaactatgatgcgtatttatttttctgcaccttcctttcttccacaaacacatattgatagatgcaagagactcttatttagaaggcgtgggggacaagaaggatacaaggtaagtttcagtggagctcagaggacggggagatagaactgtggcacttaggggagatgacatttgctttgggcagaggcagctagccaggacacatttccactataattttacaaagttaaatttataagctagcattaagtaaagtgaagtccagctcccttgctaaaaataactagaggtaataattggtattcaggtaactcatttacagtcataatgtgttgtgaaaatttaatcttaaaaattaaatttttaaactatgtgggtctgtgaatttctttaatgtctaagaaatccagcttcataatttccatgatacaaagatcttttttcaggtggatttttacctttgttccttttgctctgatagacaaaatcagtttaggactattaaagaatgttttggaataaactgtctttttcctcaatgaatgggatgtctaatgtatttcaaaatcacccaaaacttttggcaaataaaagcatttaaaaagaaatt

SEQ ID NO: 61368 - DNA, 3395 bp, Homo sapiens
tacagacaaagaacctgagacctgctagagtaagtgacttggttaagatagggagcgctccagagaccaggtccaagatcttcccccgtttcacaattagaaggcggctgtctagaggtcattcccttccttatgatcctcataaagttaatttccagtctcttggagagagaactggacgatcgcctggcttagaagttttcctccctccccgaaccccgttttctcttccatttcttccggtcgcgtgtccccagcgcccacaggtggaaatcaaccgcccgcggggttgcggggcacaaagaggcagctagcggctccgctgaccccttcccgccggcctggacgaagtctgggctcgggagccgcgtgatgcatcccaaagaaggcgcagaacagcacgtgttctccccggtgcccggggctcccacaccaccgcccaatcgctgcggccgcctagtgctcgggccgcgcctgccagccgcggggactccgggcccgggtattcgcgccgccgccgcccgccatgcgcttccgctttggggtggtggtgccacccgccgtggccggcgcccggccggagctgctggtggtggggtcgcggcccgagctggggcgttgggagccgcgcggtgccgtccgcctgaggccggccggcaccgcggcgggcgacggggccctggcgctgcaggagccgggcctgtggctcggggaggtggagctggcggccgaggaggcggcgcaggacggggcggagccgggccgcgtggacacgttctggtacaagttcctgaagcgggagccgggaggagagctctcctgggaaggcaatggacctcatcatgaccgttgctgtacttacaatgaaaacaacttggtggatggtgtgtattgtctcccaataggacactggattgaggccactgggcacaccaatgaaatgaagcacacaacagacttctattttaatattgcaggccaccaagccatgcattattcaaggccgagtacagatgctgccccaggcggtgtgcctgctgcatgcgctgctggagaagggacacatcgtgtacgtgcactgcaacgctggggtgggccgctccaccgcggctgtctgcggctggctccagtatgtgatgggctggaatctgaggaaggtgcagtatttcctcatggccaagaggccggctgtctacattgacgaagaggccttggcccgggcacaagaagattttttccagaaatttgggaaggttcgttcttctgtgtgtagcctgtagctggtcagcctgcttctgccccctcctgatttccctaaggagcctgggatgatgttggtcaaatgacctagaaacaaggattctacctgaactgaaaggactgtgtgacctcccccaagccaaccactttcacctgggatgactttcgattatgctttgttttggggctgtatttttgaaatactctacaagaaagctgtggctcaacacatgagaagaagcacgaagcagttaggctgtacatcagacagaagggtaatgcgtgcagttcctgctgcctgcaggcagacgaggcctttgctttacagcactgtatgtgttgcacgatggatccgtgacagcactttcctgttgcactgaaactcttggccatgtagaggaaaagatatggagttatgtggatttcatcactagtatgtgtgcgtgagctggtcagttgccaaaggaggaaataaggttagaagcctgaaccgttacaaaagaagagctcactatggtcaaaaagtgatggctttcaggacttgttttttatcctgcctcacagttgttaaagtctgttccaaggcatcaccttccttctctacccaacaaccctgtgtaacaactaaagtagaattatctctcatttgttgttgtttttcctcaaaattaccaaacaaagcaaaaaatacccttgttttttatagttgagatgtcaagaagttaaattgaggcttaatgagcataggtagcttgtccaaggtctcatgaccagtcaagggcaagctggagttaataatctatatttatttgactcagcactgttttcatcacaacttgttttcccagcatcatgtagtgcatttagttttgtctttctcagggtatagtcaatatgcctgcaggagtttctatagcgagacatagaatagtattctgatcagttgccaaagaatctaggaaattagttgtattttgtgcaagctaatttaaaaacatgatgggctgttttaagaccagagtggaaattcatgagaggaactatactaccaaaagagcccaaatgaccaaatccatggataattgcttcacagccttggccatcctggctcagctctcaatttagtataatatgcagttcctgtgcctccagactatgcagctcatcaccctaggttctacaggaaatacagagatgaacaactttgccttcaaaaatgtgctgcctagaaacagacctgcattcaaccaactgtaatgcaggattggaccatgaatgatatgctagaatagaagaaagagaagtgtttttttaattgagagcctctatgtgcaaggtgatatataatcatatccagtttaatcttcacaatatccaatgaagaaggtctcattatctccatgataaagatggggaaactaaggtcagaagggttaactcaactgtctattgtcacatgatgaataaatagatgaagtgagatacaaagctgggtttgattcaaagcccttactttcctaattaaactatgatgcgtatttatttttctgcaccttcctttcttccacaaacacatattgatagatgcaagagactcttatttagaaggcgtgggggacaagaaggatacaaggtaagtttcagtggagctcagaggacggggagatagaactgtggcacttaggggagatgacatttgctttgggcagaggcagctagccaggacacatttccactataattttacaaagttaaatttataagctagcattaagtaaagtgaagtccagctcccttgctaaaaataactagaggtaataattggtattcaggtaactcatttacagtcataatgtgttgtgaaaatttaatcttaaaaattaaatttttaaactatgtgggtctgtgaatttctttaatgtctaagaaatccagcttcataatttccatgatacaaagatcttttttcaggtggatttttacctttgttccttttgctctgatagacaaaatcagtttaggactattaaagaatgttttggaataaactgtctttttcctcaatgaatgggatgtctaatgtatttcaaaatcacccaaaacttttggcaaataaaagcatttaaaaagaaatt

SEQ ID NO: 61369 - DNA, 2685 bp, Homo sapiens
tacagacaaagaacctgagacctgctagagtaagtgacttggttaagatagggagcgctccagagaccaggtccaagatcttcccccgtttcacaattagaaggcggctgtctagaggcaatggacctcatcatgaccgttgctgtacttacaatgaaaacaacttggtggatggtgtgtattgtctcccaataggacactggattgaggccactgggcacaccaatgaaatgaagcacacaacagacttctattttaatattgcaggccaccaagccatgcattattcaaggccgagtacagatgctgccccaggcggtgtgcctgctgcatgcgctgctggagaagggacacatcgtgtacgtgcactgcaacgctggggtgggccgctccaccgcggctgtctgcggctggctccagtatgtgatgggctggaatctgaggaaggtgcagtatttcctcatggccaagaggccggctgtctacattgacgaagaggccttggcccgggcacaagaagattttttccagaaatttgggaaggttcgttcttctgtgtgtagcctgtagctggtcagcctgcttctgccccctcctgatttccctaaggagcctgggatgatgttggtcaaatgacctagaaacaaggattctacctgaactgaaaggactgtgtgacctcccccaagccaaccactttcacctgggatgactttcgattatgctttgttttggggctgtatttttgaaatactctacaagaaagctgtggctcaacacatgagaagaagcacgaagcagttaggctgtacatcagacagaagggtaatgcgtgcagttcctgctgcctgcaggcagacgaggcctttgctttacagcactgtatgtgttgcacgatggatccgtgacagcactttcctgttgcactgaaactcttggccatgtagaggaaaagatatggagttatgtggatttcatcactagtatgtgtgcgtgagctggtcagttgccaaaggaggaaataaggttagaagcctgaaccgttacaaaagaagagctcactatggtcaaaaagtgatggctttcaggacttgttttttatcctgcctcacagttgttaaagtctgttccaaggcatcaccttccttctctacccaacaaccctgtgtaacaactaaagtagaattatctctcatttgttgttgtttttcctcaaaattaccaaacaaagcaaaaaatacccttgttttttatagttgagatgtcaagaagttaaattgaggcttaatgagcataggtagcttgtccaaggtctcatgaccagtcaagggcaagctggagttaataatctatatttatttgactcagcactgttttcatcacaacttgttttcccagcatcatgtagtgcatttagttttgtctttctcagggtatagtcaatatgcctgcaggagtttctatagcgagacatagaatagtattctgatcagttgccaaagaatctaggaaattagttgtattttgtgcaagctaatttaaaaacatgatgggctgttttaagaccagagtggaaattcatgagaggaactatactaccaaaagagcccaaatgaccaaatccatggataattgcttcacagccttggccatcctggctcagctctcaatttagtataatatgcagttcctgtgcctccagactatgcagctcatcaccctaggttctacaggaaatacagagatgaacaactttgccttcaaaaatgtgctgcctagaaacagacctgcattcaaccaactgtaatgcaggattggaccatgaatgatatgctagaatagaagaaagagaagtgtttttttaattgagagcctctatgtgcaaggtgatatataatcatatccagtttaatcttcacaatatccaatgaagaaggtctcattatctccatgataaagatggggaaactaaggtcagaagggttaactcaactgtctattgtcacatgatgaataaatagatgaagtgagatacaaagctgggtttgattcaaagcccttactttcctaattaaactatgatgcgtatttatttttctgcaccttcctttcttccacaaacacatattgatagatgcaagagactcttatttagaaggcgtgggggacaagaaggatacaaggtaagtttcagtggagctcagaggacggggagatagaactgtggcacttaggggagatgacatttgctttgggcagaggcagctagccaggacacatttccactataattttacaaagttaaatttataagctagcattaagtaaagtgaagtccagctcccttgctaaaaataactagaggtaataattggtattcaggtaactcatttacagtcataatgtgttgtgaaaatttaatcttaaaaattaaatttttaaactatgtgggtctgtgaatttctttaatgtctaagaaatccagcttcataatttccatgatacaaagatcttttttcaggtggatttttacctttgttccttttgctctgatagacaaaatcagtttaggactattaaagaatgttttggaataaactgtctttttcctcaatgaatgggatgtctaatgtatttcaaaatcacccaaaacttttggcaaataaaagcatttaaaaagaaatt

SEQ ID NO: 61370 - DNA, 2991 bp, Homo sapiens
acctctaatttgttagcatttgaagtctattgatggatttttatcatgtggaaccatatatgcattcatggaataagtacaacttggtagacttattttaatatattgcttgatttggtttgcaaatgtccatttcctggcgttctagttaattgaaatacttgctttccccaaagcagcaacaccagtactttttctttcaataataacattggtgttcatattctaaaatatctagcttttcctgtgccagacttaaaggttagttatattttaatactacatgttttatgcagctccttaaacctcaaatcagaacaacactagtgatagttgtctccatatgttctcattagaattctaccaaatatctggctgggtagctgccctcgtcaggtggaacatgtaaccatcaaactgaagcatgaattggggattacagctgtaatgaatttccagactgaatgggatattgtacagaattcctcaggctgtaaccgctacccagagcccatgactccagacactatgattaaactatatagggaagaaggcttggcctacatctggatgccaacaccagatatgagcaccgaaggccgagtacagatgctgccccaggcggtgtgcctgctgcatgcgctgctggagaagggacacatcgtgtacgtgcactgcaacgctggggtgggccgctccaccgcggctgtctgcggctggctccagtatgtgatgggctggaatctgaggaaggtgcagtatttcctcatggccaagaggccggctgtctacattgacgaagaggccttggcccgggcacaagaagattttttccagaaatttgggaaggttcgttcttctgtgtgtagcctgtagctggtcagcctgcttctgccccctcctgatttccctaaggagcctgggatgatgttggtcaaatgacctagaaacaaggattctacctgaactgaaaggactgtgtgacctcccccaagccaaccactttcacctgggatgactttcgattatgctttgttttggggctgtatttttgaaatactctacaagaaagctgtggctcaacacatgagaagaagcacgaagcagttaggctgtacatcagacagaagggtaatgcgtgcagttcctgctgcctgcaggcagacgaggcctttgctttacagcactgtatgtgttgcacgatggatccgtgacagcactttcctgttgcactgaaactcttggccatgtagaggaaaagatatggagttatgtggatttcatcactagtatgtgtgcgtgagctggtcagttgccaaaggaggaaataaggttagaagcctgaaccgttacaaaagaagagctcactatggtcaaaaagtgatggctttcaggacttgttttttatcctgcctcacagttgttaaagtctgttccaaggcatcaccttccttctctacccaacaaccctgtgtaacaactaaagtagaattatctctcatttgttgttgtttttcctcaaaattaccaaacaaagcaaaaaatacccttgttttttatagttgagatgtcaagaagttaaattgaggcttaatgagcataggtagcttgtccaaggtctcatgaccagtcaagggcaagctggagttaataatctatatttatttgactcagcactgttttcatcacaacttgttttcccagcatcatgtagtgcatttagttttgtctttctcagggtatagtcaatatgcctgcaggagtttctatagcgagacatagaatagtattctgatcagttgccaaagaatctaggaaattagttgtattttgtgcaagctaatttaaaaacatgatgggctgttttaagaccagagtggaaattcatgagaggaactatactaccaaaagagcccaaatgaccaaatccatggataattgcttcacagccttggccatcctggctcagctctcaatttagtataatatgcagttcctgtgcctccagactatgcagctcatcaccctaggttctacaggaaatacagagatgaacaactttgccttcaaaaatgtgctgcctagaaacagacctgcattcaaccaactgtaatgcaggattggaccatgaatgatatgctagaatagaagaaagagaagtgtttttttaattgagagcctctatgtgcaaggtgatatataatcatatccagtttaatcttcacaatatccaatgaagaaggtctcattatctccatgataaagatggggaaactaaggtcagaagggttaactcaactgtctattgtcacatgatgaataaatagatgaagtgagatacaaagctgggtttgattcaaagcccttactttcctaattaaactatgatgcgtatttatttttctgcaccttcctttcttccacaaacacatattgatagatgcaagagactcttatttagaaggcgtgggggacaagaaggatacaaggtaagtttcagtggagctcagaggacggggagatagaactgtggcacttaggggagatgacatttgctttgggcagaggcagctagccaggacacatttccactataattttacaaagttaaatttataagctagcattaagtaaagtgaagtccagctcccttgctaaaaataactagaggtaataattggtattcaggtaactcatttacagtcataatgtgttgtgaaaatttaatcttaaaaattaaatttttaaactatgtgggtctgtgaatttctttaatgtctaagaaatccagcttcataatttccatgatacaaagatcttttttcaggtggatttttacctttgttccttttgctctgatagacaaaatcagtttaggactattaaagaatgttttggaataaactgtctttttcctcaatgaatgggatgtctaatgtatttcaaaatcacccaaaacttttggcaaataaaagcatttaaaaagaaatt

SEQ ID NO: 61371 - DNA, 1874 bp, Homo sapiens
tacagacaaagaacctgagacctgctagagtaagtgacttggttaagatagggagcgctccagagaccaggtccaagatcttcccccgtttcacaattagaaggcggctgtctagaggtcattcccttccttatgatcctcataaagttaatttccagtctcttggagagagaactggacgatcgcctggcttagaagttttcctccctccccgaaccccgttttctcttccatttcttccggtcgcgtgtccccagcgcccacaggtggaaatcaaccgcccgcggggttgcggggcacaaagaggcagctagcggctccgctgaccccttcccgccggcctggacgaagtctgggctcgggagccgcgtgatgcatcccaaagaaggcgcagaacagcacgtgttctccccggtgcccggggctcccacaccaccgcccaatcgctgcggccgcctagtgctcgggccgcgcctgccagccgcggggactccgggcccgggtattcgcgccgccgccgcccgccatgcgcttccgctttggggtggtggtgccacccgccgtggccggcgcccggccggagctgctggtggtggggtcgcggcccgagctggggcgttgggagccgcgcggtgccgtccgcctgaggccggccggcaccgcggcgggcgacggggccctggcgctgcaggagccgggcctgtggctcggggaggtggagctggcggccgaggaggcggcgcaggacggggcggagccgggccgcgtggacacgttctggtacaagttcctgaagcgggagccgggaggagagctctcctgggaaggcaatggacctcatcatgaccgttgctgtacttacaatgaaaacaacttggtggatggtgtgtattgtctcccaataggacactggattgaggccactgggcacaccaatgaaatgaagcacacaacagacttctattttaatattgcaggccaccaagccatgcattattcaagaattctaccaaatatctggctgggtagctgccctcgtcaggtggaacatgtaaccatcaaactgaagcatgaattggggattacagctgtaatgaatttccagactgaatgggatattgtacagaattcctcaggctgtaaccgctacccagagcccatgactccagacactatgattaaactatatagggaagaaggcttggcctacatctggatgccaacaccagatatgagcaccgaaggccgagtacagatgctgccccaggcggtgtgcctgctgcatgcgctgctggagaagggacacatcgtgtacgtgcactgcaacgctggggtgggccgctccaccgcggctgtctgcggctggctccagtatgtgatgggctggaatctgaggaaggtgcagtatttcctcatggccaagaggccggctgtctacattgacgaagaggcagctagccaggacacatttccactataattttacaaagttaaatttataagctagcattaagtaaagtgaagtccagctcccttgctaaaaataactagaggtaataattggtattcaggtaactcatttacagtcataatgtgttgtgaaaatttaatcttaaaaattaaatttttaaactatgtgggtctgtgaatttctttaatgtctaagaaatccagcttcataatttccatgatacaaagatcttttttcaggtggatttttacctttgttccttttgctctgatagacaaaatcagtttaggactattaaagaatgttttggaataaactgtctttttcctcaatgaatgggatgtctaatgtatttcaaaatcacccaaaacttttggcaaataaaagcatttaaaaagaaatt

SEQ ID NO: 61372 - DNA, 1904 bp, Homo sapiens
tacagacaaagaacctgagacctgctagagtaagtgacttggttaagatagggagcgctccagagaccaggtccaagatcttcccccgtttcacaattagaaggcggctgtctagaggtcattcccttccttatgatcctcataaagttaatttccagtctcttggagagagaactggacgatcgcctggcttagaagttttcctccctccccgaaccccgttttctcttccatttcttccggtcgcgtgtccccagcgcccacaggtggaaatcaaccgcccgcggggttgcggggcacaaagaggcagctagcggctccgctgaccccttcccgccggcctggacgaagtctgggctcgggagccgcgtgatgcatcccaaagaaggcgcagaacagcacgtgttctccccggtgcccggggctcccacaccaccgcccaatcgctgcggccgcctagtgctcgggccgcgcctgccagccgcggggactccgggcccgggtattcgcgccgccgccgcccgccatgcgcttccgctttggggtggtggtgccacccgccgtggccggcgcccggccggagctgctggtggtggggtcgcggcccgagctggggcgttgggagccgcgcggtgccgtccgcctgaggccggccggcaccgcggcgggcgacggggccctggcgctgcaggagccgggcctgtggctcggggaggtggagctggcggccgaggaggcggcgcaggacggggcggagccgggccgcgtggacacgttctggtacaagttcctgaagcgggagccgggaggagagctctcctgggaaggcaatggacctcatcatgaccgttgctgtacttacaatgaaaacaacttggtggatggtgtgtattgtctcccaataggacactggattgaggccactgggcacaccaatgaaatgaagcacacaacagacttctattttaatattgcaggccaccaagccatgcattattcaaggccgagtacagatgctgccccaggcggtgtgcctgctgcatgcgctgctggagaagggacacatcgtgtacgtgcactgcaacgctggggtgggccgctccaccgcggctgtctgcggctggctccagtatgtgatgggctggaatctgaggaaggtgcagtatttcctcatggccaagaggccggctgtctacattgacgaagaggccttggcccgggcacaagaagattttttccagaaatttgggaaggttcgttcttctgtgtgtagcctgtagctggtcagcctgcttctgccccctcctgatttccctaaggagcctgggatgatgttggtcaaatgacctagaaacaaggattctacctgaactgaaaggactgtgtgacctcccccaagccaaccactttcacctgggatgactttcgattatgctttgttttggggctgtatttttgaaatactctacaagaaagctgtggctcaacacatgagaagaagcacgaagcagttaggctgtacatcagacagaagggtaatgcgtgcagttcctgctgcctgcaggcagacgaggcctttgctttacagcactgtatgtgttgcacgatggatccgtgacagcactttcctgttgcactgaaactcttggccatgtagaggaaaagatatggagttatgtggatttcatcactagtatgtgtgcgtgagctggtcagttgccaaaggaggaaataaggttagaagcctgaaccgttacaaaagaagagctcactatggtcaaaaagtgatggctttcaggacttgttttttatcctgcctcacagttgttaaagtctgttccaaggcatcaccttccttctctacccaacaaccctgtgtaacaactaaagtagaattatctctc

SEQ ID NO: 61373 - DNA, 3256 bp, Homo sapiens
aggtgggggactaggagaggcaggtgctactagctccgcactactagttttgtgaccttgggcaagctagttaatctctgcaatggacctcatcatgaccgttgctgtacttacaatgaaaacaacttggtggatggccaccaagccatgcattattcaagcccatcttgagtgctggaccatcaataatggagagacatgatccttgctctcatggaacttatgctgtagtggaagacaacatgtaaacagctgcaatacagttaaatatttgctgtaatgaagttatatatgtagtgtaaaaagggacaggaaaaatctttaattcaaggaaatctttatgaggacgtagaacttgaacagaaatgtgaagccatctttttctcaggacatttgggaaagggaattcaaggcagccactttcatctctttaagttcataatttgctacttaacttcagatccagggaccaaaggcctgaattccagttgtgcctcaagatggtgctttccctcatttttgtagctcaagacgtacattcaactcaagagtccagctctacagcagctatatttggaaatacacatattttatggccagtatataaatgatttttaataaaattctaccaaatatctggctgggtagctgccctcgtcaggtggaacatgtaaccatcaaactgaagcatgaattggggattacagctgtaatgaatttccagactgaatgggatattgtacagaattcctcaggctgtaaccgctacccagagcccatgactccagacactatgattaaactatatagggaagaaggcttggcctacatctggatgccaacaccagatatgagcaccgaaggccgagtacagatgctgccccaggcggtgtgcctgctgcatgcgctgctggagaagggacacatcgtgtacgtgcactgcaacgctggggtgggccgctccaccgcggctgtctgcggctggctccagtatgtgatgggctggaatctgaggaaggtgcagtatttcctcatggccaagaggccggctgtctacattgacgaagaggccttggcccgggcacaagaagattttttccagaaatttgggaaggttcgttcttctgtgtgtagcctgtagctggtcagcctgcttctgccccctcctgatttccctaaggagcctgggatgatgttggtcaaatgacctagaaacaaggattctacctgaactgaaaggactgtgtgacctcccccaagccaaccactttcacctgggatgactttcgattatgctttgttttggggctgtatttttgaaatactctacaagaaagctgtggctcaacacatgagaagaagcacgaagcagttaggctgtacatcagacagaagggtaatgcgtgcagttcctgctgcctgcaggcagacgaggcctttgctttacagcactgtatgtgttgcacgatggatccgtgacagcactttcctgttgcactgaaactcttggccatgtagaggaaaagatatggagttatgtggatttcatcactagtatgtgtgcgtgagctggtcagttgccaaaggaggaaataaggttagaagcctgaaccgttacaaaagaagagctcactatggtcaaaaagtgatggctttcaggacttgttttttatcctgcctcacagttgttaaagtctgttccaaggcatcaccttccttctctacccaacaaccctgtgtaacaactaaagtagaattatctctcatttgttgttgtttttcctcaaaattaccaaacaaagcaaaaaatacccttgttttttatagttgagatgtcaagaagttaaattgaggcttaatgagcataggtagcttgtccaaggtctcatgaccagtcaagggcaagctggagttaataatctatatttatttgactcagcactgttttcatcacaacttgttttcccagcatcatgtagtgcatttagttttgtctttctcagggtatagtcaatatgcctgcaggagtttctatagcgagacatagaatagtattctgatcagttgccaaagaatctaggaaattagttgtattttgtgcaagctaatttaaaaacatgatgggctgttttaagaccagagtggaaattcatgagaggaactatactaccaaaagagcccaaatgaccaaatccatggataattgcttcacagccttggccatcctggctcagctctcaatttagtataatatgcagttcctgtgcctccagactatgcagctcatcaccctaggttctacaggaaatacagagatgaacaactttgccttcaaaaatgtgctgcctagaaacagacctgcattcaaccaactgtaatgcaggattggaccatgaatgatatgctagaatagaagaaagagaagtgtttttttaattgagagcctctatgtgcaaggtgatatataatcatatccagtttaatcttcacaatatccaatgaagaaggtctcattatctccatgataaagatggggaaactaaggtcagaagggttaactcaactgtctattgtcacatgatgaataaatagatgaagtgagatacaaagctgggtttgattcaaagcccttactttcctaattaaactatgatgcgtatttatttttctgcaccttcctttcttccacaaacacatattgatagatgcaagagactcttatttagaaggcgtgggggacaagaaggatacaaggtaagtttcagtggagctcagaggacggggagatagaactgtggcacttaggggagatgacatttgctttgggcagaggcagctagccaggacacatttccactataattttacaaagttaaatttataagctagcattaagtaaagtgaagtccagctcccttgctaaaaataactagaggtaataattggtattcaggtaactcatttacagtcataatgtgttgtgaaaatttaatcttaaaaattaaatttttaaactatgtgggtctgtgaatttctttaatgtctaagaaatccagcttcataatttccatgatacaaagatcttttttcaggtggatttttacctttgttccttttgctctgatagacaaaatcagtttaggactattaaagaatgttttggaataaactgtctttttcctcaatgaatgggatgtctaatgtatttcaaaatcacccaaaacttttggcaaataaaagcatttaaaaagaaatt

SEQ ID NO: 61374 - DNA, 3218 bp, Homo sapiens
aggtgggggactaggagaggcaggtgctactagctccgcactactagttttgtgaccttgggcaagctagttaatctctgcaatggacctcatcatgaccgttgctgtacttacaatgaaaacaacttggtggatggtgtgtattgtctcccaataggacactggattgaggccactgggcacaccaatgaaatgaagcacacaacagacttctattttaatattgcaggccaccaagccatgcattattcaagatccagggaccaaaggcctgaattccagttgtgcctcaagatggtgctttccctcatttttgtagctcaagacgtacattcaactcaagagtccagctctacagcagctatatttggaaatacacatattttatggccagtatataaatgatttttaataaaattctaccaaatatctggctgggtagctgccctcgtcaggtggaacatgtaaccatcaaactgaagcatgaattggggattacagctgtaatgaatttccagactgaatgggatattgtacagaattcctcaggctgtaaccgctacccagagcccatgactccagacactatgattaaactatatagggaagaaggcttggcctacatctggatgccaacaccagatatgagcaccgaaggctggcagtcggacccagaacattgctccagacagcaactttaccagctatgaagcttctccctgcattcttacacagacgcttcaggcaggttcttcagacccatgcaatttcaaccccttatgttcatgatcatctggagttaggcagagcctacaaattgcaagggccgagtacagatgctgccccaggcggtgtgcctgctgcatgcgctgctggagaagggacacatcgtgtacgtgcactgcaacgctggggtgggccgctccaccgcggctgtctgcggctggctccagtatgtgatgggctggaatctgaggaaggtgcagtatttcctcatggccaagaggccggctgtctacattgacgaagaggccttggcccgggcacaagaagattttttccagaaatttgggaaggttcgttcttctgtgtgtagcctgtagctggtcagcctgcttctgccccctcctgatttccctaaggagcctgggatgatgttggtcaaatgacctagaaacaaggattctacctgaactgaaaggactgtgtgacctcccccaagccaaccactttcacctgggatgactttcgattatgctttgttttggggctgtatttttgaaatactctacaagaaagctgtggctcaacacatgagaagaagcacgaagcagttaggctgtacatcagacagaagggtaatgcgtgcagttcctgctgcctgcaggcagacgaggcctttgctttacagcactgtatgtgttgcacgatggatccgtgacagcactttcctgttgcactgaaactcttggccatgtagaggaaaagatatggagttatgtggatttcatcactagtatgtgtgcgtgagctggtcagttgccaaaggaggaaataaggttagaagcctgaaccgttacaaaagaagagctcactatggtcaaaaagtgatggctttcaggacttgttttttatcctgcctcacagttgttaaagtctgttccaaggcatcaccttccttctctacccaacaaccctgtgtaacaactaaagtagaattatctctcatttgttgttgtttttcctcaaaattaccaaacaaagcaaaaaatacccttgttttttatagttgagatgtcaagaagttaaattgaggcttaatgagcataggtagcttgtccaaggtctcatgaccagtcaagggcaagctggagttaataatctatatttatttgactcagcactgttttcatcacaacttgttttcccagcatcatgtagtgcatttagttttgtctttctcagggtatagtcaatatgcctgcaggagtttctatagcgagacatagaatagtattctgatcagttgccaaagaatctaggaaattagttgtattttgtgcaagctaatttaaaaacatgatgggctgttttaagaccagagtggaaattcatgagaggaactatactaccaaaagagcccaaatgaccaaatccatggataattgcttcacagccttggccatcctggctcagctctcaatttagtataatatgcagttcctgtgcctccagactatgcagctcatcaccctaggttctacaggaaatacagagatgaacaactttgccttcaaaaatgtgctgcctagaaacagacctgcattcaaccaactgtaatgcaggattggaccatgaatgatatgctagaatagaagaaagagaagtgtttttttaattgagagcctctatgtgcaaggtgatatataatcatatccagtttaatcttcacaatatccaatgaagaaggtctcattatctccatgataaagatggggaaactaaggtcagaagggttaactcaactgtctattgtcacatgatgaataaatagatgaagtgagatacaaagctgggtttgattcaaagcccttactttcctaattaaactatgatgcgtatttatttttctgcaccttcctttcttccacaaacacatattgatagatgcaagagactcttatttagaaggcgtgggggacaagaaggatacaaggtaagtttcagtggagctcagaggacggggagatagaactgtggcacttaggggagatgacatttgctttgggcagaggcagctagccaggacacatttccactataattttacaaagttaaatttataagctagcattaagtaaagtgaagtccagctcccttgctaaaaataactagaggtaataattggtattcaggtaactcatttacagtcataatgtgttgtgaaaatttaatcttaaaaattaaatttttaaactatgtgggtctgtgaatttctttaatgtctaagaaatccagcttcataatttccatgatacaaagatcttttttcaggtggatttttacctttgttccttttgctctgatagacaaaatcagtttaggactattaaagaatgttttggaataaactgtctttttcctcaatgaatgggatgtctaatgtatttcaaaatcacccaaaacttttggcaaataaaagcatttaaaaagaaatt

SEQ ID NO: 61375 - DNA, 1405 bp, Homo sapiens
tacagacaaagaacctgagacctgctagagtaagtgacttggttaagatagggagcgctccagagaccaggtccaagatcttcccccgtttcacaattagaaggcggctgtctagaggtcattcccttccttatgatcctcataaagttaatttccagtctcttggagagagaactggacgatcgcctggcttagaagttttcctccctccccgaaccccgttttctcttccatttcttccggtcgcgtgtccccagcgcccacaggtggaaatcaaccgcccgcggggttgcggggcacaaagaggcagctagcggctccgctgaccccttcccgccggcctggacgaagtctgggctcgggagccgcgtgatgcatcccaaagaaggcgcagaacagcacgtgttctccccggtgcccggggctcccacaccaccgcccaatcgctgcggccgcctagtgctcgggccgcgcctgccagccgcggggactccgggcccgggtattcgcgccgccgccgcccgccatgcgcttccgctttggggtggtggtgccacccgccgtggccggcgcccggccggagctgctggtggtggggtcgcggcccgagctggggcgttgggagccgcgcggtgccgtccgcctgaggccggccggcaccgcggcgggcgacggggccctggcgctgcaggagccgggcctgtggctcggggaggtggagctggcggccgaggaggcggcgcaggacggggcggagccgggccgcgtggacacgttctggtacaagttcctgaagcgggagccgggaggagagctctcctgggaaggcaatggacctcatcatgaccgttgctgtacttacaatgaaaacaacttggtggatggtgtgtattgtctcccaataggacactggattgaggccactgggcacaccaatgaaatgaagcacacaacagacttctattttaatattgcaggccaccaagccatgcattattcaagaattctaccaaatatctggctgggtagctgccctcgtcaggtggaacatgtaaccatcaaactgaagcatgaattggggattacagctgtaatgaatttccagactgaatgggatattgtacagaattcctcaggctgtaaccgctacccagagcccatgactccagacactatgattaaactatatagggaagaaggcttggcctacatctggatgccaacaccagatatgagcaccgaaggtaaggatcagaactgttctgcctccttgctgtatttcagagaaacccttgctgtctgtctgtctatctataatttaatatcttaaaaatgaatggtagaaatggaataaatataagattttagatttaatatatataatacatatgttttgacactgtgg

SEQ ID NO: 61376 - DNA, 350 bp, Homo sapiens
tattttaacagccttttaaaataattgggatattcttctttgatactataccagaatttgataaatagtagtgttttaaaacatagttgtaatgcagaatctcaaactgtatccatgaatttttttaattctattatattaaaatgtggtgttctgtactttggacagattttataataggaatgtatagcatgactttataacatgatacgttagctttttggaaagtattgattcattgaattattcagagctccaagtattgacacatttcattacacagtatcaaaaaattatatttgttagtatcgattgtatagtatcaccaatctcatcagaaaagtatttaa

SEQ ID NO: 61377 - DNA, 393 bp, Homo sapiens
gtagcgacgcggacctggctgagaggcgttaggagtccgggcgttcggccggaggccggggagcagccgaccatggagccccagagagcttggtcaatgtgttctggacaaagcaggaagatgtgactgaaatcctgaaaggagccggctcctgcagcacaaggataatgatacatctgggtacatttctcttcacagcatttgatagtggctccaaagtgcttacaaaatgcacatcgctgaaaggggtaaaggagagaaatctctttataaaaccttgaaaaggaatattcaaatataagctgggaaggtataaaaaactctctgtacatcacaagtaaacaaattgaacctgcaaaatattaaacaaaggattcattaaaaataataaaa

SEQ ID NO: 61378 - DNA, 3112 bp, Homo sapiens
aggcggttggagtacggggcgggggtcggccgagggcgcggggccccggggctccgggctcgcccccgccgctcggggcaggcgcgccgatggcgtttctgaggtgacgccgcccacaccgggcttctccgggggcggaggaaacacctatgaaccctccggcagccttccttgccgggcgccagaacatcgggtcagaagttgagatttccactatcgagaaacaacggaaggagctgcagttgctcattggagaattaaaagatcgagataaagagctcaatgacatggttgcagtgcaccagcaacagcttctttcatgggaagaggatcggcagaaagtgttgacactggaagaacgttgcagcaaattagaaggtgaactacataaaagaactgaaataatcaggtcactcacgaagaaggtaaaagctcttgaatccaatcaaatggaatgccaaacagctctccaaaagacccaactacagcttcaggaaatggctcaaaaggcaacgcattcttctcttctctctgaagaccttgaggctagaaacgaaactctcagcaacacgttagtggaactttctgcccaggtaggacagctacaagctcgagaacaagctcttacgacaatgataaagctaaaggacaaagatattattgaggcagttaatcacattgcagattgttcgggtaaatttaaaatgctagagcatgccctacgtgatgccaagatggcggagacttgtattgtgaaagaaaagcaagattataagcagaaattgaaggcacttaagattgaagtcaacaaactaaaagaggacctcaatgaaaagacgacagaaaataatgagcaacgagaagagatcattcgcctcaagcaagagaaaagttgcctgcacgatgaattgctttttactgtagagagagaaaagaggaaagatgaattgcttaatattgcgaagtcaaagcaagaacgcacaaattcagaactgcacaatctgagacagatttatgtaaaacaacagagtgatctgcagtttcttaatttcaatgtggaaaattctcaggaattaatacagatgtatgactcaaagatggaggaatcaaaggctctggactccagcagagacatgtgtttatcagaccttgaaaataaccacccaaaagtcgatattaagagggaaaaaaatcagaagtcactgtttaaggaccagaaatttgaagccatgttggttcagcaaaataggtcagacaagagctcttgcgatgaatgcaaagagaagaaacaacagatcgatactgtgtttggggagaaaagtgtaattacgctgtcatccatattcaccaaagacttagtagagaaacacaacctcccttggtctctgggaggaaaaacccagattgaacccgaaaacaaaattacattgtgcaagatccacacaaaatcaccaaaatgtcatggcactggggttcagaacgaaggaaaacaaccctcagaaacacccactttatctgatgagaagcagtggcatgatgtcagtgtttacctgggcctgaccaactgtccaagttcaaaacatccagaaaagctggatgtagaatgtcaagatcagatggaaaggtccgaaatctcatgctgccagaaaaatgaagcctgtctgggcgaaagtggcatgtgtgactccaagtgctgccacccgagtaacttcataattgaagccccaggccacatgtctgacgtggagtggatgagtattttcaagccttccaaaatgcagagaattgtccgcctcaaatctgggtgcacctgttcagaaagcatctgtggcacacaacatgactccccggcaagtgagctaattgccatccaagattcccactctttgggttcttcaaaatctgccttgagagaagatgagacggagtcctcttccaataaaaagaactcacctacgagtttgttaatctacaaagatgcaccagcattcaatgaaaaggcttcaattgtgttaccctcccaggatgatttctcgcccacgagcaagctccagcgtttgctggcggaatctcgtcagatggtgacggacctggagctgaacacactgctgcccatcagccatgagaatctcactggcagtgccacaaatatttctcatctatgtggaaggcagaaagcagacaccaatactgaatgaatacttaaccgtaaaactgaaagaggattctagttcttcataaacggcacttaattccagctgggagcagaactagaaagttaatttttaaacatctacacttcattttcaagttaaccatttttgtgctgaagaaatattttcatgtgtaagaaagtagaccttattgtacatatagaaagttggaattatgctaagaatgaaaaagacttctctgtaaagatacggactacagttaaatgctagagaagctctttaaaaatgtgaatgtcaaatagagaaagaacccctgcatagaaagtgctgttttaactatctgatttttaaaaaatctgtgcatacatttaaattctaaacaatagcttatcagagtcagctcaaaatatatgagaaacagtattctctcatggttttagcttttgactttgctgtgtaaatagacataaggtgctttgatataaaatataaaatgtaactggaaaatagctcgaggtccttctgtcccaagctgagcagagccccatctttctgggtctatattagtcccacctactgacacaaacaaaagcttgctggaagatcgagttttagacgcatttttaaaaatcttaaagactaaaacacttccattttaacttgtaaagtaatttaattttttaaagattatactatatgcctctgtgtcttctctaaaagaatagatcaacttcagtccataaaagatatttttaatattaaagaaaaaatatgtttccttggtttctttttattttacaggagtaaaataaggaaggaacgttcatcactttaaactgaacctggcaagttaatttcctcgggaatggggatgtatttttttaagcattgcagatatcaaagttctattgtgctgaataaatgcccctttgttaaca

SEQ ID NO: 61379 - DNA, 2576 bp, Homo sapiens
aggcggttggagtacggggcgggggtcggccgagggcgcggggccccggggctccgggctcgcccccgccgctcggggcaggcgcgccgatggcgtttctgaggtgacgccgcccacaccgggcttctccgggggcggaggaaacacctatgaaccctccggcagccttccttgccgggcgccagaacatcgggtcagaagttgagatttccactatcgagaaacaacggaaggagctgcagttgctcattggagaattaaaagatcgagataaagagctcaatgacatggttgcagtgcaccagcaacagcttctttcatgggaagaggatcggcagaaagtgttgacactggaagaacgttgcagcaaattagaaggtgaactacataaaagaactgaaataatcaggtcactcacgaagaaggtaaaagctcttgaatccaatcaaatggaatgccaaacagctctccaaaagacccaactacagcttcaggaaatggctcaaaaggcaacgcattcttctcttctctctgaagaccttgaggctagaaacgaaactctcagcaacacgttagtggaactttctgcccaggtaggacagctacaagctcgagaacaagctcttacgacaatgataaagctaaaggacaaagatattattgaggcagttaatcacattgcagattgttcgggtaaatttaaaatgctagagcatgccctacgtgatgccaagatggcggagacttgtattgtgaaagaaaagcaagattataagcagaaattgaaggcacttaagattgaagtcaacaaactaaaagaggacctcaatgaaaagacgacagaaaataatgagcaacgagaagagatcattcgcctcaagcaagagaaaagttgcctgcacgatgaattgctttttactgtagagagagaaaagaggaaagatgaattgcttaatattgcgaagtcaaagcaagaacgcacaaattcagaactgcacaatctgagacagatttatgtaaaacaacagagtgatctgcagtttcttaatttcaatgtggaaaattctcaggaattaatacagatgtatgactcaaagatggaggaatcaaaggctctggactccagcagagacatgtgtttatcagaccttgaaaataaccacccaaaagtcgatattaagagggaaaaaaatcagaagtcactgtttaaggaccagaaatttgaagccatgttggttcagcaaaataggtcagacaagagctcttgcgatgaatgcaaagagaagaaacaacagatcgatactgtgtttggggagaaaagtgtaattacgctgtcatccatattcaccaaagacttagtagagaaacacaacctcccttggtctctgggaggaaaaacccagattgaacccgaaaacaaaattacattgtgcaagatccacacaaaatcaccaaaatgtcatggcactggggttcagaacgaaggaaaacaaccctcagaaacacccactttatctgatgagaagcagtggcatgatgtcagtgtttacctgggcctgaccaactgtccaagttcaaaacatccagaaaagctggatgtagaatgtcaagatcagatggaaaggtccgaaatctcatgctgccagaaaaatgaagcctgtctgggcgaaagtggcatgtgtgactccaagtgctgccacccgagtaacttcataattgaagccccaggccacatgtctgacgtggagtggatgagtattttcaagccttccaaaatgcagagaattgtccgcctcaaatctgggtgcacctgttcagaaagcatctgtggcacacaacatgactccccggcaagtgagctaattgccatccaagattcccactctttgggttcttcaaaatctgccttgagagaagatgagacggagtcctcttccaataaaaagaactcacctacgagtttgttaatctacaaagatgcaccagcattcaatgaaaaggcttcaattgtgttaccctcccaggatgatttctcgcccacgagcaagctccagcgtttgctggcggaatctcgtcagatggtgacggacctggagctgaacacactgctgcccatcagccatgagaatctcactggcagtgccacaaataagtcagaggtcccagaagagtcagctcaaaaaaatacgtttgtcagttattgaaggaaacaaaaggcaacttcagtattcatcgtgatcacgatttctcatctatgtggaaggcagaaagcagacaccaatactgaatgaatacttaaccgtaaaactgaaagaggattctagttcttcataaacggcacttaattccagctgggagcagaactagaaagttaatttttaaacatctacacttcattttcaagttaaccatttttgtgctgaagaaatattttcatgtgagtaaaataaggaaggaacgttcatcactttaaactgaacctggcaagttaatttcctcgggaatggggatgtatttttttaagcattgcagatatcaaagttctattgtgctgaataaatgcccctttgttaaca

SEQ ID NO: 61380 - DNA, 509 bp, Homo sapiens
aatctcgtcagatggtgacggacctggagctgagcacactgctgcccatcagccatgagaatctcactgcagtgccacaaataagtcagaggtcccagaagagtcagctcaaaaaaatacctttgtcagttattgaaggaaacaaaaggcaacttcagtattcatcgtgatcacgaatttctcatctatgtggaaggcagaaagcagacaccaatactgaatgaatacttaaccgtaaaactgaaagaggattctagttcttcataaacggcacttaattccagctgggagcagaactagaaagttaatttttaaacatctacacttcattttcaagttaaccatttttgtgctgaagaaatattttcatgtgagtaaaataaggaaggaacgttcatcactttaaactgaacctggcaagttaatttcctcgggaatggggatgtatttttttaagcattgcagatatcaaagttctattgtgctgaataaatgcccctttgttaaca

SEQ ID NO: 61381 - DNA, 3205 bp, Homo sapiens
aggcggttggagtacggggcgggggtcggccgagggcgcggggccccggggctccgggctcgcccccgccgctcggggcaggcgcgccgatggcgtttctgaggtgacgccgcccacaccgggcttctccgggggcggaggaaacacctatgaaccctccggcagccttccttgccgggcgccagaacatcgggtcagaagttgagatttccactatcgagaaacaacggaaggagctgcagttgctcattggagaattaaaagatcgagataaagagctcaatgacatggttgcagtgcaccagcaacagcttctttcatgggaagaggatcggcagaaagtgttgacactggaagaacgttgcagcaaattagaaggtgaactacataaaagaactgaaataatcaggtcactcacgaagaaggtaaaagctcttgaatccaatcaaatggaatgccaaacagctctccaaaagacccaactacagcttcaggaaatggctcaaaaggcaacgcattcttctcttctctctgaagaccttgaggctagaaacgaaactctcagcaacacgttagtggaactttctgcccaggtaggacagctacaagctcgagaacaagctcttacgacaatgataaagctaaaggacaaagatattattgaggcagttaatcacattgcagattgttcgggtaaatttaaaatgctagagcatgccctacgtgatgccaagatggcggagacttgtattgtgaaagaaaagcaagattataagcagaaattgaaggcacttaagattgaagtcaacaaactaaaagaggacctcaatgaaaagacgacagaaaataatgagcaacgagaagagatcattcgcctcaagcaagagaaaagttgcctgcacgatgaattgctttttactgtagagagagaaaagaggaaagatgaattgcttaatattgcgaagtcaaagcaagaacgcacaaattcagaactgcacaatctgagacagatttatgtaaaacaacagagtgatctgcagtttcttaatttcaatgtggaaaattctcaggaattaatacagatgtatgactcaaagatggaggaatcaaaggctctggactccagcagagacatgtgtttatcagaccttgaaaataaccacccaaaagtcgatattaagagggaaaaaaatcagaagtcactgtttaaggaccagaaatttgaagccatgttggttcagcaaaataggtcagacaagagctcttgcgatgaatgcaaagagaagaaacaacagatcgatactgtgtttggggagaaaagtgtaattacgctgtcatccatattcaccaaagacttagtagagaaacacaacctcccttggtctctgggaggaaaaacccagattgaacccgaaaacaaaattacattgtgcaagatccacacaaaatcaccaaaatgtcatggcactggggttcagaacgaaggaaaacaaccctcagaaacacccactttatctgatgagaagcagtggcatgatgtcagtgtttacctgggcctgaccaactgtccaagttcaaaacatccagaaaagctggatgtagaatgtcaagatcagatggaaaggtccgaaatctcatgctgccagaaaaatgaagcctgtctgggcgaaagtggcatgtgtgactccaagtgctgccacccgagtaacttcataattgaagccccaggccacatgtctgacgtggagtggatgagtattttcaagccttccaaaatgcagagaattgtccgcctcaaatctgggtgcacctgttcagaaagcatctgtggcacacaacatgactccccggcaagtgagctaattgccatccaagattcccactctttgggttcttcaaaatctgccttgagagaagatgagacggagtcctcttccaataaaaagaactcacctacgagtttgttaatctacaaagatgcaccagcattcaatgaaaaggcttcaattgtgttaccctcccaggatgatttctcgcccacgagcaagctccagcgtttgctggcggaatctcgtcagatggtgacggacctggagctgaacacactgctgcccatcagccatgagaatctcactggcagtgccacaaataagtcagaggtcccagaagagtcagctcaaaaaaatacgtttgtcagttattgaaggaaacaaaaggcaacttcagtattcatcgtgatcacgatttctcatctatgtggaaggcagaaagcagacaccaatactgaatgaatacttaaccgtaaaactgaaagaggattctagttcttcataaacggcacttaattccagctgggagcagaactagaaagttaatttttaaacatctacacttcattttcaagttaaccatttttgtgctgaagaaatattttcatgtgtaagaaagtagaccttattgtacatatagaaagttggaattatgctaagaatgaaaaagacttctctgtaaagatacggactacagttaaatgctagagaagctctttaaaaatgtgaatgtcaaatagagaaagaacccctgcatagaaagtgctgttttaactatctgatttttaaaaaatctgtgcatacatttaaattctaaacaatagcttatcagagtcagctcaaaatatatgagaaacagtattctctcatggttttagcttttgactttgctgtgtaaatagacataaggtgctttgatataaaatataaaatgtaactggaaaatagctcgaggtccttctgtcccaagctgagcagagccccatctttctgggtctatattagtcccacctactgacacaaacaaaagcttgctggaagatcgagttttagacgcatttttaaaaatcttaaagactaaaacacttccattttaacttgtaaagtaatttaattttttaaagattatactatatgcctctgtgtcttctctaaaagaatagatcaacttcagtccataaaagatatttttaatattaaagaaaaaatatgtttccttggtttctttttattttacaggagtaaaataaggaaggaacgttcatcactttaaactgaacctggcaagttaatttcctcgggaatggggatgtatttttttaagcattgcagatatcaaagttctattgtgctgaataaatgcccctttgttaaca

SEQ ID NO: 61382 - DNA, 3168 bp, Homo sapiens
aggcggttggagtacggggcgggggtcggccgagggcgcggggccccggggctccgggctcgcccccgccgctcggggcaggcgcgccgatggcgtttctgaggtgacgccgcccacaccgggcttctccgggggcggaggaaacacctatgaaccctccggcagccttccttgccgggcgccagaacatcgggtcagaagttgagatttccactatcgagaaacaacggaaggagctgcagttgctcattggagaattaaaagatcgagataaagagctcaatgacatggttgcagtgcaccagcaacagcttctttcatgggaagaggatcggcagaaagtgttgacactggaagaacgttgcagcaaattagaaggtgaactacataaaagaactgaaataatcaggtcactcacgaagaaggtaaaagctcttgaatccaatcaaatggaatgccaaacagctctccaaaagacccaactacagcttcaggaaatggctcaaaaggcaacgcattcttctcttctctctgaagaccttgaggctagaaacgaaactctcagcaacacgttagtggaactttctgcccaggtaggacagctacaagctcgagaacaagctcttacgacaatgataaagctaaagattgttcgggtaaatttaaaatgctagagcatgccctacgtgatgccaagatggcggagacttgtattgtgaaagaaaagcaagattataagcagaaattgaaggcacttaagattgaagtcaacaaactaaaagaggacctcaatgaaaagacgacagaaaataatgagcaacgagaagagatcattcgcctcaagcaagagaaaagttgcctgcacgatgaattgctttttactgtagagagagaaaagaggaaagatgaattgcttaatattgcgaagtcaaagcaagaacgcacaaattcagaactgcacaatctgagacagatttatgtaaaacaacagagtgatctgcagtttcttaatttcaatgtggaaaattctcaggaattaatacagatgtatgactcaaagatggaggaatcaaaggctctggactccagcagagacatgtgtttatcagaccttgaaaataaccacccaaaagtcgatattaagagggaaaaaaatcagaagtcactgtttaaggaccagaaatttgaagccatgttggttcagcaaaataggtcagacaagagctcttgcgatgaatgcaaagagaagaaacaacagatcgatactgtgtttggggagaaaagtgtaattacgctgtcatccatattcaccaaagacttagtagagaaacacaacctcccttggtctctgggaggaaaaacccagattgaacccgaaaacaaaattacattgtgcaagatccacacaaaatcaccaaaatgtcatggcactggggttcagaacgaaggaaaacaaccctcagaaacacccactttatctgatgagaagcagtggcatgatgtcagtgtttacctgggcctgaccaactgtccaagttcaaaacatccagaaaagctggatgtagaatgtcaagatcagatggaaaggtccgaaatctcatgctgccagaaaaatgaagcctgtctgggcgaaagtggcatgtgtgactccaagtgctgccacccgagtaacttcataattgaagccccaggccacatgtctgacgtggagtggatgagtattttcaagccttccaaaatgcagagaattgtccgcctcaaatctgggtgcacctgttcagaaagcatctgtggcacacaacatgactccccggcaagtgagctaattgccatccaagattcccactctttgggttcttcaaaatctgccttgagagaagatgagacggagtcctcttccaataaaaagaactcacctacgagtttgttaatctacaaagatgcaccagcattcaatgaaaaggcttcaattgtgttaccctcccaggatgatttctcgcccacgagcaagctccagcgtttgctggcggaatctcgtcagatggtgacggacctggagctgaacacactgctgcccatcagccatgagaatctcactggcagtgccacaaataagtcagaggtcccagaagagtcagctcaaaaaaatacgtttgtcagttattgaaggaaacaaaaggcaacttcagtattcatcgtgatcacgatttctcatctatgtggaaggcagaaagcagacaccaatactgaatgaatacttaaccgtaaaactgaaagaggattctagttcttcataaacggcacttaattccagctgggagcagaactagaaagttaatttttaaacatctacacttcattttcaagttaaccatttttgtgctgaagaaatattttcatgtgtaagaaagtagaccttattgtacatatagaaagttggaattatgctaagaatgaaaaagacttctctgtaaagatacggactacagttaaatgctagagaagctctttaaaaatgtgaatgtcaaatagagaaagaacccctgcatagaaagtgctgttttaactatctgatttttaaaaaatctgtgcatacatttaaattctaaacaatagcttatcagagtcagctcaaaatatatgagaaacagtattctctcatggttttagcttttgactttgctgtgtaaatagacataaggtgctttgatataaaatataaaatgtaactggaaaatagctcgaggtccttctgtcccaagctgagcagagccccatctttctgggtctatattagtcccacctactgacacaaacaaaagcttgctggaagatcgagttttagacgcatttttaaaaatcttaaagactaaaacacttccattttaacttgtaaagtaatttaattttttaaagattatactatatgcctctgtgtcttctctaaaagaatagatcaacttcagtccataaaagatatttttaatattaaagaaaaaatatgtttccttggtttctttttattttacaggagtaaaataaggaaggaacgttcatcactttaaactgaacctggcaagttaatttcctcgggaatggggatgtatttttttaagcattgcagatatcaaagttctattgtgctgaataaatgcccctttgttaaca

SEQ ID NO: 61383 - DNA, 762 bp, Homo sapiens
ggacctgggggagctttccccaatgcccatgatgatatcttgggaacctttttgcttcctccccagatggttgggtcacctccagggtgtgggggctaagagcatggcaaggctcagcagagctcagcaggcagaggtggatggacattctggggtgaggtccctggggccagacagtcccagcagggtgggacaggacagggcaggcctggaagaccttcaatcacacaaatgggcaggactctacctccagaagggagtggactcccctgggctcggtgattctccctcctcagtctccctcttgagtagctgggactacaggcacccgccactacgcccggctaattttttatatttttaatagggacgggggtctcaccatgttgcccaggctagtcttgaactcctggcctcaagtgatcctcccaacttggcctcccaaagtgctgggattaaagacgtgagccaccaaacccagccccattctaataattagtggactccagcaggcaggcggcccgaaattccagcaggagacacacaagccaggagagaaaagagacctgaagtctgggaacaggaagtacctgctccctgcataggacagcctgatcctgggagcaagagtgccaggcaaggggtagggaggagaacaggagagatgggaagcacatgtcttgccgtcccctcagaggcttccttgcagggaactgaatgacactctagtgcaggctggatgagcttgtcatgctccccacc

SEQ ID NO: 61384 - DNA, 194 bp, Homo sapiens
agggatgtatgaatgctggagggagagacctggctgcagggagtggactatgtaatattgtcaagcgcctacactagctaatgcagtgtgccaggtcattctaagtgctttacatatattaatttttctaaatctcccaacaaccctagaagtaagtactacaggtccacagtcccttatctgcctttccagga

SEQ ID NO: 61385 - DNA, 282 bp, Homo sapiens
tcgaggatctcacattgcacatagttgtcctgtatctacagtctctgctaatcaaggacagctcctcagtcttcagcacctgggcttttacaaagagcactggtcagttattttgtagaacatccctcagtttggttggtgttttctcatgattagattaagcttattcaccttaggcaagaatacctcagaactgatgctgtgctcttctcaatacatcctacatcagagggtacatgatgttgatttgtcttcattttggtcatattaactttgatactt

SEQ ID NO: 61386 - DNA, 1126 bp, Homo sapiens
tgtaacgtggagcctggtcgccccagcccgggagagggggaccctgcccgcaccctcctggtctggggagggcctagtggcagcccaggtgcagtgggccggaggccaggggagcccgtgtaggggaaccgcctggcctctgttcagtgtgcccctcccctgggtggggcttcaggcgctgagtcatggctttggttggggggcagcctcaccctcctccccgtcctccaagctgctgaggaaatcctgggctgagcacagcagaggaggcctaggtccccaggactgaggaagggagagctgaggggctcccagcagtgggagcggctctcggggcctctgccagggcccaccctgtccccatgagcacgtccgtgagctcctgggtgcagccatccccccttgctggctctccagggacacgggcgccccaaacccgagggcggcagctctgggtgcagctgtctctgcatccggccctgctcaggggtggctgcaactcctggggtgtggcgctctctgctgccttctcctgggaggatggtcccttctctgttctgggatcctccagctgaggtagaggtcagggtccaggggctgcaggctgggcactggcggtcagcggacaccacagcgagattccctccatcgccccctgcttcgggattcagagtcctcttagccccttgggaacaagagagggctgctcagagaggacctagtgtccttctggggtggctgggacccttcaaggtccctggctggggcagcctggtgcctgcagctccagctcctaattgaggacacgccccatgtaaaccacaggcccctcccccgaggcctgggacaccggtcagggtagcaaggtacgagggactgtaggccctgatggcctctgctcctggacccctgccctagacctggagtcctggccccagcccgggccctgtggtgcccaatccccaggaggccagatggcccggacagccagtgagccgattgtgtggagggctgccgggatcctggccctgtttccctgtgtgagcttggccccgcctcttgccccaggcccctgctggcgggtctcaccccccacccctcgctttgaataaagcacttgcgccca

SEQ ID NO: 61387 - DNA, 2394 bp, Homo sapiens
taggctaggtacgaggctgggtgttgaatcggccgaggctccggcatccacaggagcctgggtgtccactgctccaaggtgcggtccctgacgctggactcgtgggagcctgagctgctaaagctgatgtgtgagcttggaaacagcgctgtgaatcagatctatgaggcccagtgtgagggtgcaggcagcaggaaacccacagccagcagctcccggcaggacaaggaggcctggatcaaggacaaatacgtggaaaagaagtttctgcggaaggcgcccatggcaccagccctggaggccccaagacgctggagggtgcagaagtgcctgcggccccacagctctccccgcgctcccactgcccgccgcaaggtccggcttgagcccgttctgccctgtgtggccgctctgtcctcagtgggcaccctggatcgtaagttccgccgagactccctcttctgtcccgacgagctggactcgctcttctcctacttcgacgcaggggccgcaggggctggccctcgcagtctgagtagcgacagtggccttgggggcagctcggatggcagctcggacgtcctggctttcggctcgggctctgtggtggacagcgtcactgaggaggagggtgcagagtcggaggagtccagcggtgaggcagacggggacactgaggccgaggcctggggcctggcggacgtgcgcgagctgcacccggggctcttggcgcaccgcgcagcgcgtgcccgcgaccttcctgcgctggcggcggcgctggcccacggggccgaggtcaactgggcggacgcggaggatgagggcaagacgccgctggtgcaggccgtgctagggggctccttgatcgtctgtgagttcctgctgcaaaacggagcggacgtgaaccaaagagacagccggggccgggcgcccctgcaccacgccacgctgctgggccgcaccggccaggtttgcctgttcctgaagcggggcgcggaccagcacgccctggaccaagagcagcgggacccgttggccatcgcagtgcaggcggccaacgctgacatcgtgacactgctccgtctggcgcgcatggcggaggaaatgcgcgaggccgaggctgcccctggtcccccgggcgccctggcgggcagccccacggagctccagttccgcaggtgtatccaggagttcatcagcctccacctggaagagagctagggccgggcaggccgggcagctgccaccccgcccggcccgacgccccgcatgccccgaagtccctggcgcccacccggccgcggccctgcgtgtgacccgcgggtcgatacctggcagccccagtgctggggcgccgcggccctgctcgcccaggaggagagcgagggccccacactgagtctcttgaagcctcacgtttccctgggggggtgctgcatcgtcgggtgtccctcaccccacctggggaacctctgtcttcaggtcaccccttttcaggggcctgggttgctcatgtcacaagccacttttaaggcccgtgtcacctgtgtccctgtgtcctcagggcctgtgttacttcgtgccccacttctgcccagaacactgacctgttagctggctccctcctgcacaccccagagcctcctcccagggcagaaagggtggcccatccagggaaccaacgagtacctcacttagtgaccccagcatccaggctggcgtcgcgggtgctgggcgggaggggctctggcctgggtcctcagccctggctggacgcgggcgtcccaaggccacgtggctggccacgaaggtccccgtgccagacagccccagccgcatcccggcctcctccggaggcaccttctcctggtactcggcccagagcctgcgcataaagccactttgccactttgcagccctcatctcatgttctttgtagcggaccgagtgggtttgctataggcctcgtctgactttgtcttgcgtcttttctctgtggactcttgaggacgcctgagccccagccctgcccctgaccagcctcccccttgggtccaggggtctttcggctcatattgcagggcctgccaatgccttcacgcaccccttccccaaaggtgcccggcagggaggcagggcctcccccactcagcgcaggtcaggctaaggccagtcggctggtcactatgcaatgctgccctggggaggctccctgagggcacagtgggcgctggacccggccccccaactctcttgcctgctgcctgtgaccctgaagaacagaattgattcttgcccctctccctgtgtgagcttggccccgcctcttgccccaggcccctgctggcgggtctcaccccccacccctcgctttgaataaagcacttgcgccca

SEQ ID NO: 61388 - DNA, 502 bp, Homo sapiens
acgagcggtccgggccggcgcggctgccgctcggcgccgcggtcctcgtgccagtgagcgccgcggccgccgcagccatgaccgtggagttcgaggagtgcgtcaaggactccccgcgcttcagctggtgaagctgtgcagtggcatggtggaagccggtaaggcctacgtcagcaccagcaggcttttcgtgagcggcgtccgcgacctgtcccagcagtgccagggcgacaccgtcatctcggtgaggggccgactgacctctgacctcaaggaatgtctgcagaggttcgctgacagcctacaggaggtggtgaactaccacatgatcctgtttgaccaggcccagaggtccgtgcggcagcagctccagagctttgtcaaagagcctggtggcgcatgcctgtaatcccagctgctagggaagctgaggcaggagaatcacttgaactcgcgaggcagagattgcggtgagccgagacagcaccattgcactccagcc

SEQ ID NO: 61389 - DNA, 3656 bp, Homo sapiens
acgagcggtccgggccggcgcggctgccgctcggcgccgcggtcctcgtgccagtgagcgccgcggccgccgcagccatgaccgtggagttcgaggagtgcgtcaaggactccccgcgcttcagggcgaccattgacgaggtggagacggacgtggtggagattgaggccaaactggacaagctggtgaagctgtgcagtggcatggtggaagccggtaaggcctacgtcagcaccagcaggcttttcgtgagcggcgtccgcgacctgtcccagcagtgccagggcgacaccgtcatctcggaatgtctgcagaggttcgctgacagcctacaggaggtggtgaactaccacatgatcctgtttgaccaggcccagaggtccgtgcggcagcagctccagagctttgtcaaagaggatgtgcggaagttcaaggagacaaagaagcagtttgacaaggtgcgggaggacctggagctgtccctggtgaggaacgcccaggccccgaggcaccggccccacgaggtggaggaagccaccggggccctcaccctcaccaggaagtgcttccgccacctggcactggactatgtgctccagatcaatgttctgcaggccaagaagaagtttgagatcctggactctatgctgtccttcatgcacgcccagtccagcttcttccagcagggctacagcctcctgcaccagctggacccctacatgaagaagctggcagccgagctggaccagctggtgatcgactctgcggtggaaaagcgtgagatggagcgaaagcacgccgccatccagcagcggacgctgctgcaggacttctcctacgatgagtccaaagtggagtttgacgtggacgcgcccagtggggtggtgatggagggctacctcttcaagagggccagcaacgctttcaagacatggaaccggcgctggttctccattcagaacagccagctggtctaccagaagaagctcaaggatgccctcaccgtggtggtggatgacctccgcctgtgctctgtgaagccgtgtgaggacatcgagcggaggttctgcttcgaggtgctgtcacccaccaagagctgcatgctgcaggctgactccgagaagctgcggcaagcctgggtccaggctgtgcaggccagcatcgcctccgcctaccgcgagagccctgacagttgctatagcgagaggctggaccgcacagcatccccgtccacgagcagcatcgactccgccaccgacactcgggagcgtggcgtgaagggcgagagtgtgctgcagcgtgtgcagagtgtggccggcaacagccagtgcggcgactgcggccagccggacccccgctgggccagcatcaacctgggcgtgctgctctgcattgagtgctccggcatccacaggagcctgggtgtccactgctccaaggtgcggtccctgacgctggactcgtgggagcctgagctgctaaagctgatgtgtgagcttggaaacagcgctgtgaatcagatctatgaggcccagtgtgagggtgcaggcagcaggaaacccacagccagcagctcccggcaggacaaggaggcctggatcaaggacaaatacgtggaaaagaagtttctgcggaaggcgcccatggcaccagccctggaggccccaagacgctggagggtgcagaagtgcctgcggccccacagctctccccgcgctcccactgcccgccgcaaggtccggcttgagcccgttctgccctgtgtggccgctctgtcctcagtgggcaccctggatcgtaagttccgccgagactccctcttctgtcccgacgagctggactcgctcttctcctacttcgacgcaggggccgcaggggctggccctcgcaagggtgcagagtcggaggagtccagcggtgaggcagacggggacactgaggccgaggcctggggcctggcggacgtgcgcgagctgcacccggggctcttggcgcaccgcgcagcgcgtgcccgcgaccttcctgcgctggcggcggcgctggcccacggggccgaggtcaactgggcggacgcggaggatgagggcaagacgccgctggtgcaggccgtgctagggggctccttgatcgtctgtgagttcctgctgcaaaacggagcggacgtgaaccaaagagacagccggggccgggcgcccctgcaccacgccacgctgctgggccgcaccggccaggtttgcctgttcctgaagcggggcgcggaccagcacgccctggaccaagagcagcgggacccgttggccatcgcagtgcaggcggccaacgctgacatcgtgacactgctccgtctggcgcgcatggcggaggaaatgcgcgaggccgaggctgcccctggtcccccgggcgccctggcgggcagccccacggagctccagttccgcaggtgtatccaggagttcatcagcctccacctggaagagagctagggccgggcaggccgggcagctgccaccccgcccggcccgacgccccgcatgccccgaagtccctggcgcccacccggccgcggccctgcgtgtgacccgcgggtcgatacctggcagccccagtgctggggcgccgcggccctgctcgcccaggaggagagcgagggccccacactgagtctcttgaagcctcacgtttccctgggggggtgctgcatcgtcgggtgtccctcaccccacctggggaacctctgtcttcaggtcaccccttttcaggggcctgggttgctcatgtcacaagccacttttaaggcccgtgtcacctgtgtccctgtgtcctcagggcctgtgttacttcgtgccccacttctgcccagaacactgacctgttagctggctccctcctgcacaccccagagcctcctcccagggcagaaagggtggcccatccagggaaccaacgagtacctcacttagtgaccccagcatccaggctggcgtcgcgggtgctgggcgggaggggctctggcctgggtcctcagccctggctggacgcgggcgtcccaaggccacgtggctggccacgaaggtccccgtgccagacagccccagccgcatcccggcctcctccggaggcaccttctcctggtactcggcccagagcctgcgcataaagccactttgccactttgcagccctcatctcatgttctttgtagcggaccgagtgggtttgctataggcctcgtctgactttgtcttgcgtcttttctctgtggactcttgaggacgcctgagccccagccctgcccctgaccagcctcccccttgggtccaggggtctttcggctcatattgcagggcctgccaatgccttcacgcaccccttccccaaaggtgcccggcagggaggcagggcctcccccactcagcgcaggtcaggctaaggccagtcggctggtcactatgcaatgctgccctggggaggctccctgagggcacagtgggcgctggacccggccccccaactctcttgcctgctgcctgtgaccctgaagaacagaattgattcttgcccctctccctgtgtgagcttggccccgcctcttgccccaggcccctgctggcgggtctcaccccccacccctcgctttgaataaagcacttgcgccca

SEQ ID NO: 61390 - DNA, 3741 bp, Homo sapiens
acgagcggtccgggccggcgcggctgccgctcggcgccgcggtcctcgtgccagtgagcgccgcggccgccgcagccatgaccgtggagttcgaggagtgcgtcaaggactccccgcgcttcagacgtgtgcacaagtgtgcatcggctttgcttggtggacatttggcaaacgacaatggaggcaaagaaacctctctgcatccccaaggcgaccattgacgaggtggagacggacgtggtggagattgaggccaaactggacaagctggtgaagctgtgcagtggcatggtggaagccggtaaggcctacgtcagcaccagcaggcttttcgtgagcggcgtccgcgacctgtcccagcagtgccagggcgacaccgtcatctcggaatgtctgcagaggttcgctgacagcctacaggaggtggtgaactaccacatgatcctgtttgaccaggcccagaggtccgtgcggcagcagctccagagctttgtcaaagaggatgtgcggaagttcaaggagacaaagaagcagtttgacaaggtgcgggaggacctggagctgtccctggtgaggaacgcccaggccccgaggcaccggccccacgaggtggaggaagccaccggggccctcaccctcaccaggaagtgcttccgccacctggcactggactatgtgctccagatcaatgttctgcaggccaagaagaagtttgagatcctggactctatgctgtccttcatgcacgcccagtccagcttcttccagcagggctacagcctcctgcaccagctggacccctacatgaagaagctggcagccgagctggaccagctggtgatcgactctgcggtggaaaagcgtgagatggagcgaaagcacgccgccatccagcagcggacgctgctgcaggacttctcctacgatgagtccaaagtggagtttgacgtggacgcgcccagtggggtggtgatggagggctacctcttcaagagggccagcaacgctttcaagacatggaaccggcgctggttctccattcagaacagccagctggtctaccagaagaagctcaaggatgccctcaccgtggtggtggatgacctccgcctgtgctctgtgaagccgtgtgaggacatcgagcggaggttctgcttcgaggtgctgtcacccaccaagagctgcatgctgcaggctgactccgagaagctgcggcaagcctgggtccaggctgtgcaggccagcatcgcctccgcctaccgcgagagccctgacagttgctatagcgagaggctggaccgcacagcatccccgtccacgagcagcatcgactccgccaccgacactcgggagcgtggcgtgaagggcgagagtgtgctgcagcgtgtgcagagtgtggccggcaacagccagtgcggcgactgcggccagccggacccccgctgggccagcatcaacctgggcgtgctgctctgcattgagtgctccggcatccacaggagcctgggtgtccactgctccaaggtgcggtccctgacgctggactcgtgggagcctgagctgctaaagctgatgtgtgagcttggaaacagcgctgtgaatcagatctatgaggcccagtgtgagggtgcaggcagcaggaaacccacagccagcagctcccggcaggacaaggaggcctggatcaaggacaaatacgtggaaaagaagtttctgcggaaggcgcccatggcaccagccctggaggccccaagacgctggagggtgcagaagtgcctgcggccccacagctctccccgcgctcccactgcccgccgcaaggtccggcttgagcccgttctgccctgtgtggccgctctgtcctcagtgggcaccctggatcgtaagttccgccgagactccctcttctgtcccgacgagctggactcgctcttctcctacttcgacgcaggggccgcaggggctggccctcgcaagggtgcagagtcggaggagtccagcggtgaggcagacggggacactgaggccgaggcctggggcctggcggacgtgcgcgagctgcacccggggctcttggcgcaccgcgcagcgcgtgcccgcgaccttcctgcgctggcggcggcgctggcccacggggccgaggtcaactgggcggacgcggaggatgagggcaagacgccgctggtgcaggccgtgctagggggctccttgatcgtctgtgagttcctgctgcaaaacggagcggacgtgaaccaaagagacagccggggccgggcgcccctgcaccacgccacgctgctgggccgcaccggccaggtttgcctgttcctgaagcggggcgcggaccagcacgccctggaccaagagcagcgggacccgttggccatcgcagtgcaggcggccaacgctgacatcgtgacactgctccgtctggcgcgcatggcggaggaaatgcgcgaggccgaggctgcccctggtcccccgggcgccctggcgggcagccccacggagctccagttccgcaggtgtatccaggagttcatcagcctccacctggaagagagctagggccgggcaggccgggcagctgccaccccgcccggcccgacgccccgcatgccccgaagtccctggcgcccacccggccgcggccctgcgtgtgacccgcgggtcgatacctggcagccccagtgctggggcgccgcggccctgctcgcccaggaggagagcgagggccccacactgagtctcttgaagcctcacgtttccctgggggggtgctgcatcgtcgggtgtccctcaccccacctggggaacctctgtcttcaggtcaccccttttcaggggcctgggttgctcatgtcacaagccacttttaaggcccgtgtcacctgtgtccctgtgtcctcagggcctgtgttacttcgtgccccacttctgcccagaacactgacctgttagctggctccctcctgcacaccccagagcctcctcccagggcagaaagggtggcccatccagggaaccaacgagtacctcacttagtgaccccagcatccaggctggcgtcgcgggtgctgggcgggaggggctctggcctgggtcctcagccctggctggacgcgggcgtcccaaggccacgtggctggccacgaaggtccccgtgccagacagccccagccgcatcccggcctcctccggaggcaccttctcctggtactcggcccagagcctgcgcataaagccactttgccactttgcagccctcatctcatgttctttgtagcggaccgagtgggtttgctataggcctcgtctgactttgtcttgcgtcttttctctgtggactcttgaggacgcctgagccccagccctgcccctgaccagcctcccccttgggtccaggggtctttcggctcatattgcagggcctgccaatgccttcacgcaccccttccccaaaggtgcccggcagggaggcagggcctcccccactcagcgcaggtcaggctaaggccagtcggctggtcactatgcaatgctgccctggggaggctccctgagggcacagtgggcgctggacccggccccccaactctcttgcctgctgcctgtgaccctgaagaacagaattgattcttgcccctctccctgtgtgagcttggccccgcctcttgccccaggcccctgctggcgggtctcaccccccacccctcgctttgaataaagcacttgcgccca

SEQ ID NO: 61391 - DNA, 3631 bp, Homo sapiens
acgagcggtccgggccggcgcggctgccgctcggcgccgcggtcctcgtgccagtgagcgccgcggccgccgcagccatgaccgtggagttcgaggagtgcgtcaaggactccccgcgcttcagggcgaccattgacgaggtggagacggacgtggtggagattgaggccaaactggacaagctggtgaagctgtgcagtggcatggtggaagccggtaaggcctacgtcagcaccagcaggcttttcgtgagcggcgtccgcgacctgtcccagcagtgccagggcgacaccgtcatctcggaatgtctgcagaggttcgctgacagcctacaggaggtggtgaactaccacatgatcctgtttgaccaggcccagaggtccgtgcggcagcagctccagagctttgtcaaagaggatgtgcggaagttcaaggagacaaagaagcagtttgacaaggtgcgggaggacctggagctgtccctggtgaggaacgcccaggccccgaggcaccggccccacgaggtggaggaagccaccggggccctcaccctcaccaggaagtgcttccgccacctggcactggactatgtgctccagatcaatgttctgcaggccaagaagaagtttgagatcctggactctatgctgtccttcatgcacgcccagtccagcttcttccagcagggctacagcctcctgcaccagctggacccctacatgaagaagctggcagccgagctggaccagctggtgatcgactctgcggtggaaaagcgtgagatggagcgaaagcacgccgccatccagcagcggacgctgctgcaggacttctcctacgatgagtccaaagtggagtttgacgtggacgcgcccagtggggtggtgatggagggctacctcttcaagagggccagcaacgctttcaagacatggaaccggcgctggttctccattcagaacagccagctggtctaccagaagaagctcaaggatgccctcaccgtggtggtggatgacctccgcctgtgctctgtgaagccgtgtgaggacatcgagcggaggttctgcttcgaggtgctgtcacccaccaagagctgcatgctgcaggctgactccgagaagctgcggcaagcctgggtccaggctgtgcaggccagcatcgcctccgcctaccgcgagagccctgacagttgctatagcgagaggctggaccgcacagcatccccgtccacgagcagcatcgactccgccaccgacactcgggagcgtggcgtgaagggcgagagtgtgctgcagcgtgtgcagagtgtggccggcaacagccagtgcggcgactgcggccagccggacccccgctgggccagcatcaacctgggcgtgctgctctgcattgagtgctccggcatccacaggagcctgggtgtccactgctccaaggtgcggtccctgacgctggactcgtgggagcctgagctgctaaagctgatgtgtgagcttggaaacagcgctgtgaatcagatctatgaggcccagtgtgagggtgcaggcagcaggaaacccacagccagcagctcccggcaggacaaggaggcctggatcaaggacaaatacgtggaaaagaagtttctgcggaaggcgcccatggcaccagccctggaggccccaagacgctggagggtgcagaagtgcctgcggccccacagctctccccgcgctcccactgcccgccgcaaggtccggcttgagcccgttctgccctgtgtggccgctctgtcctcagtgggcaccctggatcgtaagttccgccgagactccctcttctgtcccgacgagctggactcgctcttctcctacttcgacgcaggggccgcaggggctggccctcgcaagggtgcagagtcggaggagtccagcggtgaggcagacggggacactgaggccgaggcctggggcctggcggacgtgcgcgagctgcacccggggctcttggcgcaccgcgcagcgcgtgcccgcgaccttcctgcgctggcggcggcgctggcccacggggccgaggtcaactgggcggacgcggaggatgagggcaagacgccgctggtgcaggccgtgctagggggctccttgatcgtctgtgagttcctgctgcaaaacggagcggacgtgaaccaaagagacagccggggccgggcgcccctgcaccacgccacgctgctgggccgcaccggccaggtttgcctgttcctgaagcggggcgcggaccagcacgccctggaccaagagcagcgggacccgttggccatcgcagtgcaggcggccaacgctgacatcgtgacactgctccgtctggcgcgcatggcggaggaaatgcgcgaggccgaggctgcccctggtcccccgggcgccctggcgggcagccccacggagctccagttccgcaggtgtatccaggagttcatcagcctccacctggaagagagctagggccgggcaggccgggcagctgccaccccgcccggcccgacgccccgcatgccccgaagtccctggcgcccacccggccgcggccctgcgtgtgacccgcgggtcgatacctggcagccccagtgctggggcgccgcggccctgctcgcccaggaggagagcgagggccccacactgagtctcttgaagcctcacgtttccctgggggggtgctgcatcgtcgggtgtccctcaccccacctggggaacctctgtcttcaggtcaccccttttcaggggcctgggttgctcatgtcacaagccacttttaaggcccgtgtcacctgtgtccctgtgtcctcagggcctgtgttacttcgtgccccacttctgcccagaacactgacctgttagctggctccctcctgcacaccccagagcctcctcccagggcagaaagggtggcccatccagggaaccaacgagtacctcacttagtgaccccagcatccaggctggcgtcgcgggtgctgggcgggaggggctctggcctgggtcctcagccctggctggacgcgggcgtcccaaggccacgtggctggccacgaaggtccccgtgccagacagccccagccgcatcccggcctcctccggaggcaccttctcctggtactcggcccagagcctgcgcataaagccactttgccactttgcagccctcatctcatgttctttgtagcggaccgagtgggtttgctataggcctcgtctgactttgtcttgcgtcttttctctgtggactcttgaggacgcctgagccccagccctgcccctgaccagcctcccccttgggtccaggggtctttcggctcatattgcagggcctgccaatgccttcacgcaccccttccccaaaggtgcccggcagggaggcagggcctcccccactcagcgcaggtcaggctaaggccagtcggctggtcactatgcaatgctgccctggggaggctccctgagggcacagtgggcgctggacccggccccccaactctcttgcctgctgcctgtgaccctgaagaacagaattgattcttgcccctctccctgtgtgagcttggccccgcctcttgccccaggcccctggagttgggcaggcctctggagttgga

SEQ ID NO: 61392 - DNA, 3866 bp, Homo sapiens
cggtggtcacctctgtggcctcagtcactggctccttgcggggcctttgcttgcctgtgggacagcagccccgggcaccatcccgggcagaggttggctgcaggcaggagtggctattttgggataggggagagccccccaggagttggggacgggtccaccagtcaccaggagttggggacgggtccaccagtcaccaggagttggcagccgtcactcactggctttctccccctaccccctcctgctccggccctccagacgctgctgcaggtaagtgagcacgggccctgggcgggctgtgggtcgggggagaccagatggggcggtgcctttccctcctctaccccaagggcacttcagcaccaaggacacctcccaccagtctcggctcctgctgctgatgcggctgtgaggggctggctccggccagacctccacattccccgtggggttggcggcagctgtcccttcccatcccatgtggcctggggagcaggtggccgcccctcccctctgcttccctggcctgccagatggcgggacacacagggccctcagtgactcccaggcctcctgaatggggctctgtccgcccagctggccacatgaatggggcactcaggatgcggagggtgggggcgcagcttccttcctgatcgcagcctgctggtccctgcagggctggggtggggccggcactctcgggcccccagctgtgaacgtgaggggtctgccccacgggttgcagggctgggggccttgctcaggtcaagaagtggctgtggtgaacagagggtctctcgtctgagcgtgtggtccgtgggccgtgtggcagcctcagacaaggacctcacccccacctgtgctccgggaaagcacggagggtagcagggcccctggggtgggcactgagggggcgggttccatccccccaggacttctcctacgatgagtccaaagtggagtttgacgtggacgcgcccagtggggtggtgatggagggctacctcttcaagagggccagcaacgctttcaagacatggaaccggcgctggttctccattcagaacagccagctggtctaccagaagaagctcaaggatgccctcaccgtggtggtggatgacctccgcctgtgctctgtgaagccgtgtgaggacatcgagcggaggttctgcttcgaggtgctgtcacccaccaagagctgcatgctgcaggctgactccgagaagctgcggcaagcctgggtccaggctgtgcaggccagcatcgcctccgcctaccgcgagagccctgacagttgctatagcgagaggctggaccgcacagcatccccgtccacgagcagcatcgactccgccaccgacactcgggagcgtggcgtgaagggcgagagtgtgctgcagcgtgtgcagagtgtggccggcaacagccagtgcggcgactgcggccagccggacccccgctgggccagcatcaacctgggcgtgctgctctgcattgagtgctccggcatccacaggagcctgggtgtccactgctccaaggtgcggtccctgacgctggactcgtgggagcctgagctgctaaagctgatgtgtgagcttggaaacagcgctgtgaatcagatctatgaggcccagtgtgagggtgcaggcagcaggaaacccacagccagcagctcccggcaggacaaggaggcctggatcaaggacaaatacgtggaaaagaagtttctgcggaaggcgcccatggcaccagccctggaggccccaagacgctggagggtgcagaagtgcctgcggccccacagctctccccgcgctcccactgcccgccgcaaggtccggcttgagcccgttctgccctgtgtggccgctctgtcctcagtgggcaccctggatcgtaagttccgccgagactccctcttctgtcccgacgagctggactcgctcttctcctacttcgacgcaggggccgcaggggctggccctcgcagtctgagtagcgacagtggccttgggggcagctcggatggcagctcggacgtcctggctttcggctcgggctctgtggtggacagcgtcactgaggaggagggtgcagagtcggaggagtccagcggtgaggcagacggggacactgaggccgaggcctggggcctggcggacgtgcgcgagctgcacccggggctcttggcgcaccgcgcagcgcgtgcccgcgaccttcctgcgctggcggcggcgctggcccacggggccgaggtcaactgggcggacgcggaggatgagggcaagacgccgctggtgcaggccgtgctagggggctccttgatcgtctgtgagttcctgctgcaaaacggagcggacgtgaaccaaagagacagccggggccgggcgcccctgcaccacgccacgctgctgggccgcaccggccaggtttgcctgttcctgaagcggggcgcggaccagcacgccctggaccaagagcagcgggacccgttggccatcgcagtgcaggcggccaacgctgacatcgtgacactgctccgtctggcgcgcatggcggaggaaatgcgcgaggccgaggctgcccctggtcccccgggcgccctggcgggcagccccacggagctccagttccgcaggtgtatccaggagttcatcagcctccacctggaagagagctagggccgggcaggccgggcagctgccaccccgcccggcccgacgccccgcatgccccgaagtccctggcgcccacccggccgcggccctgcgtgtgacccgcgggtcgatacctggcagccccagtgctggggcgccgcggccctgctcgcccaggaggagagcgagggccccacactgagtctcttgaagcctcacgtttccctgggggggtgctgcatcgtcgggtgtccctcaccccacctggggaacctctgtcttcaggtcaccccttttcaggggcctgggttgctcatgtcacaagccacttttaaggcccgtgtcacctgtgtccctgtgtcctcagggcctgtgttacttcgtgccccacttctgcccagaacactgacctgttagctggctccctcctgcacaccccagagcctcctcccagggcagaaagggtggcccatccagggaaccaacgagtacctcacttagtgaccccagcatccaggctggcgtcgcgggtgctgggcgggaggggctctggcctgggtcctcagccctggctggacgcgggcgtcccaaggccacgtggctggccacgaaggtccccgtgccagacagccccagccgcatcccggcctcctccggaggcaccttctcctggtactcggcccagagcctgcgcataaagccactttgccactttgcagccctcatctcatgttctttgtagcggaccgagtgggtttgctataggcctcgtctgactttgtcttgcgtcttttctctgtggactcttgaggacgcctgagccccagccctgcccctgaccagcctcccccttgggtccaggggtctttcggctcatattgcagggcctgccaatgccttcacgcaccccttccccaaaggtgcccggcagggaggcagggcctcccccactcagcgcaggtcaggctaaggccagtcggctggtcactatgcaatgctgccctggggaggctccctgagggcacagtgggcgctggacccggccccccaactctcttgcctgctgcctgtgaccctgaagaacagaattgattcttgcccctctccctgtgtgagcttggccccgcctcttgccccaggcccctgctggcgggtctcaccccccacccctcgctttgaataaagcacttgcgccca

SEQ ID NO: 61393 - DNA, 3201 bp, Homo sapiens
cggtggtcacctctgtggcctcagtcactggctccttgcggggcctttgcttgcctgtgggacagcagccccgggcaccatcccgggcagaggttggctgcaggcaggagtggctattttgggataggggagagccccccaggagttggggacgggtccaccagtcaccaggagttggggacgggtccaccagtcaccaggagttggcagccgtcactcactggctttctccccctaccccctcctgctccggccctccagacgctgctgcaggacttctcctacgatgagtccaaagtggagtttgacgtggacgcgcccagtggggtggtgatggagggctacctcttcaagagggccagcaacgctttcaagacatggaaccggcgctggttctccattcagaacagccagctggtctaccagaagaagctcaaggatgccctcaccgtggtggtggatgacctccgcctgtgctctgtgaagccgtgtgaggacatcgagcggaggttctgcttcgaggtgctgtcacccaccaagagctgcatgctgcaggctgactccgagaagctgcggcaagcctgggtccaggctgtgcaggccagcatcgcctccgcctaccgcgagagccctgacagttgctatagcgagaggctggaccgcacagcatccccgtccacgagcagcatcgactccgccaccgacactcgggagcgtggcgtgaagggcgagagtgtgctgcagcgtgtgcagagtgtggccggcaacagccagtgcggcgactgcggccagccggacccccgctgggccagcatcaacctgggcgtgctgctctgcattgagtgctccggcatccacaggagcctgggtgtccactgctccaaggtgcggtccctgacgctggactcgtgggagcctgagctgctaaagctgatgtgtgagcttggaaacagcgctgtgaatcagatctatgaggcccagtgtgagggtgcaggcagcaggaaacccacagccagcagctcccggcaggacaaggaggcctggatcaaggacaaatacgtggaaaagaagtttctgcggaaggcgcccatggcaccagccctggaggccccaagacgctggagggtgcagaagtgcctgcggccccacagctctccccgcgctcccactgcccgccgcaaggtccggcttgagcccgttctgccctgtgtggccgctctgtcctcagtgggcaccctggatcgtaagttccgccgagactccctcttctgtcccgacgagctggactcgctcttctcctacttcgacgcaggggccgcaggggctggccctcgcagtctgagtagcgacagtggccttgggggcagctcggatggcagctcggacgtcctggctttcggctcgggctctgtggtggacagcgtcactgaggaggagggtgcagagtcggaggagtccagcggtgaggcagacggggacactgaggccgaggcctggggcctggcggacgtgcgcgagctgcacccggggctcttggcgcaccgcgcagcgcgtgcccgcgaccttcctgcgctggcggcggcgctggcccacggggccgaggtcaactgggcggacgcggaggatgagggcaagacgccgctggtgcaggccgtgctagggggctccttgatcgtctgtgagttcctgctgcaaaacggagcggacgtgaaccaaagagacagccggggccgggcgcccctgcaccacgccacgctgctgggccgcaccggccaggtttgcctgttcctgaagcggggcgcggaccagcacgccctggaccaagagcagcgggacccgttggccatcgcagtgcaggcggccaacgctgacatcgtgacactgctccgtctggcgcgcatggcggaggaaatgcgcgaggccgaggctgcccctggtcccccgggcgccctggcgggcagccccacggagctccagttccgcaggtgtatccaggagttcatcagcctccacctggaagagagctagggccgggcaggccgggcagctgccaccccgcccggcccgacgccccgcatgccccgaagtccctggcgcccacccggccgcggccctgcgtgtgacccgcgggtcgatacctggcagccccagtgctggggcgccgcggccctgctcgcccaggaggagagcgagggccccacactgagtctcttgaagcctcacgtttccctgggggggtgctgcatcgtcgggtgtccctcaccccacctggggaacctctgtcttcaggtcaccccttttcaggggcctgggttgctcatgtcacaagccacttttaaggcccgtgtcacctgtgtccctgtgtcctcagggcctgtgttacttcgtgccccacttctgcccagaacactgacctgttagctggctccctcctgcacaccccagagcctcctcccagggcagaaagggtggcccatccagggaaccaacgagtacctcacttagtgaccccagcatccaggctggcgtcgcgggtgctgggcgggaggggctctggcctgggtcctcagccctggctggacgcgggcgtcccaaggccacgtggctggccacgaaggtccccgtgccagacagccccagccgcatcccggcctcctccggaggcaccttctcctggtactcggcccagagcctgcgcataaagccactttgccactttgcagccctcatctcatgttctttgtagcggaccgagtgggtttgctataggcctcgtctgactttgtcttgcgtcttttctctgtggactcttgaggacgcctgagccccagccctgcccctgaccagcctcccccttgggtccaggggtctttcggctcatattgcagggcctgccaatgccttcacgcaccccttccccaaaggtgcccggcagggaggcagggcctcccccactcagcgcaggtcaggctaaggccagtcggctggtcactatgcaatgctgccctggggaggctccctgagggcacagtgggcgctggacccggccccccaactctcttgcctgctgcctgtgaccctgaagaacagaattgattcttgcccctctccctgtgtgagcttggccccgcctcttgccccaggcccctgctggcgggtctcaccccccacccctcgctttgaataaagcacttgcgccca

SEQ ID NO: 61394 - DNA, 2891 bp, Homo sapiens
agcagagagctggacacggggcttggggctcaggcagtcggcctccgggtctccaaggtgaagcaggaagtgggtggtcggggccgggtggtggctgagggcaggggccacagcggtgccgcccacaggatgccctcaccgtggtggtggatgacctccgcctgtgctctgtgaagccgtgtgaggacatcgagcggaggttctgcttcgaggtgctgtcacccaccaagagctgcatgctgcaggctgactccgagaagctgcggcaagcctgggtccaggctgtgcaggccagcatcgcctccgcctaccgcgagagccctgacagttgctatagcgagaggctggaccgcacagcatccccgtccacgagcagcatcgactccgccaccgacactcgggagcgtggcgtgaagggcgagagtgtgctgcagcgtgtgcagagtgtggccggcaacagccagtgcggcgactgcggccagccggacccccgctgggccagcatcaacctgggcgtgctgctctgcattgagtgctccggcatccacaggagcctgggtgtccactgctccaaggtgcggtccctgacgctggactcgtgggagcctgagctgctaaagctgatgtgtgagcttggaaacagcgctgtgaatcagatctatgaggcccagtgtgagggtgcaggcagcaggaaacccacagccagcagctcccggcaggacaaggaggcctggatcaaggacaaatacgtggaaaagaagtttctgcggaaggcgcccatggcaccagccctggaggccccaagacgctggagggtgcagaagtgcctgcggccccacagctctccccgcgctcccactgcccgccgcaaggtccggcttgagcccgttctgccctgtgtggccgctctgtcctcagtgggcaccctggatcgtaagttccgccgagactccctcttctgtcccgacgagctggactcgctcttctcctacttcgacgcaggggccgcaggggctggccctcgcagtctgagtagcgacagtggccttgggggcagctcggatggcagctcggacgtcctggctttcggctcgggctctgtggtggacagcgtcactgaggaggagggtgcagagtcggaggagtccagcggtgaggcagacggggacactgaggccgaggcctggggcctggcggacgtgcgcgagctgcacccggggctcttggcgcaccgcgcagcgcgtgcccgcgaccttcctgcgctggcggcggcgctggcccacggggccgaggtcaactgggcggacgcggaggatgagggcaagacgccgctggtgcaggccgtgctagggggctccttgatcgtctgtgagttcctgctgcaaaacggagcggacgtgaaccaaagagacagccggggccgggcgcccctgcaccacgccacgctgctgggccgcaccggccaggtttgcctgttcctgaagcggggcgcggaccagcacgccctggaccaagagcagcgggacccgttggccatcgcagtgcaggcggccaacgctgacatcgtgacactgctccgtctggcgcgcatggcggaggaaatgcgcgaggccgaggctgcccctggtcccccgggcgccctggcgggcagccccacggagctccagttccgcaggtgtatccaggagttcatcagcctccacctggaagagagctagggccgggcaggccgggcagctgccaccccgcccggcccgacgccccgcatgccccgaagtccctggcgcccacccggccgcggccctgcgtgtgacccgcgggtcgatacctggcagccccagtgctggggcgccgcggccctgctcgcccaggaggagagcgagggccccacactgagtctcttgaagcctcacgtttccctgggggggtgctgcatcgtcgggtgtccctcaccccacctggggaacctctgtcttcaggtcaccccttttcaggggcctgggttgctcatgtcacaagccacttttaaggcccgtgtcacctgtgtccctgtgtcctcagggcctgtgttacttcgtgccccacttctgcccagaacactgacctgttagctggctccctcctgcacaccccagagcctcctcccagggcagaaagggtggcccatccagggaaccaacgagtacctcacttagtgaccccagcatccaggctggcgtcgcgggtgctgggcgggaggggctctggcctgggtcctcagccctggctggacgcgggcgtcccaaggccacgtggctggccacgaaggtccccgtgccagacagccccagccgcatcccggcctcctccggaggcaccttctcctggtactcggcccagagcctgcgcataaagccactttgccactttgcagccctcatctcatgttctttgtagcggaccgagtgggtttgctataggcctcgtctgactttgtcttgcgtcttttctctgtggactcttgaggacgcctgagccccagccctgcccctgaccagcctcccccttgggtccaggggtctttcggctcatattgcagggcctgccaatgccttcacgcaccccttccccaaaggtgcccggcagggaggcagggcctcccccactcagcgcaggtcaggctaaggccagtcggctggtcactatgcaatgctgccctggggaggctccctgagggcacagtgggcgctggacccggccccccaactctcttgcctgctgcctgtgaccctgaagaacagaattgattcttgcccctctccctgtgtgagcttggccccgcctcttgccccaggcccctgctggcgggtctcaccccccacccctcgctttgaataaagcacttgcgccca

SEQ ID NO: 61395 - DNA, 2180 bp, Homo sapiens
acgagcggtccgggccggcgcggctgccgctcggcgccgcggtcctcgtgccagtgagcgccgcggccgccgcagccatgaccgtggagttcgaggagtgcgtcaaggactccccgcgcttcagggcgaccattgacgaggtggagacggacgtggtggagattgaggccaaactggacaagctggtgaagctgtgcagtggcatggtggaagccggtaaggcctacgtcagcaccagcaggcttttcgtgagcggcgtccgcgacctgtcccagcagtgccagggcgacaccgtcatctcggaatgtctgcagaggttcgctgacagcctacaggaggtggtgaactaccacatgatcctgtttgaccaggcccagaggtccgtgcggcagcagctccagagctttgtcaaagaggatgtgcggaagttcaaggagacaaagaagcagtttgacaaggtgcgggaggacctggagctgtccctggtgaggaacgcccaggccccgaggcaccggccccacgaggtggaggaagccaccggggccctcaccctcaccaggaagtgcttccgccacctggcactggactatgtgctccagatcaatgttctgcaggccaagaagaagtttgagatcctggactctatgctgtccttcatgcacgcccagtccagcttcttccagcagggctacagcctcctgcaccagctggacccctacatgaagaagctggcagccgagctggaccagctggtgatcgactctgcggtggaaaagcgtgagatggagcgaaagcacgccgccatccagcagcggacgctgctgcaggacttctcctacgatgagtccaaagtggagtttgacgtggacgcgcccagtggggtggtgatggagggctacctcttcaagagggccagcaacgctttcaagacatggaaccggcgctggttctccattcagaacagccagctggtctaccagaagaagctcaaggatgccctcaccgtggtggtggatgacctccgcctgtgctctgtgaagccgtgtgaggacatcgagcggaggttctgcttcgaggtgctgtcacccaccaagagctgcatgctgcaggctgactccgagaagctgcggcaagcctgggtccaggctgtgcaggccagcatcgcctccgcctaccgcgagagccctgacagttgctatagcgagaggctggaccgcacagcatccccgtccacgagcagcatcgactccgccaccgacactcgggagcgtggcgtgaagggcgagagtgtgctgcagcgtgtgcagagtgtggccggcaacagccagtgcggcgactgcggccagccggacccccgctgggccagcatcaacctgggcgtgctgctctgcattgagtgctccggcatccacaggagcctgggtgtccactgctccaaggtgcggtccctgacgctggactcgtgggagcctgagctgctaaagctgatgtgtgagcttggaaacagcgctgtgaatcagatctatgaggcccagtgtgagggtgcaggcagcaggaaacccacagccagcagctcccggcaggacaaggaggcctggatcaaggacaaatacgtggaaaagaagtttctgcggaaggcgcccatggcaccagccctggaggccccaagacgctggagggtgcagaagtgcctgcggccccacagctctccccgcgctcccactgcccgccgcaaggtccggcttgagcccgttctgccctgtgtggccgctctgtcctcagtgggcaccctggatcgtaagttccgccgagactccctcttctgtcccgacgagctggactcgctcttctcctacttcgacgcaggggccgcaggggctggccctcgcagtctgagtagcgacagtggccttgggggcagctcggatggcagctcggacgtcctggctttcggctcgggctctgtggtggacagcgtcactgaggaggctgacgaagagggtgcaacagtccgacagagagcaaaggcgaagaacacggggacacgcaggcccaggccggggcctgggcaaaccccacatgaccccagcctcggccacacgcagcggccgaaccgcgtgaggggacgcaccgacagcctggagccagatacatgaacataaccagggttctctcagata

SEQ ID NO: 61396 - DNA, 1096 bp, Homo sapiens
gcggccgccccgggtggagggcgtgcgcgtgggcagccgtgggcacctcgggaccgtccgcccccgctctgtgtctgcacctccactgggctgagcccctcccgggccctgcagtccagctctggccagggtcgtctgggtccgtgggggcgtcggcccctggtctctgacttgatcctgtgtccagagcagcgcgtggggaacaggcagctggagccgcgtttaaggcctggggtagggtgcctggaaacgtgaagtggtttgaatgacccaggggcttggaggggtggcggccgagaagagcggcggggaaggtcaggtagggggtaggggttgtgtgcacaccgagtctgcatgttttccatcattcgtggcgtgcaggcgtgtacacctgcgtgaactacatgttcacagacgtgtgcacaagtgtgcatcggctttgcttggtggacatttggcaaacgacaatggaggcaaagaaacctctctgcatccccaaggcgaccattgacgaggtggagacggacgtggtggagattgaggccaaactggacaaggtgaagggcgggcctggagcgccctgtgcccggccaagcttgggatggccacatggccagactcgccctccaggccttactaagccacttacaccccccatatgtggagcatgcgtgtggtgctccaggtcctggtccctgtgtcttagcatgtgtgttccagggtgcacatgtcacatgcacacatgtggctggccctgagtctcgtcccatctgggaggggctgggctgtggtgagtccccgacccacggtggctgcccgtcccctctgctgggctggtgacacggggacagctgctgtgtgggctgagccttggtgtggctggggctggggctgagaaaggggagggggcaacaggccgtggagaggggagccgtgtccatgagccccacatgggctgagaaagaggagggggcaacaggccgtggagctgggagtgggcagccttatccatgagccccacatgggctggttctgctggtcctgctggccctgggtcccctgcctggctcctggtccctcccagccgagccgtggc

SEQ ID NO: 61397 - DNA, 2383 bp, Homo sapiens
  misc_feature (1357)..(1357): n is a, c, g, or t
tgtaacgtggagcctggtcgccccagcccgggagagggggaccctgcccgcaccctcctggtctggggagggcctagtggcagcccaggtgcagtgggccggaggccaggggagcccgtgtaggggaaccgcctggcctctgttcagtgtgcccctcccctgggtggggcttcaggcgctgagtcatggctttggttggggggcagcctcaccctcctccccgtcctccaagctgctgaggaaatcctgggctgagcacagcagaggaggcctaggtccccaggactgaggaagggagagctgaggggctcccagcagtgggagcggctctcggggcctctgccagggcccaccctgtccccatgagcacgtccgtgagctcctgggtgcagccatccccccttgctggctctccagggacacgggcgccccaaacccgagggcggcagctctgggtgcagctgtctctgcatccggccctgctcaggggtggctgcaactcctggggtgtggcgctctctgctgccttctcctgggaggatggtcccttctctgttctgggatcctccagctgaggtagaggtcagggtccaggggctgcaggctgggcactggcggtcagcggacaccacagcgagattccctccatcgccccctgcttcgggattcagagtcctcttagccccttgggaacaagagagggctgctcagagaggacctagtgtccttctggggtggctgggacccttcaaggtccctggctggggcagcctggtgcctgcagctccagctcctaattgaggacacgccccatgtaaaccacaggcccctcccccgaggcctgggacaccggtcagggtagcaaggtacgagggactgtaggccctgatggcctctgctcctggacccctgccctagacctggagtcctggccccagcccgggccctgtggtgcccaatccccaggaggccagatggcccggacagccagtgagccgattgtgtggagggctgccgggatcctggccctgtttccctgttgcctgctcccggagggggtggtcacgtgcccgatccatctgcctcctgtcttccggggattctcccgccgaggcttctctggtgatgtcatgccttaactcttctctccccaggcagccccactgtcaggctgtcctggtgggagtgggctctgaggaggatggcctacccgtctttccagcggaccatgccgcttgcagctgtgaggttgggggagccgggggcgtctctccccagctggtctgggtcctcctggtgctgccaggaccgagagcagctgccctactgcccccaccctgtcccacagtgcatgggngccagacctggatgggctgcagtagtgcagtggggtgaggggaggtgccgcagggttgaggggctccagatgggtccagggttgactctgaactcctagaggagaggcgggtgaggctggctcagcccttggtgggcactgtccctgagggactcccagcggccggctgtcctgggagaggctggtccagccttcttccccgagggcacagcagcggctgcctctgcctgcctggggttgggggggcggggggaagtgcactgaacctggtcccagtcctgcccccgtagcaggcaggcgtctgtctcccagcctgtttcctgaaagccccttcccatggtggagcccctcagggaggtgcggggggaggtgaagccccgagggggctgaggctgcaggtgaccccagccagccccgttcttgctttagggcgaccattgacgaggtggagacggacgtggtggagattgaggccaaactggacaaggtgaagggcgggcctggagcgccctgtgcccggccaagcttgggatggccacatggccagactcgccctccaggccttactaagccacttacaccccccatatgtggagcatgcgtgtggtgctccaggtcctggtccctgtgtcttagcatgtgtgttccagggtgcacatgtcacatgcacacatgtggctggccctgagtctcgtcccatctgggaggggctgggctgtggtgagtccccgacccacggtggctgcccgtcccctctgctgggctggtgacacggggacagctgctgtgtgggctgagccttggtgtggctggggctggggctgagaaaggggagggggcaacaggccgtggagaggggagccgtgtccatgagccccacatgggctgagaaagaggagggggcaacaggccgtggagctgggagtgggcagccttatccatgagccccacatgggctggttctgctggtcctgctggccctgggtcccctgcctggctcctggtccctcccagccgagccgtggc

SEQ ID NO: 61398 - DNA, 5318 bp, Homo sapiens
  misc_feature (1357)..(1357): n is a, c, g, or t
tgtaacgtggagcctggtcgccccagcccgggagagggggaccctgcccgcaccctcctggtctggggagggcctagtggcagcccaggtgcagtgggccggaggccaggggagcccgtgtaggggaaccgcctggcctctgttcagtgtgcccctcccctgggtggggcttcaggcgctgagtcatggctttggttggggggcagcctcaccctcctccccgtcctccaagctgctgaggaaatcctgggctgagcacagcagaggaggcctaggtccccaggactgaggaagggagagctgaggggctcccagcagtgggagcggctctcggggcctctgccagggcccaccctgtccccatgagcacgtccgtgagctcctgggtgcagccatccccccttgctggctctccagggacacgggcgccccaaacccgagggcggcagctctgggtgcagctgtctctgcatccggccctgctcaggggtggctgcaactcctggggtgtggcgctctctgctgccttctcctgggaggatggtcccttctctgttctgggatcctccagctgaggtagaggtcagggtccaggggctgcaggctgggcactggcggtcagcggacaccacagcgagattccctccatcgccccctgcttcgggattcagagtcctcttagccccttgggaacaagagagggctgctcagagaggacctagtgtccttctggggtggctgggacccttcaaggtccctggctggggcagcctggtgcctgcagctccagctcctaattgaggacacgccccatgtaaaccacaggcccctcccccgaggcctgggacaccggtcagggtagcaaggtacgagggactgtaggccctgatggcctctgctcctggacccctgccctagacctggagtcctggccccagcccgggccctgtggtgcccaatccccaggaggccagatggcccggacagccagtgagccgattgtgtggagggctgccgggatcctggccctgtttccctgttgcctgctcccggagggggtggtcacgtgcccgatccatctgcctcctgtcttccggggattctcccgccgaggcttctctggtgatgtcatgccttaactcttctctccccaggcagccccactgtcaggctgtcctggtgggagtgggctctgaggaggatggcctacccgtctttccagcggaccatgccgcttgcagctgtgaggttgggggagccgggggcgtctctccccagctggtctgggtcctcctggtgctgccaggaccgagagcagctgccctactgcccccaccctgtcccacagtgcatgggngccagacctggatgggctgcagtagtgcagtggggtgaggggaggtgccgcagggttgaggggctccagatgggtccagggttgactctgaactcctagaggagaggcgggtgaggctggctcagcccttggtgggcactgtccctgagggactcccagcggccggctgtcctgggagaggctggtccagccttcttccccgagggcacagcagcggctgcctctgcctgcctggggttgggggggcggggggaagtgcactgaacctggtcccagtcctgcccccgtagcaggcaggcgtctgtctcccagcctgtttcctgaaagccccttcccatggtggagcccctcagggaggtgcggggggaggtgaagccccgagggggctgaggctgcaggtgaccccagccagccccgttcttgctttagggcgaccattgacgaggtggagacggacgtggtggagattgaggccaaactggacaagctggtgaagctgtgcagtggcatggtggaagccggtaaggcctacgtcagcaccagcaggcttttcgtgagcggcgtccgcgacctgtcccagcagtgccagggcgacaccgtcatctcggaatgtctgcagaggttcgctgacagcctacaggaggtggtgaactaccacatgatcctgtttgaccaggcccagaggtccgtgcggcagcagctccagagctttgtcaaagaggatgtgcggaagttcaaggagacaaagaagcagtttgacaaggtgcgggaggacctggagctgtccctggtgaggaacgcccaggccccgaggcaccggccccacgaggtggaggaagccaccggggccctcaccctcaccaggaagtgcttccgccacctggcactggactatgtgctccagatcaatgttctgcaggccaagaagaagtttgagatcctggactctatgctgtccttcatgcacgcccagtccagcttcttccagcagggctacagcctcctgcaccagctggacccctacatgaagaagctggcagccgagctggaccagctggtgatcgactctgcggtggaaaagcgtgagatggagcgaaagcacgccgccatccagcagcggacgctgctgcaggacttctcctacgatgagtccaaagtggagtttgacgtggacgcgcccagtggggtggtgatggagggctacctcttcaagagggccagcaacgctttcaagacatggaaccggcgctggttctccattcagaacagccagctggtctaccagaagaagctcaaggatgccctcaccgtggtggtggatgacctccgcctgtgctctgtgaagccgtgtgaggacatcgagcggaggttctgcttcgaggtgctgtcacccaccaagagctgcatgctgcaggctgactccgagaagctgcggcaagcctgggtccaggctgtgcaggccagcatcgcctccgcctaccgcgagagccctgacagttgctatagcgagaggctggaccgcacagcatccccgtccacgagcagcatcgactccgccaccgacactcgggagcgtggcgtgaagggcgagagtgtgctgcagcgtgtgcagagtgtggccggcaacagccagtgcggcgactgcggccagccggacccccgctgggccagcatcaacctgggcgtgctgctctgcattgagtgctccggcatccacaggagcctgggtgtccactgctccaaggtgcggtccctgacgctggactcgtgggagcctgagctgctaaagctgatgtgtgagcttggaaacagcgctgtgaatcagatctatgaggcccagtgtgagggtgcaggcagcaggaaacccacagccagcagctcccggcaggacaaggaggcctggatcaaggacaaatacgtggaaaagaagtttctgcggaaggcgcccatggcaccagccctggaggccccaagacgctggagggtgcagaagtgcctgcggccccacagctctccccgcgctcccactgcccgccgcaaggtccggcttgagcccgttctgccctgtgtggccgctctgtcctcagtgggcaccctggatcgtaagttccgccgagactccctcttctgtcccgacgagctggactcgctcttctcctacttcgacgcaggggccgcaggggctggccctcgcaagggtgcagagtcggaggagtccagcggtgaggcagacggggacactgaggccgaggcctggggcctggcggacgtgcgcgagctgcacccggggctcttggcgcaccgcgcagcgcgtgcccgcgaccttcctgcgctggcggcggcgctggcccacggggccgaggtcaactgggcggacgcggaggatgagggcaagacgccgctggtgcaggccgtgctagggggctccttgatcgtctgtgagttcctgctgcaaaacggagcggacgtgaaccaaagagacagccggggccgggcgcccctgcaccacgccacgctgctgggccgcaccggccaggtttgcctgttcctgaagcggggcgcggaccagcacgccctggaccaagagcagcgggacccgttggccatcgcagtgcaggcggccaacgctgacatcgtgacactgctccgtctggcgcgcatggcggaggaaatgcgcgaggccgaggctgcccctggtcccccgggcgccctggcgggcagccccacggagctccagttccgcaggtgtatccaggagttcatcagcctccacctggaagagagctagggccgggcaggccgggcagctgccaccccgcccggcccgacgccccgcatgccccgaagtccctggcgcccacccggccgcggccctgcgtgtgacccgcgggtcgatacctggcagccccagtgctggggcgccgcggccctgctcgcccaggaggagagcgagggccccacactgagtctcttgaagcctcacgtttccctgggggggtgctgcatcgtcgggtgtccctcaccccacctggggaacctctgtcttcaggtcaccccttttcaggggcctgggttgctcatgtcacaagccacttttaaggcccgtgtcacctgtgtccctgtgtcctcagggcctgtgttacttcgtgccccacttctgcccagaacactgacctgttagctggctccctcctgcacaccccagagcctcctcccagggcagaaagggtggcccatccagggaaccaacgagtacctcacttagtgaccccagcatccaggctggcgtcgcgggtgctgggcgggaggggctctggcctgggtcctcagccctggctggacgcgggcgtcccaaggccacgtggctggccacgaaggtccccgtgccagacagccccagccgcatcccggcctcctccggaggcaccttctcctggtactcggcccagagcctgcgcataaagccactttgccactttgcagccctcatctcatgttctttgtagcggaccgagtgggtttgctataggcctcgtctgactttgtcttgcgtcttttctctgtggactcttgaggacgcctgagccccagccctgcccctgaccagcctcccccttgggtccaggggtctttcggctcatattgcagggcctgccaatgccttcacgcaccccttccccaaaggtgcccggcagggaggcagggcctcccccactcagcgcaggtcaggctaaggccagtcggctggtcactatgcaatgctgccctggggaggctccctgagggcacagtgggcgctggacccggccccccaactctcttgcctgctgcctgtgaccctgaagaacagaattgattcttgcccctctccctgtgtgagcttggccccgcctcttgccccaggcccctgctggcgggtctcaccccccacccctcgctttgaataaagcacttgcgccca

SEQ ID NO: 61399 - DNA, 547 bp, Homo sapiens
acgagcggtccgggccggcgcggctgccgctcggcgccgcggtcctcgtgccagtgagcgccgcggccgccgcagccatgaccgtggagttcgaggagtgcgtcaaggactccccgcgcttcagggcgaccattgacgaggtggagacggacgtggtggagattgaggccaaactggacaagctggtgaagctgtgcagtggcatggtggaagccggtaaggcctacgtcagcaccagcaggcttttcgtgagcggcgtccgcgacctgtcccagcagtgccagggcgacaccgtcatctcggaatgtctgcagaggttcgctgacagcctacaggaggtggtgaactaccacatgatcctgtttgaccaggcccagaggtccgtgcggcagcagctccagagctttgtcaaagagtgagtggcccccagggctgggggaagaacactgaggccacgctccctcccttggaggggaagggggtctggggcagagcagaggcaccttgggcccaggcctccaggctgtgcagcggctccacaaggcag

SEQ ID NO: 61400 - DNA, 4031 bp, Homo sapiens
gcggccgccccgggtggagggcgtgcgcgtgggcagccgtgggcacctcgggaccgtccgcccccgctctgtgtctgcacctccactgggctgagcccctcccgggccctgcagtccagctctggccagggtcgtctgggtccgtgggggcgtcggcccctggtctctgacttgatcctgtgtccagagcagcgcgtggggaacaggcagctggagccgcgtttaaggcctggggtagggtgcctggaaacgtgaagtggtttgaatgacccaggggcttggaggggtggcggccgagaagagcggcggggaaggtcaggtagggggtaggggttgtgtgcacaccgagtctgcatgttttccatcattcgtggcgtgcaggcgtgtacacctgcgtgaactacatgttcacagacgtgtgcacaagtgtgcatcggctttgcttggtggacatttggcaaacgacaatggaggcaaagaaacctctctgcatccccaaggcgaccattgacgaggtggagacggacgtggtggagattgaggccaaactggacaagctggtgaagctgtgcagtggcatggtggaagccggtaaggcctacgtcagcaccagcaggcttttcgtgagcggcgtccgcgacctgtcccagcagtgccagggcgacaccgtcatctcggaatgtctgcagaggttcgctgacagcctacaggaggtggtgaactaccacatgatcctgtttgaccaggcccagaggtccgtgcggcagcagctccagagctttgtcaaagaggatgtgcggaagttcaaggagacaaagaagcagtttgacaaggtgcgggaggacctggagctgtccctggtgaggaacgcccaggccccgaggcaccggccccacgaggtggaggaagccaccggggccctcaccctcaccaggaagtgcttccgccacctggcactggactatgtgctccagatcaatgttctgcaggccaagaagaagtttgagatcctggactctatgctgtccttcatgcacgcccagtccagcttcttccagcagggctacagcctcctgcaccagctggacccctacatgaagaagctggcagccgagctggaccagctggtgatcgactctgcggtggaaaagcgtgagatggagcgaaagcacgccgccatccagcagcggacgctgctgcaggacttctcctacgatgagtccaaagtggagtttgacgtggacgcgcccagtggggtggtgatggagggctacctcttcaagagggccagcaacgctttcaagacatggaaccggcgctggttctccattcagaacagccagctggtctaccagaagaagctcaaggatgccctcaccgtggtggtggatgacctccgcctgtgctctgtgaagccgtgtgaggacatcgagcggaggttctgcttcgaggtgctgtcacccaccaagagctgcatgctgcaggctgactccgagaagctgcggcaagcctgggtccaggctgtgcaggccagcatcgcctccgcctaccgcgagagccctgacagttgctatagcgagaggctggaccgcacagcatccccgtccacgagcagcatcgactccgccaccgacactcgggagcgtggcgtgaagggcgagagtgtgctgcagcgtgtgcagagtgtggccggcaacagccagtgcggcgactgcggccagccggacccccgctgggccagcatcaacctgggcgtgctgctctgcattgagtgctccggcatccacaggagcctgggtgtccactgctccaaggtgcggtccctgacgctggactcgtgggagcctgagctgctaaagctgatgtgtgagcttggaaacagcgctgtgaatcagatctatgaggcccagtgtgagggtgcaggcagcaggaaacccacagccagcagctcccggcaggacaaggaggcctggatcaaggacaaatacgtggaaaagaagtttctgcggaaggcgcccatggcaccagccctggaggccccaagacgctggagggtgcagaagtgcctgcggccccacagctctccccgcgctcccactgcccgccgcaaggtccggcttgagcccgttctgccctgtgtggccgctctgtcctcagtgggcaccctggatcgtaagttccgccgagactccctcttctgtcccgacgagctggactcgctcttctcctacttcgacgcaggggccgcaggggctggccctcgcaagggtgcagagtcggaggagtccagcggtgaggcagacggggacactgaggccgaggcctggggcctggcggacgtgcgcgagctgcacccggggctcttggcgcaccgcgcagcgcgtgcccgcgaccttcctgcgctggcggcggcgctggcccacggggccgaggtcaactgggcggacgcggaggatgagggcaagacgccgctggtgcaggccgtgctagggggctccttgatcgtctgtgagttcctgctgcaaaacggagcggacgtgaaccaaagagacagccggggccgggcgcccctgcaccacgccacgctgctgggccgcaccggccaggtttgcctgttcctgaagcggggcgcggaccagcacgccctggaccaagagcagcgggacccgttggccatcgcagtgcaggcggccaacgctgacatcgtgacactgctccgtctggcgcgcatggcggaggaaatgcgcgaggccgaggctgcccctggtcccccgggcgccctggcgggcagccccacggagctccagttccgcaggtgtatccaggagttcatcagcctccacctggaagagagctagggccgggcaggccgggcagctgccaccccgcccggcccgacgccccgcatgccccgaagtccctggcgcccacccggccgcggccctgcgtgtgacccgcgggtcgatacctggcagccccagtgctggggcgccgcggccctgctcgcccaggaggagagcgagggccccacactgagtctcttgaagcctcacgtttccctgggggggtgctgcatcgtcgggtgtccctcaccccacctggggaacctctgtcttcaggtcaccccttttcaggggcctgggttgctcatgtcacaagccacttttaaggcccgtgtcacctgtgtccctgtgtcctcagggcctgtgttacttcgtgccccacttctgcccagaacactgacctgttagctggctccctcctgcacaccccagagcctcctcccagggcagaaagggtggcccatccagggaaccaacgagtacctcacttagtgaccccagcatccaggctggcgtcgcgggtgctgggcgggaggggctctggcctgggtcctcagccctggctggacgcgggcgtcccaaggccacgtggctggccacgaaggtccccgtgccagacagccccagccgcatcccggcctcctccggaggcaccttctcctggtactcggcccagagcctgcgcataaagccactttgccactttgcagccctcatctcatgttctttgtagcggaccgagtgggtttgctataggcctcgtctgactttgtcttgcgtcttttctctgtggactcttgaggacgcctgagccccagccctgcccctgaccagcctcccccttgggtccaggggtctttcggctcatattgcagggcctgccaatgccttcacgcaccccttccccaaaggtgcccggcagggaggcagggcctcccccactcagcgcaggtcaggctaaggccagtcggctggtcactatgcaatgctgccctggggaggctccctgagggcacagtgggcgctggacccggccccccaactctcttgcctgctgcctgtgaccctgaagaacagaattgattcttgcccctctccctgtgtgagcttggccccgcctcttgccccaggcccctgctggcgggtctcaccccccacccctcgctttgaataaagcacttgcgccca

SEQ ID NO: 61401 - DNA, 3217 bp, Homo sapiens
caggtggtccgccccggaggtacgggatcttccgcacctggcactggactatgtgctccagatcaatgttctgcaggccaagaagaagtttgagatcctggactctatgctgtccttcatgcacgcccagtccagcttcttccagcagggctacagcctcctgcaccagctggacccctacatgaagaagctggcagccgagctggaccagctggtgatcgactctgcggtggaaaagcgtgagatggagcgaaagcacgccgccatccagcagcggacgctgctgcaggacttctcctacgatgagtccaaagtggagtttgacgtggacgcgcccagtggggtggtgatggagggctacctcttcaagagggccagcaacgctttcaagacatggaaccggcgctggttctccattcagaacagccagctggtctaccagaagaagctcaaggatgccctcaccgtggtggtggatgacctccgcctgtgctctgtgaagccgtgtgaggacatcgagcggaggttctgcttcgaggtgctgtcacccaccaagagctgcatgctgcaggctgactccgagaagctgcggcaagcctgggtccaggctgtgcaggccagcatcgcctccgcctaccgcgagagccctgacagttgctatagcgagaggctggaccgcacagcatccccgtccacgagcagcatcgactccgccaccgacactcgggagcgtggcgtgaagggcgagagtgtgctgcagcgtgtgcagagtgtggccggcaacagccagtgcggcgactgcggccagccggacccccgctgggccagcatcaacctgggcgtgctgctctgcattgagtgctccggcatccacaggagcctgggtgtccactgctccaaggtgcggtccctgacgctggactcgtgggagcctgagctgctaaagctgatgtgtgagcttggaaacagcgctgtgaatcagatctatgaggcccagtgtgagggtgcaggcagcaggaaacccacagccagcagctcccggcaggacaaggaggcctggatcaaggacaaatacgtggaaaagaagtttctgcggaaggcgcccatggcaccagccctggaggccccaagacgctggagggtgcagaagtgcctgcggccccacagctctccccgcgctcccactgcccgccgcaaggtccggcttgagcccgttctgccctgtgtggccgctctgtcctcagtgggcaccctggatcgtaagttccgccgagactccctcttctgtcccgacgagctggactcgctcttctcctacttcgacgcaggggccgcaggggctggccctcgcagtctgagtagcgacagtggccttgggggcagctcggatggcagctcggacgtcctggctttcggctcgggctctgtggtggacagcgtcactgaggaggagggtgcagagtcggaggagtccagcggtgaggcagacggggacactgaggccgaggcctggggcctggcggacgtgcgcgagctgcacccggggctcttggcgcaccgcgcagcgcgtgcccgcgaccttcctgcgctggcggcggcgctggcccacggggccgaggtcaactgggcggacgcggaggatgagggcaagacgccgctggtgcaggccgtgctagggggctccttgatcgtctgtgagttcctgctgcaaaacggagcggacgtgaaccaaagagacagccggggccgggcgcccctgcaccacgccacgctgctgggccgcaccggccaggtttgcctgttcctgaagcggggcgcggaccagcacgccctggaccaagagcagcgggacccgttggccatcgcagtgcaggcggccaacgctgacatcgtgacactgctccgtctggcgcgcatggcggaggaaatgcgcgaggccgaggctgcccctggtcccccgggcgccctggcgggcagccccacggagctccagttccgcaggtgtatccaggagttcatcagcctccacctggaagagagctagggccgggcaggccgggcagctgccaccccgcccggcccgacgccccgcatgccccgaagtccctggcgcccacccggccgcggccctgcgtgtgacccgcgggtcgatacctggcagccccagtgctggggcgccgcggccctgctcgcccaggaggagagcgagggccccacactgagtctcttgaagcctcacgtttccctgggggggtgctgcatcgtcgggtgtccctcaccccacctggggaacctctgtcttcaggtcaccccttttcaggggcctgggttgctcatgtcacaagccacttttaaggcccgtgtcacctgtgtccctgtgtcctcagggcctgtgttacttcgtgccccacttctgcccagaacactgacctgttagctggctccctcctgcacaccccagagcctcctcccagggcagaaagggtggcccatccagggaaccaacgagtacctcacttagtgaccccagcatccaggctggcgtcgcgggtgctgggcgggaggggctctggcctgggtcctcagccctggctggacgcgggcgtcccaaggccacgtggctggccacgaaggtccccgtgccagacagccccagccgcatcccggcctcctccggaggcaccttctcctggtactcggcccagagcctgcgcataaagccactttgccactttgcagccctcatctcatgttctttgtagcggaccgagtgggtttgctataggcctcgtctgactttgtcttgcgtcttttctctgtggactcttgaggacgcctgagccccagccctgcccctgaccagcctcccccttgggtccaggggtctttcggctcatattgcagggcctgccaatgccttcacgcaccccttccccaaaggtgcccggcagggaggcagggcctcccccactcagcgcaggtcaggctaaggccagtcggctggtcactatgcaatgctgccctggggaggctccctgagggcacagtgggcgctggacccggccccccaactctcttgcctgctgcctgtgaccctgaagaacagaattgattcttgcccctctccctgtgtgagcttggccccgcctcttgccccaggcccctgctggcgggtctcaccccccacccctcgctttgaataaagcacttgcgccca

SEQ ID NO: 61402 - DNA, 997 bp, Homo sapiens
tgtgcaggcatgtttgtgcatgaacatgtttgcacatgtgtgcttgattgtgtatgtgtgggtgtgcacgcgcgcgctgggtctcttgggatctgctggcaagtcagcatgtgtgtggaggcacggggagcctctgtatccctggagccctcaccaggaggctcaggagccttggagtgggaggctcagggccagccaggagagtggcccccagccctgggcagaggaactggggccatcctctgctctcccagggcagaaagggtggcccatccagggaaccaacgagtacctcacttagtgaccccagcatccaggctggcgtcgcgggtgctgggcgggaggggctctggcctgggtcctcagccctggctggacgcgggcgtcccaaggccacgtggctggccacgaaggtccccgtgccagacagccccagccgcatcccggcctcctccggaggcaccttctcctggtactcggcccagagcctgcgcataaagccactttgccactttgcagccctcatctcatgttctttgtagcggaccgagtgggtttgctataggcctcgtctgactttgtcttgcgtcttttctctgtggactcttgaggacgcctgagccccagccctgcccctgaccagcctcccccttgggtccaggggtctttcggctcatattgcagggcctgccaatgccttcacgcaccccttccccaaaggtgcccggcagggaggcagggcctcccccactcagcgcaggtcaggctaaggccagtcggctggtcactatgcaatgctgccctggggaggctccctgagggcacagtgggcgctggacccggccccccaactctcttgcctgctgcctgtgaccctgaagaacagaattgattcttgcccctctccctgtgtgagcttggccccgcctcttgccccaggcccctgctggcgggtctcaccccccacccctcgctttgaataaagcacttgcgccca

SEQ ID NO: 61403 - DNA, 916 bp, Homo sapiens
acgagcggtccgggccggcgcggctgccgctcggcgccgcggtcctcgtgccagtgagcgccgcggccgccgcagccatgaccgtggagttcgaggagtgcgtcaaggactccccgcgcttcagggcgaccattgacgaggtggagacggacgtggtggagattgaggccaaactggacaagctggtgaagctgtgcagtggcatggtggaagccggtaaggcctacgtcagcaccagcaggcttttcgtgagcggcgtccgcgacctgtcccagcagtgccagggcgacaccgtcatctcggaatgtctgcagaggttcgctgacagcctacaggaggtggtgaactaccacatgatcctgtttgaccaggcccagaggtccgtgcggcagcagctccagagctttgtcaaagaggatgtgcggaagttcaaggagacaaagaagcagtttgacaaggtgcgggaggacctggagctgtccctggtgaggaacgcccaggccccgaggcaccggccccacgaggtggaggaagccaccggggccctcaccctcaccaggaagtgcttccgccacctggcactggactatgtgctccagatcaatgttctgcaggccaagaagaagtttgagatcctggactctatgctgtccttcatgcacgcccagtccagcttcttccagcagggctacagcctcctgcaccagctggacccctacatgaagaagctggcagccgaggtgagcctttgggaggggtggggctgggccaggcctccgtgaccttccctaatgccacccccaacagctggaccagctggtgatcgactctgcggtggaaaagcgtgagatggagcgaaagcacgccgccatccagcagcggacgctgctgcagccggctccctgcacaccaggcg

SEQ ID NO: 61404 - DNA, 976 bp, Homo sapiens
tacacatcctgtctctgtgtgtggagctggctggaatctctcagcctcacctgccagacaacaccccctccttcctcaccctgtctcctgcattctcctgaaaccttcatccacacaatgcctcccaacctcactggctactaccgctttgtctcgcagaagaacatggaggactacctgcaagccctaaacatcagcttggctgtgcggaagatcgcgctgctgctgaagccggacaaggagatcgaacaccagggcaaccacatgacggtgaggacgctcagcaccttccgaaactacactgtgcagtttgatgtgggagtggagtttgaggaggacctcaggagcgtggacggacgaaaatgccagaccatagtaacctgggaggaggagcacctggtgtgtgtgcagaaaggggaggtccccaaccggggctggagacactggctggagggagagatgctgtatctggaactgactgcaagggatgcagtgtgcgagcaggtcttcaggaaggtcagatagccggagaggagccaagatccctccagacagcaccagctcacagacgctcttgttgtgcccccttcaagcccagattgtgccaggtcagctgtcccttcctctggccacctttcctccctctgggtccctcctcacccctccccgtgttaatctgtaacttgcagcccccaggccaaagtcctttctcacactccactgcccaatagtgacctcacttccaggtcaaggtctggcgtcccaaatgaaagaagcaggcaaagggaaggagcccctgagaacaaccaatctccgctctctcctgtccatttgacctcttcttttccttctaagaaagaactaagctttgggcatttggcgattagtgaaaattctatcctgatggacttctggaaaactgtgactggggttcaagagtttaaacaggggctactggcagagtctttttgtccat

SEQ ID NO: 61405 - DNA, 721 bp, Homo sapiens
tacacatcctgtctctgtgtgtggagctggctggaatctctcagcctcacctgccagacaacaccccctccttcctcaccctgtctcctgcattctcctgaaaccttcatccacacaatgcctcccaacctcactggctactaccgctttgtctcgcagaagaacatggaggactacctgcaagccctaaacatcagcttggctgtgcggaagatcgcgctgctgctgaagccggacaaggagatcgaacaccagggcaaccacatgacggtgaggacgctcagcaccttccgaaactacactgtgcagtttgatgtgggagtggagtttgaggaggacctcaggagcgtggacggacgaaaatgccaggctgcccttggcatgaattctccagccagagccatctcctgagctccagggcaatgttttcaactgcctacaaaatacagttggccctccatattcatgggttctgcatccacagcttcagcaaactgcaaatggaaaaatatttgggaaaaataaaaataaaaaataacaatacaaaatgatacaaataaaaaacaatacagtatagcaactatttacagagcatgtacattgcattaggtattataagtaatctagagatgatttaaagcatatgggaaaaggctgggcgtggtggctcacacccataatcccaagactttgggaggctgaggcaggcagatcacttgag

SEQ ID NO: 61406 - DNA, 456 bp, Homo sapiens
aaaccctcagtctgagcctgagaaatcctggcatttgtagcccagggctgcgaggaagccacagggcggtccgcagggcggtatcgaggctctgggacccaaggaggggcaggacgtcgtgcacccctcgcgcacgcacctgtcgggaccggccgcctcctcctgcctacctgtcctgcctccttcgccccgaatttcaccttaaaccatgatgaaccaagcccagtggattctgaagcccgggacgatggcaggttcgagagagaattgggcagctgggggcggggcacaatattatttaggcgcctccaccccaccttcacagaaatacatctggaaagcatgggctgtcctagggctggggactgggggttacggtctcatcgatgactcagagggagagaaaaccccctgggtcccaagccaaaaagaataaaattctccagaatagccaac

SEQ ID NO: 61407 - DNA, 624 bp, Homo sapiens
aggtggaggccaacactgacctttggatggctgagttttggatgactgacagccccagatcctgctccaggttccttcctcaggaaggatcctacatcagcttggctgtgcggaagatcgcgctgctgctgaagccggacaaggagatcgaacaccagggcaaccacatgacggtgaggacgctcagcaccttccgaaactacactgtgcagtttgatgtgggagtggagtttgaggaggacctcaggagcgtggacggacgaaaatgccaggctgcccttggcatgaattctccagccagagccatctcctgagctccagggcaatgttttcaactgcctacaaaatacagttggccctccatattcatgggttctgcatccacagcttcagcaaactgcaaatggaaaaatatttgggaaaaataaaaataaaaaataacaatacaaaatgatacaaataaaaaacaatacagtatagcaactatttacagagcatgtacattgcattaggtattataagtaatctagagatgatttaaagcatatgggaaaaggctgggcgtggtggctcacacccataatcccaagactttgggaggctgaggcaggcagatcacttgag

SEQ ID NO: 61408 - DNA, 871 bp, Homo sapiens
tacacatcctgtctctgtgtgtggagctggctggaatctctcagcctcacctgccagacaacaccccctccttcctcaccctgtctcctgcattctcctgaaaccttcatccacacaatgcctcccaacctcactggctactaccgctttgtctcgcagaagaacatggaggactacctgcaagccctaaacatcagcttggctgtgcggaagatcgcgctgctgctgaagccggacaaggagatcgaacaccagggcaaccacatgacggtgaggacgctcagcaccttccgaaactacactgtgcagtttgatgtgggagtggagtttgaggaggacctcaggagcgtggacggacgaaaatgccagaccatagtaacctgggaggaggagcacctggtgtgtgtgcagaaaggggaggtccccaaccggggctggagacactggctggagggagagatgctgtatctggaactgactgcaagggatgcagtgtgcgagcaggtcttcaggaaggtcagatagccggagaggagccaagatccctccagacagcaccagctcacagacgctcttgttgtgcccccttcaagcccagattgtgccaggtcagctgtcccttcctctggccacctttcctccctctgggtccctcctcacccctccccgtgttaatctgtaacttgcacccctgagaacaaccaatctccgctctctcctgtccatttgacctcttcttttccttctaagaaagaactaagctttgggcatttggcgattagtgaaaattctatcctgatggacttctggaaaactgtgactggggttcaagagtttaaacaggggctactggcagagtctttttgtccat

SEQ ID NO: 61409 - DNA, 422 bp, Homo sapiens
atccatttctaaccaggcattggtaggagggggtgaatccacagtcccagacccaaagaagggaaactcacagccctgaggggctgctgcaggcagaggagctcctggctggctagcagcacccctactaacaggcagcccccaacatcagcttggctgtgcggaagatcgcgctgctgctgaagccggacaaggagatcgaacaccagggcaaccacatgacggtgaggacgctcagcaccttccgaaactacactgtgcagtttgatgtgggagtggagtttgaggaggacctcaggagcgtggacggacgaaaatgccagaggtacatttcccctggctgggcggtggccggaaggaggcatcacaggagactcctaacaacatggggcaaaacaaagtgaccttccccagccagagca

SEQ ID NO: 61410 - DNA, 455 bp, Homo sapiens
agtggggagaggaagaaacagagtggccaaggtgggccctggctacgagtcggatgaatgcccataaatcatcactggcgagatggaggcttcagccactcacatcccctgacccagccaccttccttcctgaggggtggaaagttgaggatgtggaataatgatacaattgcccatacatcaaacactcaagctgctgtatccggaaggagtaaatggaggtcaaggaccttgagaaaggggctctggctggcaaacgccctctttctctctccccctcacttcccctctctccccaggaactgactgcaagggatgcagtgtgcgagcaggtcttcaggaaggtcagatagccggagaggagccaagatccctccagacagcaccagctcacagacgctcttgttgtgcccccttcaagcccagattgtgccaggtcagctgtcccttcctct

SEQ ID NO: 61411 - DNA, 930 bp, Homo sapiens
tacacatcctgtctctgtgtgtggagctggctggaatctctcagcctcacctgccagacaacaccccctccttcctcaccctgtctcctgcattctcctgaaaccttcatccacacaatgcctcccaacctcactggctactaccgctttgtctcgcagaagaacatggaggactacctgcaagccctaaacatcagcttggctgtgcggaagatcgcgctgctgctgaagccggacaaggagatcgaacaccagggcaaccacatgacggtgaggacgctcagcaccttccgaaactacactgtgcagtttgatgtgggagtggagtttgaggaggacctcaggagcgtggacggacgaaaatgccaggggaggtccccaaccggggctggagacactggctggagggagagatgctgtatctggaactgactgcaagggatgcagtgtgcgagcaggtcttcaggaaggtcagatagccggagaggagccaagatccctccagacagcaccagctcacagacgctcttgttgtgcccccttcaagcccagattgtgccaggtcagctgtcccttcctctggccacctttcctccctctgggtccctcctcacccctccccgtgttaatctgtaacttgcagcccccaggccaaagtcctttctcacactccactgcccaatagtgacctcacttccaggtcaaggtctggcgtcccaaatgaaagaagcaggcaaagggaaggagcccctgagaacaaccaatctccgctctctcctgtccatttgacctcttcttttccttctaagaaagaactaagctttgggcatttggcgattagtgaaaattctatcctgatggacttctggaaaactgtgactggggttcaagagtttaaacaggggctactggcagagtctttttgtccat

SEQ ID NO: 61412 - DNA, 665 bp, Homo sapiens
tatcaccagcccaaagggcaaagaacaggccaacccagaccgaagagcaaacatttgcccaccctccagcctgtgacactgttggtcacccagagtcccttttactttagcatcaataacttcactctcctgcatttctttctacttcttacatattccttcttagcctcctttgcagatcctagtcctcctattaatcctttaaactggagttttctccgcagagttttgttcttaatgtcttctcccttttgtctgcccactatccataggctaaatcatctacacccatgccttctgcttccatctataggctgcccttggcatgaattctccagccagagccatctcctgagctccagggcaatgttttcaactgcctacaaaatacagttggccctccatattcatgggttctgcatccacagcttcagcaaactgcaaatggaaaaatatttgggaaaaataaaaataaaaaataacaatacaaaatgatacaaataaaaaacaatacagtatagcaactatttacagagcatgtacattgcattaggtattataagtaatctagagatgatttaaagcatatgggaaaaggctgggcgtggtggctcacacccataatcccaagactttgggaggctgaggcaggcagatcacttgag

SEQ ID NO: 61413 - DNA, 4678 bp, Homo sapiens
  misc_feature (1488)..(1488): n is a, c, g, or t
  misc_feature (2992)..(2992): n is a, c, g, or t
acgcctgcgcagcggcgccacaggaacgatgcatgccgggaccgggaagattcagtctctgaacggcccggagtagtcgtctttccccttctgactgccgccacgctgcagtccagaatatttgaagatcaaaccgaacttgagagactaacgagaacggtccctttttattcctaacagattccttccgtggcaaagtaacccgtcgtcttccgtttccggttgcccggttgccctgttgccgtggtaaccgcacgcataacagccgtggtggttatggctggtctgagcggcgcgcagatccccgacggggagtttaccgcgctagtgtaccggctcatccgcgatgcccgctacgccgaggcggtgcagctgctgggccgagaactgcagcggagccccaggagccgtgccggcctgtcgctgctaggctactgctactaccgcctgcaggagttcgcgctggcggccgagtgctatgagcagctgggccagctgcacccggaactggagcagtaccgcctgtaccaggcccaggccctgtacaaggcctgcctttatccggaggccactcgggtcgccttccttctcctggataaccccgcctaccacagccgggtcctccgcctgcaagctgccatcaagtatagcgagggcgatctgccagggtccaggagcctggtggagcagctgctgagtggggaagggggagaagaaagtggaggcgacaatgagaccgatggccaggtcaacctgggttgtttgctctacaaggagggacagtatgaagctgcatgctccaagttttctgccacactgcaggcctcgggctaccagcctgacctttcctacaacctggctttggcctattacagcagccgacagtatgcctcagcactgaagcatatcgctgagattattgagcgtggcatccgccagcatcctgagctaggtgtgggcatgaccaccgagggctttgatgttcgcagtgttggcaacaccttagttctccatcagactgctctggtggaagccttcaaccttaaggcagccatagaataccaactgagaaactatgaggtagctcaagaaaccctcaccgacatgccacccagggcagaggaagagttggaccctgtgaccctgcacaaccaggcactaatgaacatggatgccaggcctacagaagggtttgaaaagctacagtttttgctccaacagaatccctttcctccagagacttttggcaacctgttgctgctctactgtaaatatgagtattttgacctggcagcagatgtcctggcagaaaatgcccatttgacgtataagttcctcacaccctatctctatgacttcttagatgccctgatcacttgccagacagctcctgaagaggctttcattaagcttgatgggctagcagggatgctgactgagcagcttcggagactcaccaagcaagtacaggaagcaagacacaacagngatgatgaagctatcaaaaaggcagtgaatgaatatgatgaaaccatggagaaatacattcctgtgttgatggctcaggcaaaaatctactggaatcttgaaaattatccaatggtggaaaagatcttccgcaaatctgtggaattctgtaacgaccatgatgtgtggaagttgaatgtggctcatgttctgttcatgcaggaaaacaaatacaaagaagccattggtttctatgaacccatagtcaagaagcattatgataacatcctgaatgtcagtgctattgtactggctaatctctgtgtttcctatattatgacaagtcaaaatgaagaagcagaggagttgatgaggaagattgaaaaggaggaagagcagctctcttatgatgacccaaataggaaaatgtaccatctctgcattgtgaatttggtgataggaactctttattgtgccaaaggaaactatgagtttggtatttctcgagttatcaaaagcttggagccttataataaaaagctgggaacagatacctggtattatgccaaaagatgcttcctgtccttgttagaaaacatgtcaaaacacatgatagtcattcatgacagtgttattcaagaatgtgtccagtttttaggacactgtgaactttatggcacaaacatacctgctgttattgaacaacccctcgaagaagaaagaatgcatgttgggaagaatacagtcacagatgagtccagacaattgaaagctttgatttatgagattataggatggaataagtagttatgactgatagtggcttttttcaaaatggctttcttacgtaccacacttttttttatctgtatttagccttggcatctttatatttgtcttattttgaatcttatccactttgtaagaacaagtttatgtttgagcaactttttcatttaatccagaagggtagggactatgcagtgtaagctgcatcacttctgctttcttcctactagtgacaatcatctggtcttgccctcaagcaacaattgctagagtaacatctttgtataagcaagtaaccccagatagagttgacgtttcagctttgggctgtcaaaagggtatgtcatggaccaaagcactgttagtacgggtatgtttgcatttggtcactgatatgtaaatgactgctagcccacggctggaccacttctcaatcagcaaataaagccatgtctattttgctatctcagcatagactatgctgtctgataaatctaattcttaactctatttctccagttttttagtcctttaactttctggattgcaacgaagtctagtttagacctctaagcccttttagaagtacaagtataatgggaatttcttttcttggttcttttcaggttatgaggtttggtcagtgacaaaattttttttcataatttggttgattggttgcttcttaagttttataataaacgtttttcttcatgttctatttttgattttacanaaatgattttgcctccttgtggatactgacatatattaagtgtggaagcttattaatatttttggttttttaaaaactgaaatttttaatttttactttttaattttttaggaaaaataagcactgaactgagaatgagaagaataaaagtatgagttccataccttctaattttaggctgtcagaaattcctttattctttgggatttcacaatcatttgaactatcagaagcctttacaattacttttagctgtaacatccgattctgtataagccacatagaaaaaagttgcctttctttttttatgacctggatatataagcaaatcagctaggaaatatataattgtattttatattaatgttttctaggattttggcttacagtaaatgttagcccctatggtaagtgattgttattgttggatgttatactgattattaataagaaatttggatttttgcctttttacctggaatttttgcttacagccgtagctatgaatatatatagggtggtccccagtctctgttatggttgcgcataaattaataattttataagtatttagaaatggtataattctcttaacttcctctttcagtttttgtactaatgtttgtttttgttcgggaagaggagatttgcttttaatccttccaaaaaatgatgaaccaccgttccattcagtagtttgacaagctgttataatgtgtattttttcctcaattattcttgaaatatttagagcctctcctgcttctaacatgaaggcctttagatgccagtctgccagaaatctggaaacagaggaaccggtgaagtgaagatgtaatggagatttagctaatgatgtacttcacaatccaccttggatctcctgcatgtccaaatctcagtagttaatcaagtgtctgctgccattaacagaacagaagtaatggataacagaatggaaataagagatgccagaactacttccataactaactcaccaaatcaaatcatcagtcctcatattcttgttttatttaatacaaggagaagaggccatgcactttccaaaaggtcaaagccacatagaataggaaggcaatctctagtttaaagctttctcttggagtgttttctccccctgtcttcaaagggtctacttgagagatagtggtgtttactgctgcagcatgtatcacaagataagaaatgaaaaatcaatctttcttaccaccctgttctctttcccttttttatcttttcccttttgtcaattatagaattatagggacatttttctctgatagctggaagttgaacctcaaccaggtataaaagatgcataacaaccttttagcagtaagtgtcaagtgagtgagcactatgattatcaaggtgactttggaaaccttttaaaaatgcatttttgcaaaacaagataacatatattgataaaaagtgactctcagattggtaatgccagaaaaaattttaagaggactcaccaaaagtactagatctatgtaagttgtagaatagagtgaagtttttttatatatttgtggtagcctccatcttttaaactttttgaactcagtagaaaaacagactgaaattttaaagacatgcagtatttgtatcattttaaattctgtaacactgggaattaaatatactcaactttagagg

SEQ ID NO: 61414 - DNA, 5225 bp, Homo sapiens
  misc_feature (1488)..(1488): n is a, c, g, or t
  misc_feature (2992)..(2992): n is a, c, g, or t
acgcctgcgcagcggcgccacaggaacgatgcatgccgggaccgggaagattcagtctctgaacggcccggagtagtcgtctttccccttctgactgccgccacgctgcagtccagaatatttgaagatcaaaccgaacttgagagactaacgagaacggtccctttttattcctaacagattccttccgtggcaaagtaacccgtcgtcttccgtttccggttgcccggttgccctgttgccgtggtaaccgcacgcataacagccgtggtggttatggctggtctgagcggcgcgcagatccccgacggggagtttaccgcgctagtgtaccggctcatccgcgatgcccgctacgccgaggcggtgcagctgctgggccgagaactgcagcggagccccaggagccgtgccggcctgtcgctgctaggctactgctactaccgcctgcaggagttcgcgctggcggccgagtgctatgagcagctgggccagctgcacccggaactggagcagtaccgcctgtaccaggcccaggccctgtacaaggcctgcctttatccggaggccactcgggtcgccttccttctcctggataaccccgcctaccacagccgggtcctccgcctgcaagctgccatcaagtatagcgagggcgatctgccagggtccaggagcctggtggagcagctgctgagtggggaagggggagaagaaagtggaggcgacaatgagaccgatggccaggtcaacctgggttgtttgctctacaaggagggacagtatgaagctgcatgctccaagttttctgccacactgcaggcctcgggctaccagcctgacctttcctacaacctggctttggcctattacagcagccgacagtatgcctcagcactgaagcatatcgctgagattattgagcgtggcatccgccagcatcctgagctaggtgtgggcatgaccaccgagggctttgatgttcgcagtgttggcaacaccttagttctccatcagactgctctggtggaagccttcaaccttaaggcagccatagaataccaactgagaaactatgaggtagctcaagaaaccctcaccgacatgccacccagggcagaggaagagttggaccctgtgaccctgcacaaccaggcactaatgaacatggatgccaggcctacagaagggtttgaaaagctacagtttttgctccaacagaatccctttcctccagagacttttggcaacctgttgctgctctactgtaaatatgagtattttgacctggcagcagatgtcctggcagaaaatgcccatttgacgtataagttcctcacaccctatctctatgacttcttagatgccctgatcacttgccagacagctcctgaagaggctttcattaagcttgatgggctagcagggatgctgactgagcagcttcggagactcaccaagcaagtacaggaagcaagacacaacagngatgatgaagctatcaaaaaggcagtgaatgaatatgatgaaaccatggagaaatacattcctgtgttgatggctcaggcaaaaatctactggaatcttgaaaattatccaatggtggaaaagatcttccgcaaatctgtggaattctgtaacgaccatgatgtgtggaagttgaatgtggctcatgttctgttcatgcaggaaaacaaatacaaagaagccattggtttctatgaacccatagtcaagaagcattatgataacatcctgaatgtcagtgctattgtactggctaatctctgtgtttcctatattatgacaagtcaaaatgaagaagcagaggagttgatgaggaagattgaaaaggaggaagagcagctctcttatgatgacccaaataggaaaatgtaccatctctgcattgtgaatttggtgataggaactctttattgtgccaaaggaaactatgagtttggtatttctcgagttatcaaaagcttggagccttataataaaaagctgggaacagatacctggtattatgccaaaagatgcttcctgtccttgttagaaaacatgtcaaaacacatgatagtcattcatgacagtgttattcaagaatgtgtccagtttttaggacactgtgaactttatggcacaaacatacctgctgttattgaacaacccctcgaagaagaaagaatgcatgttgggaagaatacagtcacagatgagtccagacaattgaaagctttgatttatgagattataggatggaataagtagttatgactgatagtggcttttttcaaaatggctttcttacgtaccacacttttttttatctgtatttagccttggcatctttatatttgtcttattttgaatcttatccactttgtaagaacaagtttatgtttgagcaactttttcatttaatccagaagggtagggactatgcagtgtaagctgcatcacttctgctttcttcctactagtgacaatcatctggtcttgccctcaagcaacaattgctagagtaacatctttgtataagcaagtaaccccagatagagttgacgtttcagctttgggctgtcaaaagggtatgtcatggaccaaagcactgttagtacgggtatgtttgcatttggtcactgatatgtaaatgactgctagcccacggctggaccacttctcaatcagcaaataaagccatgtctattttgctatctcagcatagactatgctgtctgataaatctaattcttaactctatttctccagttttttagtcctttaactttctggattgcaacgaagtctagtttagacctctaagcccttttagaagtacaagtataatgggaatttcttttcttggttcttttcaggttatgaggtttggtcagtgacaaaattttttttcataatttggttgattggttgcttcttaagttttataataaacgtttttcttcatgttctatttttgattttacanaaatgattttgcctccttgtggatactgacatatattaagtgtggaagcttattaatatttttggttttttaaaaactgaaatttttaatttttactttttaattttttaggaaaaataagcactgaactgagaatgagaagaataaaagtatgagttccataccttctaattttaggctgtcagaaattcctttattctttgggatttcacaatcatttgaactatcagaagcctttacaattacttttagctgtaacatccgattctgtataagccacatagaaaaaagttgcctttctttttttatgacctggatatataagcaaatcagctaggaaatatataattgtattttatattaatgttttctaggattttggcttacagtaaatgttagcccctatggtaagtgattgttattgttggatgttatactgattattaataagaaatttggatttttgcctttttacctggaatttttgcttacagccgtagctatgaatatatatagggtggtccccagtctctgttatggttgcgcataaattaataattttataagtatttagaaatggtataattctcttaacttcctctttcagtttttgtactaatgtttgtttttgttcgggaagaggagatttgcttttaatccttccaaaaaatgatgaaccaccgttccattcagtagtttgacaagctgttataatgtgtattttttcctcaattattcttgaaatatttagagcctctcctgcttctaacatgaaggcctttagatgccagtctgccagaaatctggaaacagaggaaccggtgaagtgaagatgtaatggagatttagctaatgatgtacttcacaatccaccttggatctcctgcatgtccaaatctcagtagttaatcaagtgtctgctgccattaacagaacagaagtaatggataacagaatggaaataagagatgccagaactacttccataactaactcaccaaatcaaatcatcagtcctcatattcttgttttatttaatacaaggagaagaggccatgcactttccaaaaggtcaaagccacatagaataggaaggcaatctctagtttaaagctttctcttggagtgttttctccccctgtcttcaaagggtctacttgagagatagtggtgtttactgctgcagcatgtatcacaagataagaaatgaaaaatcaatctttcttaccaccctgttctctttcccttttttatcttttcccttttgtcaattatagaattatagggacatttttctctgatagctggaagttgaacctcaaccaggtataaaagatgcataacaaccttttagcagtaagtgtcaagtgagtgagcactatgattatcaaggtgactttggaaaccttttaaaaatgcatttttgcaaaacaagataacatatattgataaaaagtgactctcagattggtaatgccagaaaaaattttaagaggactcaccaaaagtactagatctatgtaagttgtagaatagagtgaagtttttttatatatttgtggtagcctccatcttttaaactttttgaactcagtagaaaaacagactgaaattttaaagacatgcagtatttgtatcattttaaattctgtaacactgggaattaaatatactcaactttagaggacacttgccttactgtaatctataatcattttatattgaaaaatagggccagacattagccaaacggtaattaatttactagccataggtatagtgtttaatattctcttggggagtgagtctttactaagtgattactctatacttgataccactattaattgaggttcttttggttgtttaattaaatcagctcctttggatttgggccaagattgatccaccacatactgaaatccgttctacaacatcataatgtgtatttactagaaaaggacttgcttcataaggaaaaattattagaatatagagacttataagtacatttctagtgtgaaaaataagcatttgttagtttaagtgagacctgccaataacttgattgcaaatattaatatcatgtgaacatataaaatgggcccaaatccttgttcaaaagtgaaatttgcacgtttgtgaaataaaacacatcaatatcaatgactgaataccttaattcaaaacagcaaatggctaaaattatactatgcaagcaggaccctagtaa

SEQ ID NO: 61415 - DNA, 1238 bp, Homo sapiens
aatggcttgtgtttcaggactgagaactcattaacagtcccccgccgccttgtctgctcctagcgattggcctccacctccactaacactcagcccttcccttggcccttggctttttctctgcttcaaccacaggctttctctctctctctctctctcagcctcggcttctcttatagactctatcccattctcattccaagacacagaaccccttcttatctacctgaagctatagttggtcattggtatcatggaaaacaggagctgactatgccttaaaaatcatttattgcagtgatttttaaacaatgtttaaaggagccttgagattccttggtggcaagcaacagaggccaccgaatatgtgtatgtatgtgtgatgagtactcatagcagtgaatatttggaaagcagagcctccaaaagtcccttatgcacacatgcatacttatcaatcagaacaaaggactggtatttgttttatatattgggggtaattcattgcttgattttttttaaaaaaagattctgttatttaaagaaaatagtttaaatatcacagtgatcccatcctgccccttcattatctgcaggggcgcccctgagtgtccccaggtgagatctccatgcctacattactctacacagaataactctctcctggttccagtcccaaataaagaggacagagcctcatgagtctatctgggccaaagtgggttattgccaagaataacctggcatcaggggattcaaactctttgccttcaagctctggcattccagtaagggctgacttggaactgtcacagagaaactgggggacagtaaatgcagtctagcacttgtttggaactagagcatggctcaaaaatgatcacaatgaataaactttgctatcagctttctgtaaataaatatacacacaatgctaaatccttttgcattaggacttgaatttgattgtacattcttggatacctaagaatctcccaatactgctctagcttgtaactttttttttcagaaagagtgtttcctcagatgtctagatgtctgtatataagtgaacataattactatttttaagaggagggtgcctatgttcttcatgcttataatacccccaagaaacttacagagaacactatgcatgagattaaattgcaatccctaagggaatcccagactcactctggatcaacagtagttgctaatgtgtttaatgcagacta

SEQ ID NO: 61416 - DNA, 415 bp, Homo sapiens
gtcagagtgggtcttttgtgggtagacgctgggatgccagccattcattagtggcctgagctcactgaccaggcagcaaagccagcctggaaaagagaaatagttagttttcatttcaaccaaaatggaaacaaattgtttttgtttacgatggagactgtgcaatatataattatccaacacaattgtggttttattgctgaaagggagctgttttatctcttccctttatgtttggctacacagttacacacacacacacacacacacacacccttttccatccctgcctgggaattcccattagagcagtggctctcaaattgtggtgaagctcagttttgtttttaattttgaaaccttgcaaatcaatgcttttatataacataataaattaacactgtgtatatcaata

SEQ ID NO: 61417 - DNA, 179 bp, Homo sapiens
gtgatcctcctgcctcagccttccaaagtgctgggattacagatgtgagccatcacgcctagccacctggtccacttttattccttcaaacacaccagctgtttccagccttctggactttgtctcttttgttaggatgcttctctcctttttatggctgaaatgttgatatctcagaa

SEQ ID NO: 61418 - DNA, 328 bp, Homo sapiens
aatacagtttgagaggctagaaccgtggatttcaaatgctagcctgtatgagggtcccttggagggcttcttaaaatacaagttgctggttgtcattttcagggtttctgatttacgaagtataggatgggcctgagaatttgcatttccattaaattcccaggtgatgtggctgctgctcctgggacaacatttagagaaccgctagattagacagtctcacaacagggatttctagggacagcttaatggttactttatgatttgaagctggaatacccaattaggggtttttccagtctcatttcatttcatttcatttgcttcc

SEQ ID NO: 61419 - DNA, 385 bp, Homo sapiens
aacctgggtgacaagagtgaaactccatctcaaaaaaaaaaaaaaaaaagaaagaaaaaaaatatgagaaagaagtgttagaatttttatttctatttatttttacttaaaaataggagatatagccaagatatagaaacttatacatatcatatatatgaatgaggcatcctgaggggcgaaaaatgcaacttgtttgttacactttccattttcagcaaggtggattaatggattatgtagtctgattttaaactaacttcataatattgacaagtggcttaaaaatttttccacatatagcttacagattgaagattgcattaatattgcaggcagaaacaagaaaagggcagaatgagtacctgtccaattcttcgacagt

SEQ ID NO: 61420 - DNA, 465 bp, Homo sapiens
attcacttaaattttgtagaaatttaagtatatataattgtataataaatgtagaaaaaatattaactacatttttttatatatacttaaaattttttttaactttcactttctgcttttgtatatttatagtcttttgtgaattggcttttgttctctaaagcccatgtgaggttcttgtacctcacctctctcccagtttataaactttatatggcaagaattttgatccttttcgtgttgcaaacattattcctggcttgtatctcttggtcttgtttggctgatggcatgtttttgtaacatagagacttttctgtagtcacatctgtcaattcattttctgtgtttcatattatgcttaggcctttcccacccccaggacaataaaaacaatgttttcttctagtaattctagcacttagccaggtataatatgtcggaatcttttcccaaatgtatagt

SEQ ID NO: 61421 - DNA, 278 bp, Homo sapiens
ttgagcgcttcccactaaccagttcaatattttgaagtagttgatttccttccctgtgattccgacctggactctgtctttcaaaaacaagcacaatcacaatgtgtgtctcacccaattgctgaaataaggactgagctctcctacagtagtataggacagtaagagtcacctaggatggataaaagtatcgttgactagctggaaatctgtgtaatcacgaagtttaagaatgtttctcatttcatgtacatcatcaatcccagaccctcagcatc

SEQ ID NO: 61422 - DNA, 617 bp, Homo sapiens
gtgggaggtttctgttcatttgcaaatgcgatgacattttcagctttttgtaccaggaacggaagcaccttgggaagcttggggttgaatgcattctccctagagagcagcaaattaggttaaattcatttactgatggaggctccaggggaagggggaccctggggaggagggggcagatgatgtgtggcagtgacttattctagtttgaattgacttagaaaaaatgtatttatttgcttcctttctccaaccttcatcatttcctccaaagactgcaagcatagacttatacaacatgtcctctttgcagaaagctgtgaggtggttgtgtgctcttgacctgagggagcaggcccagaatcaatgaatgtgtgtgtaattaaactccaggggatgagacacccgacttcatccaaattagagattcaattcaacagcaagtttgataaaaagggaggtcggtagtgaccaaactaaccctgctacgtcgttaacgaggctgaagatgattccaaaatggcttaatgtggcagaagtcttctcacaagatggctatgattcaaataaccttggacagctgtgatggaagagcaaataaatagctccttttacaa

SEQ ID NO: 61423 - DNA, 345 bp, Homo sapiens
ctggaaataagaaaagctctgagggtctccaaagttaccagaggaaggctgaattttatgaaacccggcgagtgaatctacccagagctgaagcttcctttgcaacttgggaacaccagggccacagtgactttgtggcttggctttagataaatttgaccatggctgtagaacccagcagctcagaatccattaaaaggagagctgggaggaggctcctgccatacgccagacagttttgtagacacgaaggatccagagattagcaacacctttaccatttttggtgacagttaagcacccatctaagaagttttctttggtgagtgccaaaaagtgtaactc

SEQ ID NO: 61424 - DNA, 2789 bp, Homo sapiens
  misc_feature (515)..(515): n is a, c, g, or t
ctggaaataagaaaagctctgagggtctccaaagttaccagaggaaggctgaattttatgagtctagtcctcaactctaaccaaagtaaaggaaactggaaagacacacgctttttcagtcattaatagaaagttgtccagaaacccggcgagtgaatctacccagagctgaagcttcctttgcaacttgggaacaccagggccacagtgactttgtggcttggctttagataaatttgaccatggctgtagaacccagcagctcagaatccattaaaaggagagctgggaggaggctcctgccatacgccagacagttttgtagacacgaaggatccagagattagcaacacctttaccatttttggtgacagttaagcacccatctaagaagttttctttgggtttccggagagaccgaactctgctctcagcacctttcccagccgctgttgctaaactgacctcggaggacgagaggggaaggaggtgcgacgccccttacatcagtacanaactaccacaccaaccacctccacttcaaagccggattttgcatcctgggggcgggacagacctcgtcccgggctgaattctctctccactcttcgagattggcacacccagaatgaagaagatgagcaacatttatgagtccgctgccaacacactgggaatctttaacagcccctgcctgaccaaagttgagctgcgtgtggcgtgcaaaggcatttctgacagagatgccctttccaaaccagacccctgtgtcatcctcaagatgcagtctcatgggcagtggtttgaggttgacaggactgaggtgattcgcacctgcataaacccagtgtactcaaaactgtttactgtggacttttactttgaggaggtgcagcgcctgcggtttgaagtccatgacatcagcagcaaccacaatgggctgaaggaggccgacttccttggtggcatggagtgcacacttggccagattgtttcccagagaaagctgtccaaatccttgctgaagcatgggaacacagcagggaaatcttccatcacggtgattgctgaagaattatctggcaatgacgactatgttgagcttgcattcaatgcacggaaattggatgacaaggatttcttcagtaaatctgacccatttctggaaatttttcgtatgaatgatgatgcaactcagcagctggtgcaccgaactgaggttgtgatgaataacttaagcccagcctggaaatcattcaaagtatctgtaaattctctatgcagcggagacccagaccgccggctaaagtgcatagtatgggactgggactccaatggcaagcatgacttcattggagaattcacctcgacattcaaggagatgagaggagcaatggaagggaaacaggtgcagtgggagtgcatcaatcccaagtacaaagccaagaagaagaattacaagaactcaggcactgtgattctgaatctgtgcaagattcacaagatgcattctttcttggactacatcatgggtggctgccaaatccagtttacagtagctatagatttcactgcctcaaacggggaccccaggaacagctgttccttgcactacatccacccttaccaacccaatgagtatctgaaagctttggtagctgtgggggagatttgccaagactatgacagtgacaaaatgttccctgcctttgggtttggcgccaggatacctccagagtacacggtctctcatgactttgcaatcaactttaatgaagacaacccagaatgtgcaggaattcaaggagttgtggaagcctatcagagctgtcttcctaagctccaactctacggtcccaccaacattgcccccatcatccagaaggttgccaagtcagcgtcagaggaaactaacaccaaggaggcatcgcaatacttcatcctgctgatcctgacagatggtgttatcacagacatggccgacacccgggaggccattgtccatgcctcccacctccccatgtcagtcatcatcgtgggagtagggaacgctgacttcagtgacatgcagatgctggacggtgatgatgggattctgaggtcacccaagggagagcctgttcttcgagacatcgtccagttcgtgcccttcaggaacttcaaacacgcatctccagctgccctggcaaagagcgtgctggctgaagtcccaaaccaagttgtggactattacaatggcaaaggaattaaaccaaaatgttcatcagaaatgtatgaatcttccagaacactagcaccatgaactccccacacagttttacagagttctgaaatactattcctgctaatatttcatatttaatacttctactactcctgtactttaaaaaaccaacaacatatacacatttaaaaatagcacgttttggtgatttttaactatctgacaattttttttgcatgtgtagccctgaggcctggatctgttaagcccttgtattgttaactttttacaaagaaacacagataacaataacttactatttacattacagcatgtcgccttgaaataaaatggtatctgtatccattttttatacaggtttgttgaaattttgctaaatttcttatctttacactctaaagcattttgaaacatttactgaatgttgatagacgaaatatacttggttttatctgctataggatgagagactttttaaaatggcagatgcatggactgtattttgcatgtttaaaataaaaaaagaaaaacccacaaaaaaaaa

SEQ ID NO: 61425 - DNA, 1925 bp, Homo sapiens
tactactactaaattcgcggccgcgtcgacgcgcctgcggtttgaagtccatgacatcagcagcaaccacaatgggctgaaggaggccgacttccttggtggcatggagtgcacacttggccagattgtttcccagagaaagctgtccaaatccttgctgaagcatgggaacacagcagggaaatcttccatcacggtgattgctgaagaattatctggcaatgacgactatgttgagcttgcattcaatgcacggaaattggatgacaaggatttcttcagtaaatctgacccatttctggaaatttttcgtatgaatgatgatgcaactcagcagctggtgcaccgaactgaggttgtgatgaataacttaagcccagcctggaaatcattcaaagtatctgtaaattctctatgcagcggagacccagaccgccggctaaagtgcatagtatgggactgggactccaatggcaagcatgacttcattggagaattcacctcgacattcaaggagatgagaggagcaatggaagggaaacaggtgcagtgggagtgcatcaatcccaagtacaaagccaagaagaagaattacaagaactcaggcactgtgattctgaatctgtgcaagattcacaagatgcattctttcttggactacatcatgggtggctgccaaatccagtttacagtagctatagatttcactgcctcaaacggggaccccaggaacagctgttccttgcactacatccacccttaccaacccaatgagtatctgaaagctttggtagctgtgggggagatttgccaagactatgacagtgacaaaatgttccctgcctttgggtttggcgccaggatacctccagagtacacggtctctcatgactttgcaatcaactttaatgaagacaacccagaatgtgcaggaattcaaggagttgtggaagcctatcagagctgtcttcctaagctccaactctacggtcccaccaacattgcccccatcatccagaaggttgccaagtcagcgtcagaggaaactaacaccaaggaggcatcgcaatacttcatcctgctgatcctgacagatggtgttatcacagacatggccgacacccgggaggccattgtccatgcctcccacctccccatgtcagtcatcatcgtgggagtagggaacgctgacttcagtgacatgcagatgctggacggtgatgatgggattctgaggtcacccaagggagagcctgttcttcgagacatcgtccagttcgtgcccttcaggaacttcaaacacgcatctccagctgccctggcaaagagcgtgctggctgaagtcccaaaccaagttgtggactattacaatggcaaaggaattaaaccaaaatgttcatcagaaatgtatgaatcttccagaacactagcaccatgaactccccacacagttttacagagttctgaaatactattcctgctaatatttcatatttaatacttctactactcctgtactttaaaaaaccaacaacatatacacatttaaaaatagcacgttttggtgatttttaactatctgacaattttttttgcatgtgtagccctgaggcctggatctgttaagcccttgtattgttaactttttacaaagaaacacagataacaataacttactatttacattacagcatgtcgccttgaaataaaatggtatctgtatccattttttatacaggtttgttgaaattttgctaaatttcttatctttacactctaaagcattttgaaacatttactgaatgttgatagacgaaatatacttggttttatctgctataggatgagagactttttaaaatggcagatgcatggactgtattttgcatgtttaaaataaaaaaagaaaaacccacaaaaaaaaa

SEQ ID NO: 61426 - DNA, 2757 bp, Homo sapiens
  misc_feature (515)..(515): n is a, c, g, or t
ctggaaataagaaaagctctgagggtctccaaagttaccagaggaaggctgaattttatgagtctagtcctcaactctaaccaaagtaaaggaaactggaaagacacacgctttttcagtcattaatagaaagttgtccagaaacccggcgagtgaatctacccagagctgaagcttcctttgcaacttgggaacaccagggccacagtgactttgtggcttggctttagataaatttgaccatggctgtagaacccagcagctcagaatccattaaaaggagagctgggaggaggctcctgccatacgccagacagttttgtagacacgaaggatccagagattagcaacacctttaccatttttggtgacagttaagcacccatctaagaagttttctttgggtttccggagagaccgaactctgctctcagcacctttcccagccgctgttgctaaactgacctcggaggacgagaggggaaggaggtgcgacgccccttacatcagtacanaactaccacaccaaccacctccacttcaaagccggattttgcatcctgggggcgggacagacctcgtcccgggctgaattctctctccactcttcgagattggcacacccagaatgaagaagatgagcaacatttatgagtccgctgccaacacactgggaatctttaacagcccctgcctgaccaaagttgagctgcgtgtggcgtgcaaaggcatttctgacagagatgccctttccaaaccagacccctgtgtcatcctcaagatgcagtctcatgggcagtggtttgaggttgacaggactgaggtgattcgcacctgcataaacccagtgtactcaaaactgtttactgtggacttttactttgaggaggtgcagcgcctgcggtttgaagtccatgacatcagcagcaaccacaatgggctgaaggaggccgacttccttggtggcatggagtgcacacttggccagattgtttcccagagaaagctgtccaaatccttgctgaagcatgggaacacagcagggaaatcttccatcacggtgattgctgaagaattatctggcaatgacgactatgttgagcttgcattcaatgcacggaaattggatgacaaggatttcttcagtaaatctgacccatttctggaaatttttcgtatgaatgatgatgcaactcagcagctggtgcaccgaactgaggttgtgatgaataacttaagcccagcctggaaatcattcaaagtatctgtaaattctctatgcagcggagacccagaccgccggctaaagtgcatagtatgggactgggactccaatggcaagcatgacttcattggagaattcacctcgacattcaaggagatgagaggagcaatggaagggaaacaggtgcagtgggagtgcatcaatcccaagtacaaagccaagaagaagaattacaagaactcaggcactgtgattctgaatctgtgcaagattcacaagatgcattctttcttggactacatcatgggtggctgccaaatccagtttacagtagctatagatttcactgcctcaaacggggaccccaggaacagctgttccttgcactacatccacccttaccaacccaatgagtatctgaaagctttggtagctgtgggggagatttgccaagactatgacagtgacaaaatgttccctgcctttgggtttggcgccaggatacctccagagtacacggtctctcatgactttgcaatcaactttaatgaagacaacccagaatgtgcaggaattcaaggagttgtggaagcctatcagagctgtcttcctaagctccaactctacggtcccaccaacattgcccccatcatccagaaggttgccaagtcagcgtcagaggaaactaacaccaaggaggcatcgcaatacttcatcctgctgatcctgacagatggtgttatcacagacatggccgacacccgggaggccattgtccatgcctcccacctccccatgtcagtcatcatcgtgggagtagggaacgctgacttcagtgacatgcagatgctggacggtgatgatgggattctgaggtcacccaagggagagcctgttcttcgagacatcgtccagttcgtgcccttcaggaacttcaaacacgcatctccagctgccctggcaaagagcgtgctggctgaagtcccaaaccaagttgtggactattacaatggcaaaggaattaaaccaaaatgttcatcagaaatgtatgaatcttccagaacactagcaccatgaactccccacacagttttacagagttctgaaatactattcctgctaatatttcatatttaatacttctactactcctgtactttaaaaaaccaacaacatatacacatttaaaaatagcacgttttggtgatttttaactatctgacaattttttttgcatgtgtagccctgaggcctggatctgttaagcccttgtattgttaactttttacaaagaaacacagataacaataacttactatttacattacagcatgtcgccttgaaataaaatggtatctgtatccattttttatacaggtttgttgaaattttgctaaatttcttatctttacactctaaagcattttgaaacatttactgaatgttgatagacgaaatacagtccatgcatctgccattttaaaaagtctctcatcctatagcagataaaaccaagtatatttcggtcgacg

SEQ ID NO: 61427 - DNA, 1852 bp, Homo sapiens
  misc_feature (515)..(515): n is a, c, g, or t
ctggaaataagaaaagctctgagggtctccaaagttaccagaggaaggctgaattttatgagtctagtcctcaactctaaccaaagtaaaggaaactggaaagacacacgctttttcagtcattaatagaaagttgtccagaaacccggcgagtgaatctacccagagctgaagcttcctttgcaacttgggaacaccagggccacagtgactttgtggcttggctttagataaatttgaccatggctgtagaacccagcagctcagaatccattaaaaggagagctgggaggaggctcctgccatacgccagacagttttgtagacacgaaggatccagagattagcaacacctttaccatttttggtgacagttaagcacccatctaagaagttttctttgggtttccggagagaccgaactctgctctcagcacctttcccagccgctgttgctaaactgacctcggaggacgagaggggaaggaggtgcgacgccccttacatcagtacanaactaccacaccaaccacctccacttcaaagccggattttgcatcctgggggcgggacagacctcgtcccgggctgaattctctctccactcttcgagattggcacacccagaatgaagaagatgagcaacatttatgagtccgctgccaacacactgggaatctttaacagcccctgcctgaccaaagttgagctgcgtgtggcgtgcaaaggcatttctgacagagatgccctttccaaaccagacccctgtgtcatcctcaagatgcagtctcatgggcagtggtttgaggttgacaggactgaggtgattcgcacctgcataaacccagtgtactcaaaactgtttactgtggacttttactttgaggaggtgcagcgcctgcggtttgaagtccatgacatcagcagcaaccacaatgggctgaaggaggccgacttccttggtggcatggagtgcacacttggccagattgtttcccagagaaagctgtccaaatccttgctgaagcatgggaacacagcagggaaatcttccatcacggtgattgctgaagaattatctggcaatgacgactatgttgagcttgcattcaatgcacggaaattggatgacaaggatttcttcagtaaatctgacccatttctggaaatttttcgtatgaatgatgatgcaactcagcagctggtgcaccgaactgaggttgtgatgaataacttaagcccagcctggaaatcattcaaagtatctgtaaattctctatgcagcggagacccagaccgccggctaaagtgcatagtatgggactgggactccaatggcaagcatgacttcattggagaattcacctcgacattcaaggagatgagaggagcaatggaagggaaacaggtgcagtgggagtgcatcaatcccaagtacaaagccaagaagaagaattacaagaactcaggcactgtgattctgaatctgtgcaagattcacaagatgcattctttcttggactacatcatgggtggctgccaaatccagtttacagtagctatagatttcactgcctcaaacggggaccccaggaacagctgttccttgcactacatccacccttaccaacccaatgagtatctgaaagctttggtagctgtgggggagatttgccaagactatgacagtgacaaaatgttccctgcctttgggtttggcgccaggatacctccagagtacacgttttctctctcgagactgctatctaccacactgaatacaactctgaaaatgctgacaattctaggattcggtactcccttattaaggctttattcctatgccaccact

SEQ ID NO: 61428 - DNA, 1112 bp, Homo sapiens
  misc_feature (515)..(515): n is a, c, g, or t
ctggaaataagaaaagctctgagggtctccaaagttaccagaggaaggctgaattttatgagtctagtcctcaactctaaccaaagtaaaggaaactggaaagacacacgctttttcagtcattaatagaaagttgtccagaaacccggcgagtgaatctacccagagctgaagcttcctttgcaacttgggaacaccagggccacagtgactttgtggcttggctttagataaatttgaccatggctgtagaacccagcagctcagaatccattaaaaggagagctgggaggaggctcctgccatacgccagacagttttgtagacacgaaggatccagagattagcaacacctttaccatttttggtgacagttaagcacccatctaagaagttttctttgggtttccggagagaccgaactctgctctcagcacctttcccagccgctgttgctaaactgacctcggaggacgagaggggaaggaggtgcgacgccccttacatcagtacanaactaccacaccaaccacctccacttcaaagccggattttgcatcctgggggcgggacagacctcgtcccgggctgaattctctctccactcttcgagattggcacacccagaatgaagaagatgagcaacatttatgagtccgctgccaacacactgggaatctttaacagcccctgcctgaccaaagttgagctgcgtgtggcgtgcaaaggcatttctgacagagatgccctttccaaaccagacccctgtgtcatcctcaagatgcagtctcatgggcagtggtttgagaaagctgtgaggtggttgtgtgctcttgacctgagggagcaggcccagaatcaatgaatgtgtgtgtaattaaactccaggggatgagacacccgacttcatccaaattagagattcaattcaacagcaagtttgataaaaagggaggtcggtagtgaccaaactaaccctgctacgtcgttaacgaggctgaagatgattccaaaatggcttaatgtggcagaagtcttctcacaagatggctatgattcaaataaccttggacagctgtgatggaagagcaaataaatagctccttttacaa

SEQ ID NO: 61429 - DNA, 656 bp, Homo sapiens
ataccagtaaagatgtcatctggccaatttgtgtgaaaaaagagaataattctcatccaaaccgcctgtctctggaaataagaaaagctctgagggtctccaaagttaccagaggaaggctgaattttatggtgattgataatatttccaagcttatggagaaaaaaatatcattagtcttttccatggtagaaaagagtaaagcctgtaacaaaaaaagtgatacagtggatgggatgatgagacccttgaaataagcaaggatggaccagaaactggtaacactcacccatggaatttcattatgaagtcgtggcaagggccaagccgacctggatttgaaacccatctcttcaacgatgtagattttgacaacatatttgatttctctgggcctcagtttgttatctgcacaaaagggagatatgagtggttacgttattggattgtcatgaacattaaataggataatgtcaaatcattcagccaagtttctagcatatagtacaggttcaaatattatcttttttttcccaccaacctcttttccaggaaaatgcaaagctactctttagccaaattttaaaacaggggatatttattttgggaatcattaatacccatctgccccttttttggtccattggacatattga

SEQ ID NO: 61430 - DNA, 2596 bp, Homo sapiens
  misc_feature (7)..(7): n is a, c, g, or t
  misc_feature (322)..(322): n is a, c, g, or t
atctctntgtgagaagctgccatctccccgccacccgctcgtccccttctctttctgccaccctcctttccttcctccctcgctccactccactccctccctcttttctcagtaccctcctctttactctccgagttaactgagagccgacctgacatctccaacattttcaccctcttcccccacccccatcaccgagaatggagtcagggtttccggagagaccgaactctgctctcagcacctttcccagccgctgttgctaaactgacctcggaggacgagaggggaaggaggtgcgacgccccttacatcagtacanaactaccacaccaaccacctccacttcaaagccggattttgcatcctgggggcgggacagacctcgtcccgggctgaattctctctccactcttcgagattggcacacccagaatgaagaagatgagcaacatttatgagtccgctgccaacacactgggaatctttaacagcccctgcctgaccaaagttgagctgcgtgtggcgtgcaaaggcatttctgacagagatgccctttccaaaccagacccctgtgtcatcctcaagatgcagtctcatgggcagtggtttgaggttgacaggactgaggtgattcgcacctgcataaacccagtgtactcaaaactgtttactgtggacttttactttgaggaggtgcagcgcctgcggtttgaagtccatgacatcagcagcaaccacaatgggctgaaggaggccgacttccttggtggcatggagtgcacacttggccagattgtttcccagagaaagctgtccaaatccttgctgaagcatgggaacacagcagggaaatcttccatcacggtgattgctgaagaattatctggcaatgacgactatgttgagcttgcattcaatgcacggaaattggatgacaaggatttcttcagtaaatctgacccatttctggaaatttttcgtatgaatgatgatgcaactcagcagctggtgcaccgaactgaggttgtgatgaataacttaagcccagcctggaaatcattcaaagtatctgtaaattctctatgcagcggagacccagaccgccggctaaagtgcatagtatgggactgggactccaatggcaagcatgacttcattggagaattcacctcgacattcaaggagatgagaggagcaatggaagggaaacaggtgcagtgggagtgcatcaatcccaagtacaaagccaagaagaagaattacaagaactcaggcactgtgattctgaatctgtgcaagattcacaagatgcattctttcttggactacatcatgggtggctgccaaatccagtttacagtagctatagatttcactgcctcaaacggggaccccaggaacagctgttccttgcactacatccacccttaccaacccaatgagtatctgaaagctttggtagctgtgggggagatttgccaagactatgacagtgacaaaatgttccctgcctttgggtttggcgccaggatacctccagagtacacggtctctcatgactttgcaatcaactttaatgaagacaacccagaatgtgcaggaattcaaggagttgtggaagcctatcagagctgtcttcctaagctccaactctacggtcccaccaacattgcccccatcatccagaaggttgccaagtcagcgtcagaggaaactaacaccaaggaggcatcgcaatacttcatcctgctgatcctgacagatggtgttatcacagacatggccgacacccgggaggccattgtccatgcctcccacctccccatgtcagtcatcatcgtgggagtagggaacgctgacttcagtgacatgcagatgctggacggtgatgatgggattctgaggtcacccaagggagagcctgttcttcgagacatcgtccagttcgtgcccttcaggaacttcaaacacgcatctccagctgccctggcaaagagcgtgctggctgaagtcccaaaccaagttgtggactattacaatggcaaaggaattaaaccaaaatgttcatcagaaatgtatgaatcttccagaacactagcaccatgaactccccacacagttttacagagttctgaaatactattcctgctaatatttcatatttaatacttctactactcctgtactttaaaaaaccaacaacatatacacatttaaaaatagcacgttttggtgatttttaactatctgacaattttttttgcatgtgtagccctgaggcctggatctgttaagcccttgtattgttaactttttacaaagaaacacagataacaataacttactatttacattacagcatgtcgccttgaaataaaatggtatctgtatccattttttatacaggtttgttgaaattttgctaaatttcttatctttacactctaaagcattttgaaacatttactgaatgttgatagacgaaatatacttggttttatctgctataggatgagagactttttaaaatggcagatgcatggactgtattttgcatgtttaaaataaaaaaagaaaaacccacaaaaaaaaa

SEQ ID NO: 61431 - DNA, 1497 bp, Homo sapiens
  misc_feature (14)..(14): n is a, c, g, or t
cgtaagtgtctctnaccagatactgagtgatatagcattaaagaagtcagacgtgcttcttactttcatggagcttaaacttggttgacaggactgaggtgattcgcacctgcataaacccagtgtactcaaaactgtttactgtggacttttactttgaggaggtgcagcgcctgcggtttgaagtccatgacatcagcagcaaccacaatgggctgaaggaggccgacttccttggtggcatggagtgcacacttggccaggtagctatagatttcactgcctcaaacggggaccccaggaacagctgttccttgcactacatccacccttaccaacccaatgagtatctgaaagctttggtagctgtgggggagatttgccaagactatgacagtgacaaaatgttccctgcctttgggtttggcgccaggatacctccagagtacacggtctctcatgactttgcaatcaactttaatgaagacaacccagaatgtgcaggaattcaaggagttgtggaagcctatcagagctgtcttcctaagctccaactctacggtcccaccaacattgcccccatcatccagaaggttgccaagtcagcgtcagaggaaactaacaccaaggaggcatcgcaatacttcatcctgctgatcctgacagatggtgttatcacagacatggccgacacccgggaggccattgtccatgcctcccacctccccatgtcagtcatcatcgtgggagtagggaacgctgacttcagtgacatgcagatgctggacggtgatgatgggattctgaggtcacccaagggagagcctgttcttcgagacatcgtccagttcgtgcccttcaggaacttcaaacacgcatctccagctgccctggcaaagagcgtgctggctgaagtcccaaaccaagttgtggactattacaatggcaaaggaattaaaccaaaatgttcatcagaaatgtatgaatcttccagaacactagcaccatgaactccccacacagttttacagagttctgaaatactattcctgctaatatttcatatttaatacttctactactcctgtactttaaaaaaccaacaacatatacacatttaaaaatagcacgttttggtgatttttaactatctgacaattttttttgcatgtgtagccctgaggcctggatctgttaagcccttgtattgttaactttttacaaagaaacacagataacaataacttactatttacattacagcatgtcgccttgaaataaaatggtatctgtatccattttttatacaggtttgttgaaattttgctaaatttcttatctttacactctaaagcattttgaaacatttactgaatgttgatagacgaaatatacttggttttatctgctataggatgagagactttttaaaatggcagatgcatggactgtattttgcatgtttaaaataaaaaaagaaaaacccacaaaaaaaaa

SEQ ID NO: 61432 - DNA, 1162 bp, Homo sapiens
agcgggggtctcacagaatgaggctttgaagcctgtcctcctaactcttggcctgctgctctttctttgtaactgtcagtgaggtagttattataattaagctataattgccatgcctacctttaagctccattcatcagaaccctaagcctttaggactatcagcacattcaaaaaatgtctgtcatcactgttgctttggtcaatgtgcagtgaggccacctgggtgtctaactggtattgtattgtccttgtctccctcacctcttcaccccccaatcatcatggggcatctgactgcagcaatacttcatcctgctgatcctgacagatggtgttatcacagacatggccgacacccgggaggccattgtccatgcctcccacctccccatgtcagtcatcatcgtgggagtagggaacgctgacttcagtgacatgcagatgctggacggtgatgatgggattctgaggtcacccaagggagagcctgttcttcgagacatcgtccagttcgtgcccttcaggaacttcaaacacgcatctccagctgccctggcaaagagcgtgctggctgaagtcccaaaccaagttgtggactattacaatggcaaaggaattaaaccaaaatgttcatcagaaatgtatgaatcttccagaacactagcaccatgaactccccacacagttttacagagttctgaaatactattcctgctaatatttcatatttaatacttctactactcctgtactttaaaaaaccaacaacatatacacatttaaaaatagcacgttttggtgatttttaactatctgacaattttttttgcatgtgtagccctgaggcctggatctgttaagcccttgtattgttaactttttacaaagaaacacagataacaataacttactatttacattacagcatgtcgccttgaaataaaatggtatctgtatccattttttatacaggtttgttgaaattttgctaaatttcttatctttacactctaaagcattttgaaacatttactgaatgttgatagacgaaatatacttggttttatctgctataggatgagagactttttaaaatggcagatgcatggactgtattttgcatgtttaaaataaaaaaagaaaaacccacaaaaaaaaa

SEQ ID NO: 61433 - DNA, 441 bp, Homo sapiens
gaaaaatgcacagcctcaccagctattaaacatatggaaatgatgacaatttaaagcttataaataacattagcggtggcttggatttattgttgtggcctccggaagaacttgggcacagtgtaacttcctggggcccgaggttgttaatcggtgaattgttcatgaaggacagtgctcactgtgaaggtgggtgtcctgggatgctctgcctggcccgcgggagacaaggctatggtctgacatccctcagcctgtcctcattgtcctggctctgagaagaagctacaaaacacagtagaagaaaaagaaaacagtcttttaaagacttgtaatgagttgttaatgataaaagtaacacatgccaactggaaaaatgtgaattttttatctcagccaaaagtataaagatacttcgatttctttaaaaacttatggaaa

SEQ ID NO: 61434 - DNA, 545 bp, Homo sapiens
agtgaaaaccttttattacagtaaaaatggcaaactctttcattctcttagagaagaattggtcacttacatggtctcggttctgagaaagtaagatgctaacagtctcgataaagggctaatcttaattaattgatttttttctgttttaatcccacagcttataaataacattagcggtggcttggatttattgttgtggcctccggaagaacttgggcacagtgtaacttcctggggcccgaggttgttaatcggtgaattgttcatgaaggacagtgctcactgtgaaggtgggtgtcctgggatgctctgcctggcccgcgggagacaaggctatggtctgacatccctcagcctgtcctcattgtcctggctctgagaagaagctacaaaacacagtagaagaaaaagaaaacagtcttttaaagacttgtaatgagttgttaatgataaaagtaacacatgccaactggaaaaatgtgaattttttatctcagccaaaagtataaagatacttcgatttctttaaaaacttatggaaa

SEQ ID NO: 61435 - DNA, 392 bp, Homo sapiens
tttttaatgtgaaataatgattacatataaaataaaagcaatatccaggctcaccttggagattgtgcaggctcagttccaggtcatcccaataaagagatatagcaataacataagtcacccaaatactttggtttcccaatgcatacaaaagtgatatttacactataatgtggtctattaagtacacaatagtattatgtctaaaaaaagtataaacattaattttaaaatgtattgctaaaaatgctaacaatgccttcagtgagtcataatctttttgctggtggaggtctcctccacgtagatggctgatgaatgatccgggtggttggggtggtggtggcaatttctgaaaataagacaagaataaagtctgttgcatagatcga

SEQ ID NO: 61436 - DNA, 292 bp, Homo sapiens
acatcagaatctcatcgtttcttacctctatcactgctgtcatccttgtccaaactaacatcatctcttacctggagtctccttgtccttgccccattgggtttattctcaacataacagccaaaatgatcctgttaaaagatatcagattttgtcactcccctgctccaaatcctcacatgatttctcagatcactttgtgtaaaagtcaaatatcttgcacaaaaattgtcaacctagattcgttttgagtagattttatatattctaggccctctgtatctgtggtttc

SEQ ID NO: 61437 - DNA, 353 bp, Homo sapiens
ctttgcctactctagaagttatctacatagagaaaatgaatatttgattcaagtatgcaattggcattttttaagatttccatgccaaaatttgctctctttggtcatttccatctgtccttggccactcttataatttcctcttacttgcatctttccccttccccttaatatactccatcctttcaacctctgctttttctatcactgtaccctcctcttaaaaaatttccttcttggccgggtgcggtggctcacacccgtagtcctagaactttgggagactgaggcaggtggatcacttgagcccaggagtacaaacctgggcaacacagtgggaccccatctctata

SEQ ID NO: 61438 - DNA, 399 bp, Homo sapiens
cttcagtattagccttctattggaatgtaaattattctgacttgaacccacactgaactgcctgcagcctgtaacttagaaggaaaaaacaaagtgccaccactgaactgctggccttctaacaaatatcacctattagcattcacaatgaaggcaagcatgaatcagcatgaaagtataccctatataaggtttcttttagcttctctcaagtcttgacacacacctgtgtcactgacagctagtatgcaaattgcctaaaagctccattaggctagtctagggcaaggaagcccatctgttcgttccgtggacactttccctcctaggatcctcatgtggggaattatgtccttggagacatggcagatggatgaatttgcgccagtgtctggtacc

SEQ ID NO: 61439 - DNA, 311 bp, Homo sapiens
gtatgtctggtggtcacactgctactcaagtgaaaagaataagaaccattgcaatctgtagtgcattttccctgtaaccgagagcgggctttgcttcacctctcatttaggctctagtccatgctggaacatcggagttagctcagcttagtccctcatgaagaaatatttcaacctgaatgggttttctggtgacagtctcattcatttccccttcttgggttaatttgctaaagctcacatcttaagaatatttgggactgatacacaacatgtgataatggataatggatagatttccataatatcaa

SEQ ID NO: 61440 - DNA, 331 bp, Homo sapiens
ctgcacccttcagtccacttagaggaccgttgtgtcacagcaggattggtgttcccgtcaaatgacatcctgtataccgagttttagaaaagcacatgagtgcacgtaacgggatgtagaaaagctattttcaagcatagttaaatgtggtgattttggaagccttcttcacttaactatgaggaaaattcattatcaccaacaaacatcttatgagagtagtatatcagcctaattgccatccctgacctcccatggtgagctgacgtgtaataaaaacaaaaataacaatagcgtgctcatagtactgctgattcctaccgtaggagct

SEQ ID NO: 61441 - DNA, 1370 bp, Homo sapiens
gacctttctttagtagaagacagtaagagaatactgttggctctgggaactaaccatttgagctgtgggacccagggaatctctcttgtaagcatcatctttagtgggtgactcctggtggccctcccagctctggtggtgctgtggggacctgccttggagatgccttggtactagtaccttttttgtaccaggccatgagcctagggcacagggcctctggcctgcagatttcaggaaggcagctgtgttgtgtgaaccgatacagcctgccagcacttctgtcccgagtgactgtcgttgtcatcgttagcatgttgcctgaaaagccttggggtctgggcgctgacactgaagcttttttttcccttctggctctgtgatgtccagcattacccagaacgccatggaggaccagagcgccacggccgggactcccgcgatggctgggggggctatggctctgacaagaggatgagcgagggccgggggctgcctcctccccccagacgtgactggggggaccatggccgaagagaggatgaccggtcatggcagggcacggccgacgggggcatgatggacagggatcacaagaggtggcaaggtgaggagcagctctgggctgggaccaggatgtgctggggagtgatggaaagatggaggccgcgccttctctccttgggggagcacaggaggtgctctgctctcagtgctggaatgaggaatgaagagcactccagacaccgcctgctctctggtggtctggcccaggagttggacagtgggcgttcccgagttctctctgctgggaggaagcctggacgtctatggtccctgtgcccaggtgtcttcctgggacccgctagttgtgggtacctgggggcctcaccaaagggagtggagtgggctaaatgtgccgtgggttccacgccgtgtgcgcaagttccctgtgtgaaagcacgtctgtcttccaggtggcgagagaagcatgtccggtcactccgggcctggccacatgatgaaccgaggaggaatgtcagggcgcggcagctttgccccaggcggggcctcccggggccaccccatcccacacggtggcatgcagggcgggtttggaggccagagccgggggagcaggcccagcgatgcccgcttcactcgccgctactgagtacttggaatcctgtgtcctgtctcgtggcaacaaggctatgttctgttaggagttaccttaaactgtgtaaaaatatttttttttaatctgctgccatattgtagctcaatacaatgtgaatttgtttttcgttttggggttttttttttttgtaataaatgtgtttccgttcacataccctttatttaaagtg

SEQ ID NO: 61442 - DNA, 382 bp, Homo sapiens
ccaaaggtacaacagatttactacatttaagacaggaatcttttctaatctctgtgcctattaaagaagccacctgcttagaagtactttgtagatgaaaaaatacttatgaatccactgtaacttcacaatcttgaatgccaaggaaaaactttactagtttcatttaccactattctttaaagttctttttgattttatgttttaaattttttaattttatattttgagacaaggtcttgctctgttgcccaggctgcggggcagtggcataaacgtggctcactgtcactttgacctcctgggctcaaggaatcctcccatcttagcctcctgagcaactgggaccacaggcatgcaccatcatgcccagctaattttt

SEQ ID NO: 61443 - DNA, 905 bp, Homo sapiens
catgcccggctaatttttgtatttttagtagagacagggtttcaccatgttggctaggctagtctcgaactcctgatctcaagtgatccgcccgcctcggcctcccagagtgctgggataacaggtgtgagccactgcgccctgccagctttgacttttagcaaatgactgagtcacctcgtgaaaactctgtaaatagagagtaatcaaaccaaacctgtggtatatttcacacggttaaatgagatcatgtaagtgaatactgtctggacaaaaagtaggtgctcaataaatgtcagcttctttattcgccattctgccagtacatttaagatgaaaaggtctgctttcaggggtttgtgctgttcagtcttactgtgcttctcagaattgaaaacagcatttagaaagacgtttttatataattattcatcttgtaaggatgcaagtgtcagaatctatttttaatccaacaaccagcttttctgtagtgttttaacagtttacaaatgttaactttccattctctctagggagatgagagaaatcgataaaaggcgattacaagtgaatactcctatagcaatacttgatacattaaattgtttaaaagtgttttttttcttcttcctcttctagttgcagtaatacgaggtttctaaaggccatacgtaactgtgtacataaagaggaaagctacttgggatagaaggactctcagattgggttttaacttctcaagtataaaaataagacaagtaggcaaaaatatcacattctgaagttttaagtgacagataaacaaattcaacatgcaccaccaactttttgagttttaggtacactaacttattgtgggatctgggccagctgctctacctctgtagacatttctaagtgggaaa

SEQ ID NO: 61444 - DNA, 269 bp, Homo sapiens
cattcaataagcccatttattaaattccatcaatatgtcatctcctcttctaggtactatgtcacccagcctgggtgacagcatgagactccatctcaaacaaaaaagtttaagtaagctcccagctgagacctaaagtatgagaagggaccagtggggaaagaattgcagggaagagcatccaggcaaagggaacagcttatgcaaacacacagattccaggggaaaagaactaggggacagtgaaattggaggaggtgaggcagcac

SEQ ID NO: 61445 - DNA, 104 bp, Homo sapiens
acaaatatcaggaaagtaattttatacataagctagataattgcctatagctgcgtatgctgtgaaataatttctgtttgaaaagacaggaaaaattatatggc

SEQ ID NO: 61446 - DNA, 378 bp, Homo sapiens
atgaacatatccaaggttctattttaaggccaagggatggggagtggtgagtgggcctatgttaggaggtcacacagatatataccagctttttatttacatgatcaacgggacttcatttttttctccagtccctcctgtgtttgacattaagacagcttaatgtgaattttaagtgcaataatgtgttgtttacccttaatgataacttttagggaatatttatacccctttaaaaaagttttgggcccacaatagctagattatttcgtgttttacagttatattttttacttaacagaaaatcacaactaacaataaacttttatggtgaatatagtttgttatcttagtgggactgttaagaaatttgtttat

SEQ ID NO: 61447 - DNA, 408 bp, Homo sapiens
cagaaatatttcagtattctttagaccatgccacataagctcagacaagttcaaatagctagtatatagcaagtctgtttctctggattgcatttgcaaaaattctgcatgctcagcagtgctaggaagctctataaaatgatggtgcaacgaaaaatcatcccaatgaggttaaaaaaggagatgcatccaaagagttcctacctaatgaattttctgagtttcagatgtatatatgtgtatgaaagctatgagtgatcatggaccaatacaactgaagagaacaagagaatctcgaggtcacagcaaaaaaaagtaagatgcagaaaggattgacatttcctgggactaaatgcatttcacttttgttttaatcacaaagtaaaacttacttatttgcttctgtca

SEQ ID NO: 61448 - DNA, 292 bp, Homo sapiens
ggccctgattttcaaccatgtgattgtttcactcctggactatgacttttggtgggagatggaagttttttagagaactgagctgtggaaaaatgacctctccttaacaacttgaagctatttttaagatttgagggtctggaccaaaagaaaaggagcatcaggttaagtcaaggtgacagataaggttgagagtaacgactaactccaaagatggcttccctgaagaaaagacatttgaagattttttttttcttaatcttgtcagaagatcccagaaaagttctgattt

SEQ ID NO: 61449 - DNA, 245 bp, Homo sapiens
agtatattagggtacactgggttggcatctacatagattctaggtggagataaaatcctgacagctgtatagtttcatgattatgattttcaggtgaaatatacagcctgggagaaatgtaatgtttgaggatatcggagatacggtgcctataattactacacaaaaaaacctaagagggcattagtatattagtttttatcttcaagtttaccttactcttcatacatgtcactgatgctaag

SEQ ID NO: 61450 - DNA, 1938 bp, Homo sapiens
ggtagggcccggagccggcgagtgctcccgggaactctgcctgcgcggcggcagcgaccggaggccaggcccagcacgccggagctggcctgctggggaggggcgggaggcgcgcgcgggagggtccgcccggccagggccccgggcgctcgcagaggccggccgcgctcccagcccgcccggagcccatgcccggcggctggccagtgctgcggcagaagggggggcccggctctgcatggccccggctgctgacatgacttctttgccactcggtgtcaaagtggaggactccgccttcggcaagccggcggggggaggcgcgggccaggcccccagcgccgccgcggccacggcagccgccatgggcgcggacgaggagggggccaagcccaaagtgtccccttcgctcctgcccttcagcgtggaggcgctcatggccgaccacaggaagccgggggccaaggagagcgccctggcgccctccgagggcgtgcaggcggcgggtggctcggcgcagccactgggcgtcccgccggggtcgctgggagccccggacgcgccctcttcgccgcggccgctcggccatttctcggtggggggactcctcaagctgccagaagatgcgctcgtcaaagccgagagccccgagaagcccgagaggaccccgtggatgcagagcccccgcttctccccgccgccggccaggcggctgagccccccagcctgcaccctccgcaaacacaagacgaaccgtaagccgcggacgcccttcaccaccgcgcagctgctggcgctggagcgcaagttccgccagaagcagtacctgtccatcgccgagcgcgcggagttctccagctcgctcagcctcactgagacgcaggtgaagatatggttccagaaccgccgcgccaaggcaaagagactacaagaggcagagctggagaagctgaagatggccgccaagcccatgctgccaccggctgccttcggcctctccttccctctcggcggccccgcagctgtagcggccgcggcgggtgcctcgctctacggtgcctctggccccttccagcgcgccgcgctgcctgtggcgcccgtgggactctacacggcccatgtgggctacagcatgtaccacctgacatagagggtcccaggtcgcccacctgtgggccagccgattcctccagccctggtgctgtacccccgacgtgctcccctgctcggcaccgccagccgccttccctttaaccctcacactgctccagtttcacctctttgctccctgagttcactctccgaagtctgatccctgccaaaaagtggctggaagagtcccttagtactcttctagcatttagatctacactctcgagttaaagatggggaaactgagggcagagaggttaacagatttatctaaggtccccagcagaattgacagttgaacagagctagaggccatgtctcctgcatagcttttccctgtcctgacaccaggcaagaaaagcgcagagaaatcggtgtctgacgattttggaaatgagaacaatctcaaaaaaaaaaaaaaaaaaaaaaaaaaaagaaaagagaaaaaaaagactagccagccaggaagatgaatcctagcttcttccattggaaaatttaagacaagttcaacaacaaaacatttgctctggggggcagggaaaacacagatgtgttgcaaaggtaggttgaagggacctctctcttaccagtaccagaaacacaattgtaaaattaaaaaaaaaaaaaaactctttctatttaacagtacatttgtgtggctctcaaacatccctttggaagggattgtgtgtactatgtaatatactgtatatttgaaattttattatcatttatattatagctatatttgttaaataaattaattttaagctacaaaaatta

SEQ ID NO: 61451 - DNA, 1936 bp, Homo sapiens
ttgcggtgcgaggctggtgcgaatcggccgaggcgtgctgcgcggtgtgatgcgaccggaggccaggcccagcacgccggagctggcctgctggggaggggcgggaggcgcgcgcgggagggtccgcccggccagggccccgggcgctcgcagaggccggccgcgctcccagcccgcccggagcccatgcccggcggctggccagtgctgcggcagaagggggggcccggctctgcatggccccggctgctgacatgacttctttgccactcggtgtcaaagtggaggactccgccttcggcaagccggcggggggaggcgcgggccaggcccccagcgccgccgcggccacggcagccgccatgggcgcggacgaggagggggccaagcccaaagtgtccccttcgctcctgcccttcagcgtggaggcgctcatggccgaccacaggaagccgggggccaaggagagcgccctggcgccctccgagggcgtgcaggcggcgggtggctcggcgcagccactgggcgtcccgccggggtcgctgggagccccggacgcgccctcttcgccgcggccgctcggccatttctcggtggggggactcctcaagctgccagaagatgcgctcgtcaaagccgagagccccgagaagcccgagaggaccccgtggatgcagagcccccgcttctccccgccgccggccaggcggctgagccccccagcctgcaccctccgcaaacacaagacgaaccgtaagccgcggacgcccttcaccaccgcgcagctgctggcgctggagcgcaagttccgccagaagcagtacctgtccatcgccgagcgcgcggagttctccagctcgctcagcctcactgagacgcaggtgaagatatggttccagaaccgccgcgccaaggcaaagagactacaagaggcagagctggagaagctgaagatggccgccaagcccatgctgccaccggctgccttcggcctctccttccctctcggcggccccgcagctgtagcggccgcggcgggtgcctcgctctacggtgcctctggccccttccagcgcgccgcgctgcctgtggcgcccgtgggactctacacggcccatgtgggctacagcatgtaccacctgacatagagggtcccaggtcgcccacctgtgggccagccgattcctccagccctggtgctgtacccccgacgtgctcccctgctcggcaccgccagccgccttccctttaaccctcacactgctccagtttcacctctttgctccctgagttcactctccgaagtctgatccctgccaaaaagtggctggaagagtcccttagtactcttctagcatttagatctacactctcgagttaaagatggggaaactgagggcagagaggttaacagatttatctaaggtccccagcagaattgacagttgaacagagctagaggccatgtctcctgcatagcttttccctgtcctgacaccaggcaagaaaagcgcagagaaatcggtgtctgacgattttggaaatgagaacaatctcaaaaaaaaaaaaaaaaaaaaaaaaaaaagaaaagagaaaaaaaagactagccagccaggaagatgaatcctagcttcttccattggaaaatttaagacaagttcaacaacaaaacatttgctctggggggcagggaaaacacagatgtgttgcaaaggtaggttgaagggacctctctcttaccagtaccagaaacacaattgtaaaattaaaaaaaaaaaaaaactctttctatttaacagtacatttgtgtggctctcaaacatccctttggaagggattgtgtgtactatgtaatatactgtatatttgaaattttattatcatttatattatagctatatttgttaaataaattaattttaagctacaaaaatta

SEQ ID NO: 61452 - DNA, 1412 bp, Homo sapiens
taagatgtggacatcgagccttcaacgtgggtatttttctcctggaatcttagtttcttcatttgcaaaaagtagacaggaacttctcccctgcggggttgcaatgggaattggagaaaatatatttcaagtgccttgcgcgatgcacggcaccgaggcacttggcggcactcaatatctgggcggctgagccccccagcctgcaccctccgcaaacacaagacgaaccgtaagccgcggacgcccttcaccaccgcgcagctgctggcgctggagcgcaagttccgccagaagcagtacctgtccatcgccgagcgcgcggagttctccagctcgctcagcctcactgagacgcaggtgaagatatggttccagaaccgccgcgccaaggcaaagagactacaagaggcagagctggagaagctgaagatggccgccaagcccatgctgccaccggctgccttcggcctctccttccctctcggcggccccgcagctgtagcggccgcggcgggtgcctcgctctacggtgcctctggccccttccagcgcgccgcgctgcctgtggcgcccgtgggactctacacggcccatgtgggctacagcatgtaccacctgacatagagggtcccaggtcgcccacctgtgggccagccgattcctccagccctggtgctgtacccccgacgtgctcccctgctcggcaccgccagccgccttccctttaaccctcacactgctccagtttcacctctttgctccctgagttcactctccgaagtctgatccctgccaaaaagtggctggaagagtcccttagtactcttctagcatttagatctacactctcgagttaaagatggggaaactgagggcagagaggttaacagatttatctaaggtccccagcagaattgacagttgaacagagctagaggccatgtctcctgcatagcttttccctgtcctgacaccaggcaagaaaagcgcagagaaatcggtgtctgacgattttggaaatgagaacaatctcaaaaaaaaaaaaaaaaaaaaaaaaaaaagaaaagagaaaaaaaagactagccagccaggaagatgaatcctagcttcttccattggaaaatttaagacaagttcaacaacaaaacatttgctctggggggcagggaaaacacagatgtgttgcaaaggtaggttgaagggacctctctcttaccagtaccagaaacacaattgtaaaattaaaaaaaaaaaaaaactctttctatttaacagtacatttgtgtggctctcaaacatccctttggaagggattgtgtgtactatgtaatatactgtatatttgaaattttattatcatttatattatagctatatttgttaaataaattaattttaagctacaaaaatta

SEQ ID NO: 61453 - DNA, 1503 bp, Homo sapiens
taagatgtggacatcgagccttcaacgtgggtatttttctcctggaatcttagtttcttcatttgcaaaaagtagacaggaacttctcccctgcggggttgcaatgggaattggagaaaatatatttcaagtgccttgcgcgatgcacggcaccgaggcacttggcggcactcaatatctggtattgtttggctattattactacttcttgggctgatcatgctccgatgcttctctcttaaccccttgcttttttttctttcggccctcagggcggctgagccccccagcctgcaccctccgcaaacacaagacgaaccgtaagccgcggacgcccttcaccaccgcgcagctgctggcgctggagcgcaagttccgccagaagcagtacctgtccatcgccgagcgcgcggagttctccagctcgctcagcctcactgagacgcaggtgaagatatggttccagaaccgccgcgccaaggcaaagagactacaagaggcagagctggagaagctgaagatggccgccaagcccatgctgccaccggctgccttcggcctctccttccctctcggcggccccgcagctgtagcggccgcggcgggtgcctcgctctacggtgcctctggccccttccagcgcgccgcgctgcctgtggcgcccgtgggactctacacggcccatgtgggctacagcatgtaccacctgacatagagggtcccaggtcgcccacctgtgggccagccgattcctccagccctggtgctgtacccccgacgtgctcccctgctcggcaccgccagccgccttccctttaaccctcacactgctccagtttcacctctttgctccctgagttcactctccgaagtctgatccctgccaaaaagtggctggaagagtcccttagtactcttctagcatttagatctacactctcgagttaaagatggggaaactgagggcagagaggttaacagatttatctaaggtccccagcagaattgacagttgaacagagctagaggccatgtctcctgcatagcttttccctgtcctgacaccaggcaagaaaagcgcagagaaatcggtgtctgacgattttggaaatgagaacaatctcaaaaaaaaaaaaaaaaaaaaaaaaaaaagaaaagagaaaaaaaagactagccagccaggaagatgaatcctagcttcttccattggaaaatttaagacaagttcaacaacaaaacatttgctctggggggcagggaaaacacagatgtgttgcaaaggtaggttgaagggacctctctcttaccagtaccagaaacacaattgtaaaattaaaaaaaaaaaaaaactctttctatttaacagtacatttgtgtggctctcaaacatccctttggaagggattgtgtgtactatgtaatatactgtatatttgaaattttattatcatttatattatagctatatttgttaaataaattaattttaagctacaaaaatta

SEQ ID NO: 61454 - DNA, 1336 bp, Homo sapiens
ggtagggcccggagccggcgagtgctcccgggaactctgcctgcgcggcggcagcgaccggaggccaggcccagcacgccggagctggcctgctggggaggggcgggaggcgcgcgcgggagggtccgcccggccagggccccgggcgctcgcagaggccggccgcgctcccagcccgcccggagcccatgcccggcggctggccagtgctgcggcagaagggggggcccggctctgcatggccccggctgctgacatgacttctttgccactcggtgtcaaagtggaggactccgccttcggcaagccggcggggggaggcgcgggccaggcccccagcgccgccgcggccacggcagccgccatgggcgcggacgaggagggggccaagcccaaagtgtccccttcgctcctgcccttcagcgtggaggcgctcatggccgaccacaggaagccgggggccaaggagagcgccctggcgccctccgagggcgtgcaggcggcgggtggctcggcgcagccactgggcgtcccgccggggtcgctgggagccccggacgcgccctcttcgccgcggccgctcggccatttctcggtggggggactcctcaagctgccagaagatgcgctcgtcaaagccgagagccccgagaagcccgagaggaccccgtggatgcagagcccccgcttctccccgccgccggccaggtgggtttggagccccccagggtttgaccctttcggggaaacaccaccaaaggacggacacccgtgtaagccgggagggacgcgcccttttcaaccaacgggcggcaggggtttggtgggggcgcgcgctgggacgcggacaaagggttcccggccaagaatgggatgggtacccctgtggtcccacttcagacccggaacgcggcaggggggagttcactccaaggttcggtttcagcgctttaagttgtggacgcatgcgcgccagcgggtgggaaaggattgttgggcgtcccaagagaaccccggccggcgccaaggggcaaacgaaggacctaccgaggaggggcagcatgtttgggagcaatcgctggaagtttgggcctgccaaggcctagtggttggcccgcggggtggcttgggcgcctcttctttcccttttgggggggccccggaattatgtacgggcccgaggagggtcgctccgcatctacggggcgctggggccccttcaggagcgcgggtagctgtggcgccgggggaaccttaccggccgtggtggtcaacgtgtccctgattgaggcccggccccatttggaggttctccgctgggtgcccgatgcccggg

SEQ ID NO: 61455 - DNA, 829 bp, Homo sapiens
agcggagctatccgcggccatccggcggtggtgacgcgagaggctggggtctccagcctttagtctgcctgcgcgttcacatgcacccacttacttcttgaagtctactcctcacaagtaagggctatggtgcggggtgcccgattcctgagaaatctgaagatgtggaagtttattttttcttcccaaaatcagcagtagagggactcaggaccaactcctcttcatcttcgtcttcctcagcctgctcaatgtgaagcccctgatcatgattcacttccacttaataaataaagtgtttacaaatcagaataacttttagacaatattaaggtggtaatcatgaacagaaaagatttgtagttcttccatggggaaaacctggaaattctgtaaagctaaaatatagaaatgctcaagaactgcgaatggagaaagtacagttagagtttgagaaccaagagatggagaagaaactgcaagaattccgatccacaagaaacaaagaaaaggaagatagagagtcaagcgagtattactggaaatctggaaaagtgggcaaattggtcaatcaatcatatatgatgtcacaaaataacaggaaatgttgttaagttttctgctggaaaagtgaaattaaaattgctgaaggaacagattcaagagccagtgaaaccaaagttaattataaaatggcaaattcttcagaatgtgaaaaacccaagataaatgggaaagttgtggacaggtgagaacaaagctgttctactggtatgccttgaatgtggagaagattatgttcaggatgctttgctaaagttcacaagaa

SEQ ID NO: 61456 - DNA, 747 bp, Homo sapiens
agcggagctatccgcggccatccggcggtggtgacgcgagaggctggggtctccagcctttagtctgcctgcgcgttcacatgcacccacttacttcttgaagtctactcctcacaagtaagggctatggtgcggggtgcccgattcctgagaaatctgaagatgtggaagtttattttttcttcccaaaatcagcagtagagggactcagaagtgtttacaaatcagaataacttttagacaatattaaggtggtaatcatgaacagaaaagatttgtagttcttccatggggaaaacctggaaattctgtaaagctaaaatatagaaatgctcaagaactgcgaatggagaaagtacagttagagtttgagaaccaagagatggagaagaaactgcaagaattccgatccacaagaaacaaagaaaaggaagatagagagtcaagcgagtattactggaaatctggaaaagtgggcaaattggtcaatcaatcatatatgatgtcacaaaataacaggaaatgttgttaagttttctgctggaaaagtgaaattaaaattgctgaaggaacagattcaagagccagtgaaaccaaagttaattataaaatggcaaattcttcagaatgtgaaaaacccaagataaatgggaaagttgtggacaggtgagaacaaagctgttctactggtatgccttgaatgtggagaagattatgttcaggatgctttgctaaagttcacaagaa

SEQ ID NO: 61457 - DNA, 791 bp, Homo sapiens
agcggagctatccgcggccatccggcggtggtgacgcgagaggctggggtctccaggaccaactcctcttcatcttcgtcttcctcagcctgctcaatgtgaagcccctgatcatgattcacttccacttaataaataaagtgtttacaaatcagaataacttttagacaatattaaggtggtaatcatgaacagaaaagatttgtagttcttccatggggaaaacctggaaattctgtaaagctaaaatatagcaatgtaataattaaaacaaaagtctaagatttgaagagataatttgcttcaggattttgatggaaggcaaatgctaactttaaaaaccagatttcggagaagtacaaaagaaatagaaatgctcaagaactgcgaatggagaaagtacagttagagtttgagaaccaagagatggagaagaaactgcaagaattccgatccacaagaaacaaagaaaaggaagatagagagtcaagcgagtattactggaaatctggaaaagtgggcaaattggtcaatcaatcatatatgatgtcacaaaataacaggaaatgttgttaagttttctgctggaaaagtgaaattaaaattgctgaaggaacagattcaagagccagtgaaaccaaagttaattataaaatggcaaattcttcagaatgtgaaaaacccaagataaatgggaaagttgtggacaggtgagaacaaagctgttctactggtatgccttgaatgtggagaagattatgttcaggatgctttgctaaagttcacaagaa

SEQ ID NO: 61458 - DNA, 946 bp, Homo sapiens
agcggagctatccgcggccatccggcggtggtgacgcgagaggctggggtctccagcctttagtctgcctgcgcgttcacatgcacccacttacttcttgaagtctactcctcacaagtaagggctatggtgcggggtgcccgattcctgagaaatctgaagatgtggaagtttattttttcttcccaaaatcagcagtagagggactcaggaccaactcctcttcatcttcgtcttcctcagcctgctcaatgtgaagcccctgatcatgattcacttccacttaataaataaagtgtttacaaatcagaataacttttagacaatattaaggtggtaatcatgaacagaaaagatttgtagttcttccatggggaaaacctggaaattctgtaaagctaaaatatagcaatgtaataattaaaacaaaagtctaagatttgaagagataatttgcttcaggattttgatggaaggcaaatgctaactttaaaaaccagatttcggagaagtacaaaagaaatagaaatgctcaagaactgcgaatggagaaagtacagttagagtttgagaaccaagagatggagaagaaactgcaagaattccgatccacaagaaacaaagaaaaggaagatagagagtcaagcgagtattactggaaatctggaaaagtgggcaaattggtcaatcaatcatatatgatgtcacaaaataacaggaaatgttgttaagttttctgctggaaaagtgaaattaaaattgctgaaggaacagattcaagagccagtgaaaccaaagttaattataaaatggcaaattcttcagaatgtgaaaaacccaagataaatgggaaagttgtggacaggtgagaacaaagctgttctactggtatgccttgaatgtggagaagattatgttcaggatgctttgctaaagttcacaagaa

SEQ ID NO: 61459 - DNA, 340 bp, Homo sapiens
  misc_feature (290)..(290): n is a, c, g, or t
  misc_feature (323)..(323): n is a, c, g, or t
  misc_feature (334)..(334): n is a, c, g, or t
agcggagctatccgcggccatccggcggtggtgacgcgagaggctggggtctccagcctttagtctgcctgcgcgttcacatgcacccacttacttcttgaagtctactcctcacaagtaagggctatggtgcggggtgcccgattcctgagaaatctgaagatgtggaagtttattttttcttcccaaaatcagcagtagagggactcaggaggagaccaaagtacaacacacagctcttttattgccagtagaaacattaaacatagagagacctgaaccatctctanagatagtccgaactgggatggattttggtgctntttcatggatntgtcca

SEQ ID NO: 61460 - DNA, 298 bp, Homo sapiens
tcccttttcctccaggctcagcagtgacatgtctggactgagggcagccacggggctatgtactggtctctgagctgtctaccttacatcaaggtgctcagagctgagagggctggccgcgagtgtaatttgattagagctggattgttcagcattgtaccaatggaagctctatgttaattagtgttctttaagatttacagtacatggcagggtacagtggctcatgcctgcactttgggaggcctaggtgggtggatcacctgaggtcaggagttggagatcagcctgaccaaca

SEQ ID NO: 61461 - DNA, 564 bp, Homo sapiens
gaggctaaggtgagaggaacccttgagcccaggaggtcgaggctgcagtgagctatgatcatgccactgcactccagcctggacaacaaagtgagaccctgtctcaaaaaaaaaaaaaaaaaaaattgtgtgaggggaaataacctaaatgtccaaccatgggagaattagtaaaagaaatcacagtaactgcatgtgactgagtcctgtgttactataagtcacatcttaaaaatgacttactaacaggagcatgtcattaaatgatgtgcaccttaaaaacttagaaatttcagttgtttatttttaaaaacatctacgtagcactatgtgtcaggcactatgcactttgttcatctgaactcatctttttatggcgagagatacaataaaagtcaaaatacaacggtctggaatttcaccatatgaattggtgttaaaatctgataggtaaaaagaactgtagagacagactgtaataggtaagtaggcacaaaagacataaataggctgttcacagaaaaaaggcaataaacattaaaggatgcttaaaagcactgtgag

SEQ ID NO: 61462 - DNA, 870 bp, Homo sapiens
gattaaaaccctttactctggggaggcagccaagagctctgtccacaaaaccaaatctgggtgtcagaggccaagaccccaggttgggatcagggaccaccccctcacggggcataaggtcagttttcccccagagcccgggcccctgtccccctacagtgcaagtgtggtccctggagccccggtgtggagtggtgagtcccggagtagtgcttgtcttggaaagaggggcccttggccagccacccctcagcgacactatacaactcctggagcgcctgccaggattgaagccatgacaaggtgcaggtgggtgccaggcccgctgtgggtgggcactggtcctcagcaccactcaccactgccaggcaggccggggaccagcagactcctcagccaaccctgtcccttggcccggccctgccacagagagggaccccagcccatcatgggcatcggcagggcttggccacttccacctcccgctagaagcctagcgagtgtggatgcatagacatctgagcccagcttcctgcatccccacctggccctcaccacccctcacccccaggcagcgggccagccccgccttcactcccctcccaaccaccccccccaccaccaccaccacccgtaccctcctaggggcttccagagcttttacacctggagaaacattccccactcccctttggcctccctgtaccctgaactgtgaatatttttaacccctaaatatgtaaatacggccagctcttgtgacacagaagctgttttatcaactgtcagtccccattcctttatgataggattctccacagtggtttccgactcaggctccagtggaccaaataaaagtgttttgttaaa

SEQ ID NO: 61463 - DNA, 246 bp, Homo sapiens
tcctcttgaggctcctccatggccctgggccaggcttgcagggaccttctggggcctctcccatcccacagctgctggaaggtctctggtgacaaacggccactgcccactttgggcttccctgctgctgcctcagcctcctctccctgctactcatttccacttttaattcaggtggtcattgaaggctggcattaggcctgccagattctgagggccacctctgacccctcacctgccaacgtg

SEQ ID NO: 61464 - DNA, 651 bp, Homo sapiens
agcacagatggaatcggcttcctgagatccacagaggagaggaaaaacattctgcacttggaccacgcctctttggaaagtgcttccacagatggtatttcctttgaacctggccacagccaaggatgggaaacaggaaggctgagccctgtcagaaaggagttgaacctaaatgccaccaggccatccttccctcctaaggaagctctgaaagtcttacccaagtctgtaactcagactgccccagctcctgcaaaggcagaagttttgttttcacgcatgggagccaaacaaagactcctcccagagtgctccttcctgccaagtctcctgaaggaacagagtgtggtcacgtgcctattgtcagtttccaactgctctctgacttgcacgtgcaccatgtgatgtctgggccaccaggcaggctgcaggtgctccaaaagttctaaggtacttagcaagaagtacaagataagtcaggatccctggtttcaggtcccattctgccctactcatcctgagcatgttactcacctcattgagcaaaagagtaataataatgcctttctcccaggtttgatgatgtgaggatcattttgatatgagggttatcatgtatgcataaacactttgcaaacaactacaagaatt

SEQ ID NO: 61465 - DNA, 1237 bp, Homo sapiens
aggacgtttgcctcctgccctaggagaaacgttcgctctggaggcttgggcggcaagagccccttgtggccaccgagtcctccgacgccctcgccaggctggcctttgggttggcccaggcaggacgggcagccgagagcactcgggccgcgtcgccaggagccgcccagggtgagccatgttcgtaggcgtcgcccggcactctgggagccaggatgaagtctcaaggggagtagagccgctggaggccgcgcgggcccagcctgctaaggacaggagggccaagggaaccccgaagtcctcgaagcccgggaaaaaacaccggtatctgagactacttccagaggccttgataaggttcggcggtttccgaaaaaggaaaaaagccaagtcctcagtttccaagaagccgggagaagtggatgacagtttggagcagccctgtggtttgggctgcttagtcagcacctgctgtgagtgttgcaataacattcgctgcttcatgattttctactgcatcctgctcatatgtcaaggtgtggtgtttggtcttatagatgtcagcattggcgattttcagaaggaatatcaactgaaaaccattgagaagttggcattggaaaagagttacgatatttcatctggcctggtagcaatatttatagcattctatggagacagaaaaaaagtaatatggtttgtagcttcctcctttttaataggacttggatcacttttatgtgcttttccatccattaatgaagaaaataaacaaagtaaggtaggaattgaagctggtatctatttaggtattgcagaatgtacatcaatgattggatatgctctgggttatgtgctaggagcaccactagttaaagtccctgagaatactacttctgcaacaaagttcaacacggataaaagctaggaaacgtaaacagcttcatttttttgacagcagacttaaagatctgaaacttggaactaatatcaaggatttatgtgctgctctttggattctgatgaagaatccagtgctcatatgcctagctctgtcaaaagctacagaatatttagttattattggagcttctgaatttttgcctatatatttagaaaatcagtttatattaacacccactgtggcaactacacttgcaggtagatttaccttcttattgtcatttcaaaaattttgcactgtcttattgtatgtacttatgaaatacttgaaata

SEQ ID NO: 61466 - DNA, 1214 bp, Homo sapiens
aggacgtttgcctcctgccctaggagaaacgttcgctctggaggcttgggcggcaagagccccttgtggccaccgagtcctccgacgccctcgccaggctggcctttgggttggcccaggcaggacgggcagccgagagcactcgggccgcgtcgccaggagccgcccagggtgagccatgttcgtaggcgtcgcccggcactctgggagccaggatgaagtctcaaggggagtagagccgctggaggccgcgcgggcccagcctgctaaggacaggagggccaagggaaccccgaagtcctcgaagcccgggaaaaaacaccggtatctgagactacttccagaggccttgataaggttcggcggtttccgaaaaaggaaaaaagccaagtcctcagtttccaagaagccgggagaagtggatgacagtttggagcagccctgtggtttgggctgcttagtcagcacctgctgtgagtgttgcaataacattcgctgcttcatgattttctactgcatcctgctcatatgtcaaggtgtggtgtttggtcttatagatgtcagcattggcgattttcagaaggaatatcaactgaaaaccattgagaagttggcattggaaaagactggtatctatttaggtattgcagaatgtacatcaatgattggatatgctctgggttatgtgctaggagcaccactagttaaagtccctgagaatactacttctgcaacaaacactacagtcaataatggtagtccagaatggctatggacttggtggattaattttctttttgccgctgtcgttgcatggtgtacattaataccattgtcatgctttccaaacaatatgccaggttcaacacggataaaagctaggaaacgtaaacagcttcatttttttgacagcagacttaaagatctgaaacttggaactaatatcaaggatttatgtgctgctctttggattctgatgaagaatccagtgctcatatgcctagctctgtcaaaagctacagaatatttagttattattggagcttctgaatttttgcctatatatttagaaaatcagtttatattaacacccactgtggcaactacacttgcaggacttgttttaattccaggaggtgcacttggccagcttctgggaggtgtcattgtttccacattagaaatgtcttgtaaagcccttatgagatttataa

SEQ ID NO: 61467 - DNA, 448 bp, Homo sapiens
agacaaataacacattattgaaatgccctgataagtgcttttcatagataatactatggaattacagaggaggggcacttaatccagactgggaggggcataaaagaggaatgcactacttcccataacaagaagttctacattgggaccacaccactccaggattgattcattcaatggctcataaatctgccatcctcaggacccagtgatgtccaaggactgaaaaggattgtgtgtctctacttattagcttgagaaaccttgccagaggtccttggacgctttctacctatttgcccaaattagatatatccctggcaaggtgaatgagtgccttagatcagtcccaattcccttctgtaggcctgaagctagagagacttagcaggaagatggaacttacccaaaagtagagctctgccagcatgggaaaaaggaaaagtgc

SEQ ID NO: 61468 - DNA, 301 bp, Homo sapiens
ttccttcacccttaaaggggattatatctacttcattgggtgtatgagaactgatatcctattatgtataaaatgctgaaaacaattcccagcactgaacaaaatttgcaaactaatatatcattgtcatcaacaataacaaaaaataatagcaacatagtatactattatagctcattgcaccatgttcctattttgtgtgttgtctattattttcatcaaaatagaattatcaagttattttaagtcattatttatgcttctgattatttcttggaatattaaaaaacaatttggggga

SEQ ID NO: 61469 - DNA, 385 bp, Homo sapiens
agacttagggtgcctttgagacatttttctttagctggctttttaatgatgcctaattcttatttcataaatgcaagaaccaaaacaaaccactgaacccgattgacactttgcccctgggtggtggtattcaacttgtctgtgtgttttggagggaaaaaaacaagatatcattcataagacatgcttgattcatattttcattaatctctttgtagaacattaaagaaattcccttgtgacgttttggaggacttatttgtgcttgtatgtgcagtcattattgaagtttattttcgtgtttgttttattaagtgaatattcaattctggaggaagttcctgaattaaactgattagaggatttgtttccttaaaacttaatt

SEQ ID NO: 61470 - DNA, 593 bp, Homo sapiens
cagttgtgcaccaccacaccaaacaagaattgattatattgcttctgtgctatggtaccagcagattattcagccatgcttctaaaggcagtctagcctagaggccgtacagctgtttggtttgcatatgttttagcttttcttttggtttttagtatttcctaaaacataggggaaaaaacgaggtcatttctactaagcactaggacctgccatagtgagtttaagtgcctaccttgcagcagttaatactagattgtgttctgtctctgttcaggtaacaggactgcattcctgctcaaggatgattccttgctgctgcttatgttctgttgtttttaggatggagctggttgttattcaccaactaagggaacagttagagcagagatgaagaaattatgaactgttatccttattctgagccttctcctcctaaccctcatcagttaaggttaggaagaacaagatgccataatgcctatgaagacttctttaacaatcttgtttgggtttttttctaggtatattattagtgttttatggtctatgttctttaagcaataaataaattgttcattttaaaaaaattg

SEQ ID NO: 61471 - DNA, 530 bp, Homo sapiens
gacattcatgcttccataacacactttatcaacctacttaataattctgtgtgtcatgtgtcatggtaagtcacagagatagaatctgtatccatgggatatgtatagacttattggtagcaaagtatgtaataaagggttggttcaattatttgagtctttttcttacccatgtctcttctctgagacaggaaagaaatagtcaatacaactaagtgttccctcactctcctgtgagtgtgactgatatatccatgtgtcttttgtacgttcaatgaattccctgcaggttgtctgggatatctttgtttaattctggagcacatgaagggaacatcaaagtgccatggaagtaaatctaggcccaatctgggtggatgatttcctgtgagttcctctaccagtggaggctgatccaggatattgtgacaacacagtaccctttctagaagaaatttctaccttatcattgataatgaagcctgtatcactctcattttcaaatataaccataaaaaaagttcacaact

SEQ ID NO: 61472 - DNA, 741 bp, Homo sapiens
tcgctctgtcgccaggctggagtacagtggcgcgatctccagtcactgcaatctccgcctcccaggttcaagcaattctcctacctcagcctcccgagtagctgggactacaggcgcgcgccaccacgcccagctaatttttgtatttttagtagagacggggtttcaccatgttggccaggatggtctcagtctcttgacctcgtgatccgtccgcctaggcctccaaaagtgctgggattacaggcgtgagccaccgcgcctggcctacgttaaaattttaatatactcctttgattttgacagtggagaaaactagaatagtaaagttgtcttttcaggaagtggatgatttgggcagtcaaaactgcttttcagagtttcgatgtggtttacaatggtatggacagctggtatgatttgttagttttctacttgtggtgtctttaggttttaaagtttcggagagtcgctgagtgatgtgagtctaaactctagccagtccccgaattgtgagatagttttccttctaaaatatacttcgtacaagctggtcatttttccccttaattcttttgatgttatctgatatactgagaaggttttgtttggtgttcagttttgtgttactgattttgccataaaaactgtttatttacatgatttttagtttttagttcttatagtctttgaattgaataagaaaagtaaatactgaaatgctttgaaagataacaaaat

SEQ ID NO: 61473 - DNA, 2953 bp, Homo sapiens
  misc_feature (2050)..(2050): n is a, c, g, or t
gtatacaacgtgtcagctaaattcagaaattaatctctggggaattattcagtgtttcaacttatacacacacacacacacacacacacacagagagagagagagagagagagagagagagagattgttccagctgctctcgctagagaaagggagtgacccaaggggccgcgagtgaagggacaggatggcttaggtacctctgcccacaggaccccacaacagggagaggttccagctacagctcctccgtggggtcatggcaggggctggggagtcccctcaaaagccctgagcccccctgcaccgccgctaagggacaccccagaagttagcatcagtgggactcggaagctccgatctcaacaacatcccagctatggctggcgattctaggaatgccatgaaccaggacatggagattggagtcactccctgggaccccaagaagattccaaaacaggcccgcgattatgtccccattgccacagaccgtacgcgcctgctggccgagggcaagaagccacgccagcgctacatggagaagagcggcaagtgcaacgtgcaccacggcaacgtccaggagacctaccggtacctgagtgacctcttcaccaccctggtggacctcaagtggcgcttcaacttgctcgtcttcaccatggtttacactgtcacctggctgttcttcggcttcatttggtggctcattgcttatatccggggtgacctggaccatgttggcgaccaagagtggattccttgtgttgaaaacctcagtggcttcgtgtccgctttcctgttctccattgagaccgaaacaaccattgggtatggcttccgagtcatcacagagaagtgtccagaggggattatactcctcttggtccaggccatcctgggctccatcgtcaatgccttcatggtggggtgcatgtttgtcaagatcagccagcccaagaagagagcggagaccctcatgttttccaacaacgcagtcatctccatgcgggacgagaagctgtgcctcatgttccgggtgggcgacctccgcaactcccacatcgtggaggcctccatccgggccaagctcatcaagtcccggcagaccaaagagggggagttcatccccctgaaccagacagacatcaacgtgggctttgacacgggcgacgaccgcctcttcctggtgtctcctctgatcatctcccacgagatcaacgagaagagccctttctgggagatgtctcaggctcagctgcatcaggaagagtttgaagttgtggtcattctagaagggatggtggaagccacaggcatgacctgccaagcccggagctcctacatggatacagaggtgctctggggccaccgattcacaccagtcctcaccttggaaaagggcttctatgaggtggactacaacaccttccatgatacctatgagaccaacacacccagctgctgtgccaaggagctggcagaaatgaagagggaaggccggctcctccagtacctccccagccccccactgctggggggctgtgctgaggcagggctggatgcagaggctgagcagaatgaagaagatgagcccaaggggctgggtgggtccagggaggccaggggctcggtgtgaggggtgcagcctccctaagacctcctgtcactggcttcagtgaacacagacactgcagagcctgggagcaggggaggggaatagttgagtgtgctgtttgggggctcaggagccatcaaggctgtggggaggaaccataaacccagccctcacagctcccagcacagggcctccctgagccagtggcatcctgcctgggccccccatggcagtgctgcctcttgtaggtgctggctaagggccaggccaggatgagtttccccatggtgaatgttaccggatggcatctgttctctccatgccctgggtcacttccttttttgggtctcacagacccctccaggggctgacacctagagagaaccatcaccttgtcccctcattccttccaccctgaggcttgctgtggantcagagaggagacttacctgatgagagctcaaacctctagtctgggatgagctcacagagccctcatgagttaagatccatccatatcacataggcaattccttttaaatcagataccaacgacccattactgagaggtacagagcgtacagcccttggtgttctctgctgttatctgccaaatgtgtgtgtttttcctctgctgtgttctgtgtgtccagtgtagcctattggagaatcggtctcattagagtgactcttagaaggtggcctgggactagacagcccctctgagcacatgcatagtggcatcagcagcttcctggcctactcccaatcacactgtgccctgcacctcccaccaagggggaaccccagcagctggggcttttctagtgctttttggcccaagaatctcagagtgcttctaatcatcacagtagtttttgtgttttgttttgttttgttttgttttgttttgtttttttcacaatctcagccagcctgtggtgtgacctggggagaaagttgagtgtcaggggacatgatgagccagttggccctgaaacaggaatggggcaaagagcaaggagagccaggagcatttaaaaatcagcatctgggccaggcaagatggctcacacctgtgatcccagcattttgggaggccgaggcgggtggatcatgaggtcaggagatcgagaccatcctggctaacacggtgaaaccccgtctctactgaaaatagaaaaaattagccaggcatggtggcaggtgcctgtagtcccagctactcgggaagctgaggcagaagaatggcatgaacctgggaggtggaggttgcagtgagccaagatcatgccactgcactccagcctgggcgacagagcgagactccatctc

SEQ ID NO: 61474 - DNA, 2663 bp, Homo sapiens
  misc_feature (1760)..(1760): n is a, c, g, or t
ggggtgggggtggcttccatcttgtgttctagtgaatcagaacagcccacttcactgatggtgtctttttaactcaaagcatcccagctatggctggcgattctaggaatgccatgaaccaggacatggagattggagtcactccctgggaccccaagaagattccaaaacaggcccgcgattatgtccccattgccacagaccgtacgcgcctgctggccgagggcaagaagccacgccagcgctacatggagaagagcggcaagtgcaacgtgcaccacggcaacgtccaggagacctaccggtacctgagtgacctcttcaccaccctggtggacctcaagtggcgcttcaacttgctcgtcttcaccatggtttacactgtcacctggctgttcttcggcttcatttggtggctcattgcttatatccggggtgacctggaccatgttggcgaccaagagtggattccttgtgttgaaaacctcagtggcttcgtgtccgctttcctgttctccattgagaccgaaacaaccattgggtatggcttccgagtcatcacagagaagtgtccagaggggattatactcctcttggtccaggccatcctgggctccatcgtcaatgccttcatggtggggtgcatgtttgtcaagatcagccagcccaagaagagagcggagaccctcatgttttccaacaacgcagtcatctccatgcgggacgagaagctgtgcctcatgttccgggtgggcgacctccgcaactcccacatcgtggaggcctccatccgggccaagctcatcaagtcccggcagaccaaagagggggagttcatccccctgaaccagacagacatcaacgtgggctttgacacgggcgacgaccgcctcttcctggtgtctcctctgatcatctcccacgagatcaacgagaagagccctttctgggagatgtctcaggctcagctgcatcaggaagagtttgaagttgtggtcattctagaagggatggtggaagccacaggcatgacctgccaagcccggagctcctacatggatacagaggtgctctggggccaccgattcacaccagtcctcaccttggaaaagggcttctatgaggtggactacaacaccttccatgatacctatgagaccaacacacccagctgctgtgccaaggagctggcagaaatgaagagggaaggccggctcctccagtacctccccagccccccactgctggggggctgtgctgaggcagggctggatgcagaggctgagcagaatgaagaagatgagcccaaggggctgggtgggtccagggaggccaggggctcggtgtgaggggtgcagcctccctaagacctcctgtcactggcttcagtgaacacagacactgcagagcctgggagcaggggaggggaatagttgagtgtgctgtttgggggctcaggagccatcaaggctgtggggaggaaccataaacccagccctcacagctcccagcacagggcctccctgagccagtggcatcctgcctgggccccccatggcagtgctgcctcttgtaggtgctggctaagggccaggccaggatgagtttccccatggtgaatgttaccggatggcatctgttctctccatgccctgggtcacttccttttttgggtctcacagacccctccaggggctgacacctagagagaaccatcaccttgtcccctcattccttccaccctgaggcttgctgtggantcagagaggagacttacctgatgagagctcaaacctctagtctgggatgagctcacagagccctcatgagttaagatccatccatatcacataggcaattccttttaaatcagataccaacgacccattactgagaggtacagagcgtacagcccttggtgttctctgctgttatctgccaaatgtgtgtgtttttcctctgctgtgttctgtgtgtccagtgtagcctattggagaatcggtctcattagagtgactcttagaaggtggcctgggactagacagcccctctgagcacatgcatagtggcatcagcagcttcctggcctactcccaatcacactgtgccctgcacctcccaccaagggggaaccccagcagctggggcttttctagtgctttttggcccaagaatctcagagtgcttctaatcatcacagtagtttttgtgttttgttttgttttgttttgttttgttttgtttttttcacaatctcagccagcctgtggtgtgacctggggagaaagttgagtgtcaggggacatgatgagccagttggccctgaaacaggaatggggcaaagagcaaggagagccaggagcatttaaaaatcagcatctgggccaggcaagatggctcacacctgtgatcccagcattttgggaggccgaggcgggtggatcatgaggtcaggagatcgagaccatcctggctaacacggtgaaaccccgtctctactgaaaatagaaaaaattagccaggcatggtggcaggtgcctgtagtcccagctactcgggaagctgaggcagaagaatggcatgaacctgggaggtggaggttgcagtgagccaagatcatgccactgcactccagcctgggcgacagagcgagactccatctc

SEQ ID NO: 61475 - DNA, 1308 bp, Homo sapiens
aaaaaagccaaacaaggggaaagaaaactgcaacttggccagttaaatcaaatagatacctaaaggtaggggccattgcaaagtatgtaatacagaactgaggaagggtctcagcagaaattcatactttaagggcataaattggcatttaaaaactcaaagattgttcaaataaaaatctgaatttgaaaaaaaacaagcagttttctttattgtaaacaaagcaggcagtcctttactcagcagggtatacactacttgctgcagaagtaatttggaaaaataagatttgggctgaaatctttttcacagcagggtaagctaagttagaaatggccaatgtatgcttttactctggtttggttaataggatcctagtgtaagtattcccaagtttacataagccaggtgactgtagattttccatgtagaaagaacccaagcatattcagtcatggcctctagcgggtagatgggcattgggccattgataacttacatttgatatggatacacattatttgactgagaaactcacaatgcacagactccactcactgaccagccccaccctggccaattctgctaagttcttcagaacagctgagtgacaaaggtcttttctggcgtgagaattgtttacagcaggaagctggagcccaaatctgccctctgtgttaccctctccgctctcctgtttctgtataggtatagctgagaatgctttttacatttttcagtggttggaaaaaaaagaaaaagtatattttgtaacacatgaaaattatatgaatatcaaattttagtgtccataaataaagttttatcagcatagagcaatacccatttgtttccgtattacctatagctgctttagtgctacaatggcagagttagtaattgatacagaggtcaggcatggtggctcacgcctgtaatcccagcactttgggaggccgaggcaggcagatcatctgaggtcaggagttaaagaccagcctggccaacatggcgaaaccccatctctactaaaaatataaaaagctagccaggcgtggtggcaggtgcctataatcccagctacttgggagactgaggcaggagaattgtttgaacccaggaggtgaaggttgcagtgagccaggatcacaccattgcactctagcctgggcgacaagagaaaaactctgtctcaaaaacaacaacaacaaataataataattgggacagagaccatatggtcataaagacaaacatttattctcttccttttcctgaaaatgtttgccaactccaggcttagagcaa

SEQ ID NO: 61476 - DNA, 689 bp, Homo sapiens
tagacctttccacagccgagtcaatttaaatccaccaaacccctttcccagaaggaggtgtaagacccatcagccaatgagaactgcaaacagtctggatagagccatcgctcttgccttgcaggtgcaagcccttagggtgttaagcatgtgctttcctgcatatgatctggctccaggttttaactttacagaatgaggctcgtgcatttcacaatgtttgcctcgagaagccaaatagggaaagtgaacattaaaaaaaattacctaacatctgttgctgaagtctagggagagggcattaaatcccttatgaaacacctgtttggccacatgaaaattgatgtgcttaatagaactcatatcagtctgcacatcttacattggcaattagagtaatgaatgagcctgggctgtggctgcaattgttgatctaattaagttggataaactaatttcagcaggaaggcagagggtaattcatccagagcaactataccactaaacttactgaaaaacccatatatgaagaaggaactggctgcctggtgtggtggcctgtgcctggcctgggtcagcacctgagacagagccccacctgggcttgtttccctctgtgttggaacagaggtgcatgcagcaggggagaaggtgcccaacaaggtgacgggagggcagacaggtccagg

SEQ ID NO: 61477 - DNA, 763 bp, Homo sapiens
atcacagctggatggaactttccagcagcacaggtcaatgttaaattcagcaaaacacctttcccaggaaggaggtgttaagaaccagtcaggggacagaatggatggcccaaggtatgaccctgccacaacacccagaattttcagccaatgagaactgcaaacagtctggatagagccatcgctcttgccttgcaggtgcaagcccttagggtgttaagcatgtgctttcctgcatatgatctggctccaggttttaactttacagaatgaggctcgtgcatttcacaatgtttgcctcgagaagccaaatagggaaagtgaacattaaaaaaaattacctaacatctgttgctgaagtctagggagagggcattaaatcccttatgaaacacctgtttggccacatgaaaattgatgtgcttaatagaactcatatcagtctgcacatcttacattggcaattagagtaatgaatgagcctgggctgtggctgcaattgttgatctaattaagttggataaactaatttcagcaggaaggcagagggtaattcatccagagcaactataccactaaacttactgaaaaacccatatatgaagaaggaactggctgcctggtgtggtggcctgtgcctggcctgggtcagcacctgagacagagccccacctgggcttgtttccctctgtgttggaacagaggtgcatgcagcaggggagaaggtgcccaacaaggtgacgggagggcagacaggtccagg

SEQ ID NO: 61478 - DNA, 292 bp, Homo sapiens
aatttgttcccacagcagagtgggcttcatttagggtaagaagcagtgctttcagtgctttgcagtttgcttagtgattaaactttcttatcttcacatcatcaactaagatgattttattaccaggtcagtcttctttttaaataggcaaaataatttattctctttttacaagggcatactatactaatttctttccacacttaaaagcatagggatgtaaaatctcagttaagagtttcacctaaggtcatttaacagtagaattctatgctgctctcaagtaagacta

SEQ ID NO: 61479 - DNA, 3375 bp, Homo sapiens
atacatggacacatgttttgcacacgcttgcacaggacacgcttgcacaggacacatgcacaggatgcatgttttgtacaggacacatgttttgcacatggaaacacatatccatgctttgcaaagggacacagggaagcatgcttacaatggatacatgtttacacacggacgcatgttttgcacaggacatatgcacaggatgcatgttttgcacacggacacacacgtttacataggacaagtgcacagggcacgttttgcaccggacgtattctgtgcacgggacgcacggtttgcagatgcaagcacacacactcctcggcgcgacgggcgaagcggggtgggcagcgacagcggagtccggacccagggacagcgctccgggaacctgccaaggcggcgggaactacaactcccggctcggtcgcctcgggacgacgcgcggcccagcgcagactggccccgcccagcggccccgcgcggcccggcccaggtcccggcgcccagagtcgccgcgcggccgccggtgagccgcatggagccccgggcggcggacggctgcttcctgggcgacgtgggtttctgggtggagcggacccctgtgcacgaggcagcccagcggggtgagagcctgcagctgcaacagctgatcgagagcggcgcctgcgtgaaccaggtcaccgtggactccatcacgcccctgcacgcagccagtctgcagggccaggcgcggtgtgtgcagctgctgctggcggctggggcccaggtggatgctcgcaacatcgacggcagcaccccgctctgcgatgcctgcgcctcgggcagcatcgagtgtgtgaagctcttgctgtcctacggggccaaggtcaaccctcccctgtacacagcgtcccccctgcacgaggcctgcatgagcgggagttccgaatgtgtgaggcttcttattgacgtcggggccaatctggaagcgcacgattgccattttgggacccctctgcacgttgcctgtgcccgggagcatctggactgtgtcaaagtgctgctcaatgcagcttgatgaatgtctgctcttatcgtgagaaagttgaggagtgcagagcttactctcttctctgaattgcctactgttttgggggccaacgtgaatgcggcaaagcttcatgagactgcccttcaccacgcggccaaggtcaagaatgttgacctcatcgagatgcttatcgagtttggcggcaacatctacgcccgggacaaccgcgggaagaagccgtctgactacacgtggagcagcagcgctcccgccaagtgcttcgagtactacgaaaagacacctctgactctgtcacagctctgcagggtgaacttgaggaaggccactggcgtccgagggctggagaagattgccaagttaaacatcccgccccggctcattgattacctctcctacaactgaattgcaggtggggtccggaccgtgactgcccccgttgtgcccagcattgcccgggtgagggctctgcctgttcctctgaagcagcgtgattgctgtagatagaacaacgctccttcgagtcccttcctgcgatcctgtttaggcttctctcctggatcctggataatgtttccagggtgttgggaaggcctgcgtctcaggtcacagttgtgggtgtggccctgcgctgttctacagaacctaccctctcaatgggcatgggcccaaccatccagttttcctcttttacggaccatcctcaaaggcactctcaggacagacggcgtggggagcacagaggaggctggcagagctggggactgagggcattgttgctgattctcactcaccggggcagcctgccgcagatgcacaggccccaggtgcaggccaccacctccgggtcggcaccaggactgccctcggtgctcatagggaatggctgggcccacggaaggtcggcctgggatgtggcctgggactgctgctctgctggctgctgtgtggatgcttttcctggagcactttccaaggcatcccccagccccaagcctgcgcgcatctgtcactcagggactttctatgggtctttgtgggggaaggccctggctttgtattccccacaagtagcactgagtttcttaggaaatttgtcttcagtattaggtctccaactcttgtaaaaagtttatatgtaggataaaaaccttttagaggacacgtaggcggtaccactaaggttttggtaatgagccattcaaaccgacagcagtgtgaaggtgtgtcaaggtgtatattctcgtggctcggcattctcagtgcaaaggcctgtttggagactctgtgggaattgtttttcatctgtttctatggttgtcaaatgaattcttcacccaccctacagtttgctaactccttgaagctatcaaattagtaagagaggctgcccgcacccagggggcaccatcgcccacttattatttagttttgcggatactcatggaccatctatcacatccagcattgtcccagtgctttgagttggacgggaatgggactctgcagccaaggcaggataagaaaatcttgcaatcccgtcctgcagtgatagaaacaggtcgttctgcattataagccataggtggagcattcggtagcgtattcagactgcatgggccggcctaggagtctttgccttcataaattttaagaaccccgcccacaacagggagttaaactggaggactttgcatgattagttcagggatgagtggtttctggggcatctgaggtcaggagttcgaaaccagcctggccaacttgatgaaaccccatctctacccgttctggagaacaggtcacgcctgtcctggagacagtgtgccgggaaaagggaacgtggtactcactggatgcacccaggccggcccgagcctcccaccgcagacagtgtggaacagagtgagcctgagctgcccaaggcgatgccctttgtgctgtatgactggaggcctctccgcgtgggtacttgggggtggggccacaaatctggcgaaaaacttcatgctggccgccgtgaggttttactccagcgttcccgccattgtcatggcgggtcttcgtcctaaactgagaagaaaagcattcctgtttgatcaccgccttagttaccagttctggatcagtcagtgtttctgcatggaataacaaccattaaaaaaagcactgggttctgccctttcatctttgtaagagattcttgcctctagcaatgacaacctgtgatgtctcacagtagagcacttagcgcagaatcaggtccccacggctgttgctcaataaaagtggcggaataaagtgcatccctgtgttcaaaaaac

SEQ ID NO: 61480 - DNA, 3056 bp, Homo sapiens
atacatggacacatgttttgcacacgcttgcacaggacacgcttgcacaggacacatgcacaggatgcatgttttgtacaggacacatgttttgcacatggaaacacatatccatgctttgcaaagggacacagggaagcatgcttacaatggatacatgtttacacacggacgcatgttttgcacaggacatatgcacaggatgcatgttttgcacacggacacacacgtttacataggacaagtgcacagggcacgttttgcaccggacgtattctgtgcacgggacgcacggtttgcagatgcaagcacacacactcctcggcgcgacgggcgaagcggggtttctgggtggagcggacccctgtgcacgaggcagcccagcggggtgagagcctgcagctgcaacagctgatcgagagcggcgcctgcgtgaaccaggtcaccgtggactccatcacgcccctgcacgcagccagtctgcagggccaggcgcggtgtgtgcagctgctgctggcggctggggcccaggtggatgctcgcaacatcgacggcagcaccccgctctgcgatgcctgcgcctcgggcagcatcgagtgtgtgaagctcttgctgtcctacggggccaaggtcaaccctcccctgtacacagcgtcccccctgcacgaggcctgcatgagcgggagttccgaatgtgtgaggcttcttattgacgtcggggccaatctggaagcgcacgattgccattttgggacccctctgcacgttgcctgtgcccgggagcatctggactgtgtcaaagtgctgctcaatgcaggggccaacgtgaatgcggcaaagcttcatgagactgcccttcaccacgcggccaaggtcaagaatgttgacctcatcgagatgcttatcgagtttggcggcaacatctacgcccgggacaaccgcgggaagaagccgtctgactacacgtggagcagcagcgctcccgccaagtgcttcgagtactacgaaaagacacctctgactctgtcacagctctgcagggtgaacttgaggaaggccactggcgtccgagggctggagaagattgccaagttaaacatcccgccccggctcattgattacctctcctacaactgaattgcaggtggggtccggaccgtgactgcccccgttgtgcccagcattgcccgggtgagggctctgcctgttcctctgaagcagcgtgattgctgtagatagaacaacgctccttcgagtcccttcctgcgatcctgtttaggcttctctcctggatcctggataatgtttccagggtgttgggaaggcctgcgtctcaggtcacagttgtgggtgtggccctgcgctgttctacagaacctaccctctcaatgggcatgggcccaaccatccagttttcctcttttacggaccatcctcaaaggcactctcaggacagacggcgtggggagcacagaggaggctggcagagctggggactgagggcattgttgctgattctcactcaccggggcagcctgccgcagatgcacaggccccaggtgcaggccaccacctccgggtcggcaccaggactgccctcggtgctcatagggaatggctgggcccacggaaggtcggcctgggatgtggcctgggactgctgctctgctggctgctgtgtggatgcttttcctggagcactttccaaggcatcccccagccccaagcctgcgcgcatctgtcactcagggactttctatgggtctttgtgggggaaggccctggctttgtattccccacaagtagcactgagtttcttaggaaatttgtcttcagtattaggtctccaactcttgtaaaaagtttatatgtaggataaaaaccttttagaggacacgtaggcggtaccactaaggttttggtaatgagccattcaaaccgacagcagtgtgaaggtgtgtcaaggtgtatattctcgtggctcggcattctcagtgcaaaggcctgtttggagactctgtgggaattgtttttcatctgtttctatggttgtcaaatgaattcttcacccaccctacagtttgctaactccttgaagctatcaaattagtaagagaggctgcccgcacccagggggcaccatcgcccacttattatttagttttgcggatactcatggaccatctatcacatccagcattgtcccagtgctttgagttggacgggaatgggactctgcagccaaggcaggataagaaaatcttgcaatcccgtcctgcagtgatagaaacaggtcgttctgcattataagccataggtggagcattcggtagcgtattcagactgcatgggccggcctaggagtctttgccttcataaattttaagaaccccgcccacaacagggagttaaactggaggactttgcatgattagttcagggatgagtggtttctggggcatctgaggtcaggagttcgaaaccagcctggccaacttgatgaaaccccatctctacccgttctggagaacaggtcacgcctgtcctggagacagtgtgccgggaaaagggaacgtggtactcactggatgcacccaggccggcccgagcctcccaccgcagacagtgtggaacagagtgagcctgagctgcccaaggcgatgccctttgtgctgtatgactggaggcctctccgcgtgggtacttgggggtggggccacaaatctggcgaaaaacttcatgctggccgccgtgaggttttactccagcgttcccgccattgtcatggcgggtcttcgtcctaaactgagaagaaaagcattcctgtttgatcaccgccttagttaccagttctggatcagtcagtgtttctgcatggaataacaaccattaaaaaaagcactgggttctgccctttcatctttgtaagagattcttgcctctagcaatgacaacctgtgatgtctcacagtagagcacttagcgcagaatcaggtccccacggctgttgctcaataaaagtggcggaataaagtgcatccctgtgttcaaaaaac

SEQ ID NO: 61481 - DNA, 2324 bp, Homo sapiens
ggggcagctgtgaggcccactgtcgccctaaagtggggttcccacagctctccccgggagtttgcatgcccctggggagttagaggggccaacgtgaatgcggcaaagcttcatgagactgcccttcaccacgcggccaaggtcaagaatgttgacctcatcgagatgcttatcgagtttggcggcaacatctacgcccgggacaaccgcgggaagaagccgtctgactacacgtggagcagcagcgctcccgccaagtgcttcgagtactacgaaaagacacctctgactctgtcacagctctgcagggtgaacttgaggaaggccactggcgtccgagggctggagaagattgccaagttaaacatcccgccccggctcattgattacctctcctacaactgaattgcaggtggggtccggaccgtgactgcccccgttgtgcccagcattgcccgggtgagggctctgcctgttcctctgaagcagcgtgattgctgtagatagaacaacgctccttcgagtcccttcctgcgatcctgtttaggcttctctcctggatcctggataatgtttccagggtgttgggaaggcctgcgtctcaggtcacagttgtgggtgtggccctgcgctgttctacagaacctaccctctcaatgggcatgggcccaaccatccagttttcctcttttacggaccatcctcaaaggcactctcaggacagacggcgtggggagcacagaggaggctggcagagctggggactgagggcattgttgctgattctcactcaccggggcagcctgccgcagatgcacaggccccaggtgcaggccaccacctccgggtcggcaccaggactgccctcggtgctcatagggaatggctgggcccacggaaggtcggcctgggatgtggcctgggactgctgctctgctggctgctgtgtggatgcttttcctggagcactttccaaggcatcccccagccccaagcctgcgcgcatctgtcactcagggactttctatgggtctttgtgggggaaggccctggctttgtattccccacaagtagcactgagtttcttaggaaatttgtcttcagtattaggtctccaactcttgtaaaaagtttatatgtaggataaaaaccttttagaggacacgtaggcggtaccactaaggttttggtaatgagccattcaaaccgacagcagtgtgaaggtgtgtcaaggtgtatattctcgtggctcggcattctcagtgcaaaggcctgtttggagactctgtgggaattgtttttcatctgtttctatggttgtcaaatgaattcttcacccaccctacagtttgctaactccttgaagctatcaaattagtaagagaggctgcccgcacccagggggcaccatcgcccacttattatttagttttgcggatactcatggaccatctatcacatccagcattgtcccagtgctttgagttggacgggaatgggactctgcagccaaggcaggataagaaaatcttgcaatcccgtcctgcagtgatagaaacaggtcgttctgcattataagccataggtggagcattcggtagcgtattcagactgcatgggccggcctaggagtctttgccttcataaattttaagaaccccgcccacaacagggagttaaactggaggactttgcatgattagttcagggatgagtggtttctggggcatctgaggtcaggagttcgaaaccagcctggccaacttgatgaaaccccatctctacccgttctggagaacaggtcacgcctgtcctggagacagtgtgccgggaaaagggaacgtggtactcactggatgcacccaggccggcccgagcctcccaccgcagacagtgtggaacagagtgagcctgagctgcccaaggcgatgccctttgtgctgtatgactggaggcctctccgcgtgggtacttgggggtggggccacaaatctggcgaaaaacttcatgctggccgccgtgaggttttactccagcgttcccgccattgtcatggcgggtcttcgtcctaaactgagaagaaaagcattcctgtttgatcaccgccttagttaccagttctggatcagtcagtgtttctgcatggaataacaaccattaaaaaaagcactgggttctgccctttcatctttgtaagagattcttgcctctagcaatgacaacctgtgatgtctcacagtagagcacttagcgcagaatcaggtccccacggctgttgctcaataaaagtggcggaataaagtgcatccctgtgttcaaaaaac

SEQ ID NO: 61482 - DNA, 2182 bp, Homo sapiens
  misc_feature (1909)..(1909): n is a, c, g, or t
  misc_feature (1911)..(1911): n is a, c, g, or t
  misc_feature (1920)..(1920): n is a, c, g, or t
  misc_feature (1948)..(1948): n is a, c, g, or t
  misc_feature (1953)..(1955): n is a, c, g, or t
  misc_feature (1957)..(1957): n is a, c, g, or t
  misc_feature (1993)..(1993): n is a, c, g, or t
  misc_feature (2008)..(2008): n is a, c, g, or t
  misc_feature (2017)..(2018): n is a, c, g, or t
  misc_feature (2033)..(2033): n is a, c, g, or t
  misc_feature (2035)..(2036): n is a, c, g, or t
  misc_feature (2040)..(2042): n is a, c, g, or t
  misc_feature (2062)..(2062): n is a, c, g, or t
  misc_feature (2070)..(2070): n is a, c, g, or t
  misc_feature (2075)..(2075): n is a, c, g, or t
  misc_feature (2085)..(2086): n is a, c, g, or t
  misc_feature (2094)..(2095): n is a, c, g, or t
  misc_feature (2099)..(2099): n is a, c, g, or t
  misc_feature (2104)..(2105): n is a, c, g, or t
  misc_feature (2110)..(2110): n is a, c, g, or t
  misc_feature (2114)..(2114): n is a, c, g, or t
  misc_feature (2120)..(2120): n is a, c, g, or t
  misc_feature (2134)..(2134): n is a, c, g, or t
  misc_feature (2141)..(2141): n is a, c, g, or t
  misc_feature (2146)..(2146): n is a, c, g, or t
  misc_feature (2151)..(2151): n is a, c, g, or t
  misc_feature (2156)..(2156): n is a, c, g, or t
  misc_feature (2165)..(2165): n is a, c, g, or t
  misc_feature (2169)..(2169): n is a, c, g, or t
  misc_feature (2173)..(2175): n is a, c, g, or t
  misc_feature (2177)..(2177): n is a, c, g, or t
  misc_feature (2179)..(2179): n is a, c, g, or t
  misc_feature (2182)..(2182): n is a, c, g, or t
atacatggacacatgttttgcacacgcttgcacaggacacgcttgcacaggacacatgcacaggatgcatgttttgtacaggacacatgttttgcacatggaaacacatatccatgctttgcaaagggacacagggaagcatgcttacaatggatacatgtttacacacggacgcatgttttgcacaggacatatgcacaggatgcatgttttgcacacggacacacacgtttacataggacaagtgcacagggcacgttttgcaccggacgtattctgtgcacgggacgcacggtttgcagatgcaagcacacacactcctcggcgcgacgggcgaagcggggtgggcagcgacagcggagtccggacccagggacagcgctccgggaacctgccaaggcggcgggaactacaactcccggctcggtcgcctcgggacgacgcgcggcccagcgcagactggccccgcccagcggccccgcgcggcccggcccaggtcccggcgcccagagtcgccgcgcggccgccggtgagccgcatggagccccgggcggcggacggctgcttcctgggcgacgtgggtttctgggtggagcggacccctgtgcacgaggcagcccagcggggtgagagcctgcagctgcaacagctgatcgagagcggcgcctgcgtgaaccaggtcaccgtggactccatcacgcccctgcacgcagccagtctgcagggccaggcgcggtgtgtgcagctgctgctggcggctggggcccaggtggatgctcgcaacatcgacggcagcaccccgctctgcgatgcctgcgcctcgggcagcatcgagtgtgtgaagctcttgctgtcctacggggccaaggtcaaccctcccctgtacacagcgtcccccctgcacgaggcctgcatgagcgagctttccccgcctcctgagcaccctggcttcgacgccctggatcaactgagccaggtggaactcctgggggacatggatcgcaatgaattcgaccagtatttgaacactcctggccacccagactccgccacaggggccatggccctcagtgggcatgttccggtctcccaggtgacaccaacgggtcccacagagaccagcctcatctccgtcctggctgatgccacggccacgtactacaacagctacagtgtgtcatagagctggaggcgccccgtccggtcagccctcgcgccctctccttcttgtgccttgagtggcagaggagccgtccagccacaccagctttcctcccaccgctcagggcagggaggtctgaactgcggccccagagcctttggcctaagctggactctccttatccgagtgccgcctctatccccttccccacgttccagcccctgcagcccacattttaagtatattccttcaagtgagttttcctccagcccctgagagttgctgtctcccagtggaatgttcactgacgtcttttcttggtagccatcatcgaaactaatggggggacagacttgatagccaaggtcccttctggtccagttttctgatttagggttctctcaagattaataaaggaagatggggaaatttgactcattaatgagctcgctaacctacgatctggtgataattttgtgtgcacagcccaaggaccacgaggctttctgcactttctgcacccccttccaaagtgaccacaaaatttcaaagggactcatacaatttgagaaaaaacagtcaacctgatttgagaaattaaccagtatggctaactatatcacagaaaatgggattgagttaaaactattttattttaaatatacattttaaagcagttcttttttttttgttaatttgtttattatacacacacttcaagagaatatgcacagtctaggccgggcncngtggctcangcctgtaatcccagcactttgggaggcngaggnnngnggatcacctgaggtcaggagtttgagaccagcctgncacatggtgaaaccntgtctctannaaaaatacaaaattngnngggnnnggtggtgcatgcctgtaatnccagctanttggnaggctgaggnnggagaatnncttnaaccnnggagntggnggttgnagtgagctgagatngcaccantgcantccancctgngcaacagantganactnnntntnaan

SEQ ID NO: 61483 - DNA, 1017 bp, Homo sapiens
atacatggacacatgttttgcacacgcttgcacaggacacgcttgcacaggacacatgcacaggatgcatgttttgtacaggacacatgttttgcacatggaaacacatatccatgctttgcaaagggacacagggaagcatgcttacaatggatacatgtttacacacggacgcatgttttgcacaggacatatgcacaggatgcatgttttgcacacggacacacacgtttacataggacaagtgcacagggcacgttttgcaccggacgtattctgtgcacgggacgcacggtttgcagatgcaagcacacacactcctcggcgcgacgggcgaagcggggtgggcagcgacagcggagtccggacccagggacagcgctccgggaacctgccaaggcggcgggaactacaactcccggctcggtcgcctcgggacgacgcgcggcccagcgcagactggccccgcccagcggccccgcgcggcccggcccaggtcccggcgcccagagtcgccgcgcggccgccggtgagccgcatggagccccgggcggcggacggctgcttcctgggcgacgtgggtacgtgcgggcgccgcggaggtcagagcgaggcagcggcgccggctcctgaggccggccgcgtatccgatggcctgcgccggggaggtggtggcgcgccccgcgctggctccgtgggcgggggcgtttggcggggtgggccgcggtgaaagcagggtcccagtggtgccgcgcatcccagacgggctctcatgtctggtgccttgtcccaggccagcgcactgcggggttgcagtccgtgcggctcgccaggtgtggggtttcgcaaccgcaaacccaccgagcgccgcgcgccctggggaaggtgcgggacgcgtgcggggccgttgcccagtggcgggggagagcctgggaaacgcccacggtgctccctctcggggaagccaggcgcgagcccacggtaagagctaaacccccctccactggcgcgggtgag

SEQ ID NO: 61484 - DNA, 666 bp, Homo sapiens
aaacaaactcccaaagcccacaaaaggcaatcccagtggacatcatgccccgaacttcatttcctgggctcccttcctcgggttcctggctgtccttccagagaaggcctacaggacacatcccggttccaggggaaagggaggcgtttccgattccctctgagtttgtgttccattgcaggtgttgtgcttcttcctgaaattaacctcacatccttccttgctccctttttcagagacacctctgactctgtcacagctctgcagggtgaacttgaggaaggccactggcgtccgagggctggagaagattgccaagttaaacatcccgccccggctcattgattacctctcctacaactgaattgcaggtggggtccggaccgtgactgcccccgttgtgcccagcattgcccgggtgagggctctgcctgttcctctgaagcagcgtgattgctgtagatagaacaacgctccttcgagtcccttcctgcgatcctgtttaggcttctctcctggatcctggataatgtttccagggtgttgggaaggcctgcgtctcaggtcacagttgtgggtgtggccctgcgctgttctacagaacctaccctctcaatgggcatgggcccaaccatccagttttcctcttttacggaccatcctcaa

SEQ ID NO: 61485 - DNA, 3294 bp, Homo sapiens
atacatggacacatgttttgcacacgcttgcacaggacacgcttgcacaggacacatgcacaggatgcatgttttgtacaggacacatgttttgcacatggaaacacatatccatgctttgcaaagggacacagggaagcatgcttacaatggatacatgtttacacacggacgcatgttttgcacaggacatatgcacaggatgcatgttttgcacacggacacacacgtttacataggacaagtgcacagggcacgttttgcaccggacgtattctgtgcacgggacgcacggtttgcagatgcaagcacacacactcctcggcgcgacgggcgaagcggggtgggcagcgacagcggagtccggacccagggacagcgctccgggaacctgccaaggcggcgggaactacaactcccggctcggtcgcctcgggacgacgcgcggcccagcgcagactggccccgcccagcggccccgcgcggcccggcccaggtcccggcgcccagagtcgccgcgcggccgccggtgagccgcatggagccccgggcggcggacggctgcttcctgggcgacgtgggtttctgggtggagcggacccctgtgcacgaggcagcccagcggggtgagagcctgcagctgcaacagctgatcgagagcggcgcctgcgtgaaccaggtcaccgtggactccatcacgcccctgcacgcagccagtctgcagggccaggcgcggtgtgtgcagctgctgctggcggctggggcccaggtggatgctcgcaacatcgacggcagcaccccgctctgcgatgcctgcgcctcgggcagcatcgagtgtgtgaagctcttgctgtcctacggggccaaggtcaaccctcccctgtacacagcgtcccccctgcacgaggcctgcatgagcgggagttccgaatgtgtgaggcttcttattgacgtcggggccaatctggaagcgcacgattgccattttgggacccctctgcacgttgcctgtgcccgggagcatctggactgtgtcaaagtgctgctcaatgcaggggccaacgtgaatgcggcaaagcttcatgagactgcccttcaccacgcggccaaggtcaagaatgttgacctcatcgagatgcttatcgagtttggcggcaacatctacgcccgggacaaccgcgggaagaagccgtctgactacacgtggagcagcagcgctcccgccaagtgcttcgagtactacgaaaagacacctctgactctgtcacagctctgcagggtgaacttgaggaaggccactggcgtccgagggctggagaagattgccaagttaaacatcccgccccggctcattgattacctctcctacaactgaattgcaggtggggtccggaccgtgactgcccccgttgtgcccagcattgcccgggtgagggctctgcctgttcctctgaagcagcgtgattgctgtagatagaacaacgctccttcgagtcccttcctgcgatcctgtttaggcttctctcctggatcctggataatgtttccagggtgttgggaaggcctgcgtctcaggtcacagttgtgggtgtggccctgcgctgttctacagaacctaccctctcaatgggcatgggcccaaccatccagttttcctcttttacggaccatcctcaaaggcactctcaggacagacggcgtggggagcacagaggaggctggcagagctggggactgagggcattgttgctgattctcactcaccggggcagcctgccgcagatgcacaggccccaggtgcaggccaccacctccgggtcggcaccaggactgccctcggtgctcatagggaatggctgggcccacggaaggtcggcctgggatgtggcctgggactgctgctctgctggctgctgtgtggatgcttttcctggagcactttccaaggcatcccccagccccaagcctgcgcgcatctgtcactcagggactttctatgggtctttgtgggggaaggccctggctttgtattccccacaagtagcactgagtttcttaggaaatttgtcttcagtattaggtctccaactcttgtaaaaagtttatatgtaggataaaaaccttttagaggacacgtaggcggtaccactaaggttttggtaatgagccattcaaaccgacagcagtgtgaaggtgtgtcaaggtgtatattctcgtggctcggcattctcagtgcaaaggcctgtttggagactctgtgggaattgtttttcatctgtttctatggttgtcaaatgaattcttcacccaccctacagtttgctaactccttgaagctatcaaattagtaagagaggctgcccgcacccagggggcaccatcgcccacttattatttagttttgcggatactcatggaccatctatcacatccagcattgtcccagtgctttgagttggacgggaatgggactctgcagccaaggcaggataagaaaatcttgcaatcccgtcctgcagtgatagaaacaggtcgttctgcattataagccataggtggagcattcggtagcgtattcagactgcatgggccggcctaggagtctttgccttcataaattttaagaaccccgcccacaacagggagttaaactggaggactttgcatgattagttcagggatgagtggtttctggggcatctgaggtcaggagttcgaaaccagcctggccaacttgatgaaaccccatctctacccgttctggagaacaggtcacgcctgtcctggagacagtgtgccgggaaaagggaacgtggtactcactggatgcacccaggccggcccgagcctcccaccgcagacagtgtggaacagagtgagcctgagctgcccaaggcgatgccctttgtgctgtatgactggaggcctctccgcgtgggtacttgggggtggggccacaaatctggcgaaaaacttcatgctggccgccgtgaggttttactccagcgttcccgccattgtcatggcgggtcttcgtcctaaactgagaagaaaagcattcctgtttgatcaccgccttagttaccagttctggatcagtcagtgtttctgcatggaataacaaccattaaaaaaagcactgggttctgccctttcatctttgtaagagattcttgcctctagcaatgacaacctgtgatgtctcacagtagagcacttagcgcagaatcaggtccccacggctgttgctcaataaaagtggcggaataaagtgcatccctgtgttcaaaaaac

SEQ ID NO: 61486 - DNA, 3143 bp, Homo sapiens
atacatggacacatgttttgcacacgcttgcacaggacacgcttgcacaggacacatgcacaggatgcatgttttgtacaggacacatgttttgcacatggaaacacatatccatgctttgcaaagggacacagggaagcatgcttacaatggatacatgtttacacacggacgcatgttttgcacaggacatatgcacaggatgcatgttttgcacacggacacacacgtttacataggacaagtgcacagggcacgttttgcaccggacgtattctgtgcacgggacgcacggtttgcagatgcaagcacacacactcctcggcgcgacgggcgaagcggggtgggcagcgacagcggagtccggacccagggacagcgctccgggaacctgccaaggcggcgggaactacaactcccggctcggtcgcctcgggacgacgcgcggcccagcgcagactggccccgcccagcggccccgcgcggcccggcccaggtcccggcgcccagagtcgccgcgcggccgccggtgagccgcatggagccccgggcggcggacggctgcttcctgggcgacgtgggtttctgggtggagcggacccctgtgcacgaggcagcccagcggggtgagagcctgcagctgcaacagctgatcgagagcggcgcctgcgtgaaccaggtcaccgtggactccatcacgcccctgcacgcagccagtctgcagggccaggcgcggtgtgtgcagctgctgctggcggctggggcccagggagttccgaatgtgtgaggcttcttattgacgtcggggccaatctggaagcgcacgattgccattttgggacccctctgcacgttgcctgtgcccgggagcatctggactgtgtcaaagtgctgctcaatgcaggggccaacgtgaatgcggcaaagcttcatgagactgcccttcaccacgcggccaaggtcaagaatgttgacctcatcgagatgcttatcgagtttggcggcaacatctacgcccgggacaaccgcgggaagaagccgtctgactacacgtggagcagcagcgctcccgccaagtgcttcgagtactacgaaaagacacctctgactctgtcacagctctgcagggtgaacttgaggaaggccactggcgtccgagggctggagaagattgccaagttaaacatcccgccccggctcattgattacctctcctacaactgaattgcaggtggggtccggaccgtgactgcccccgttgtgcccagcattgcccgggtgagggctctgcctgttcctctgaagcagcgtgattgctgtagatagaacaacgctccttcgagtcccttcctgcgatcctgtttaggcttctctcctggatcctggataatgtttccagggtgttgggaaggcctgcgtctcaggtcacagttgtgggtgtggccctgcgctgttctacagaacctaccctctcaatgggcatgggcccaaccatccagttttcctcttttacggaccatcctcaaaggcactctcaggacagacggcgtggggagcacagaggaggctggcagagctggggactgagggcattgttgctgattctcactcaccggggcagcctgccgcagatgcacaggccccaggtgcaggccaccacctccgggtcggcaccaggactgccctcggtgctcatagggaatggctgggcccacggaaggtcggcctgggatgtggcctgggactgctgctctgctggctgctgtgtggatgcttttcctggagcactttccaaggcatcccccagccccaagcctgcgcgcatctgtcactcagggactttctatgggtctttgtgggggaaggccctggctttgtattccccacaagtagcactgagtttcttaggaaatttgtcttcagtattaggtctccaactcttgtaaaaagtttatatgtaggataaaaaccttttagaggacacgtaggcggtaccactaaggttttggtaatgagccattcaaaccgacagcagtgtgaaggtgtgtcaaggtgtatattctcgtggctcggcattctcagtgcaaaggcctgtttggagactctgtgggaattgtttttcatctgtttctatggttgtcaaatgaattcttcacccaccctacagtttgctaactccttgaagctatcaaattagtaagagaggctgcccgcacccagggggcaccatcgcccacttattatttagttttgcggatactcatggaccatctatcacatccagcattgtcccagtgctttgagttggacgggaatgggactctgcagccaaggcaggataagaaaatcttgcaatcccgtcctgcagtgatagaaacaggtcgttctgcattataagccataggtggagcattcggtagcgtattcagactgcatgggccggcctaggagtctttgccttcataaattttaagaaccccgcccacaacagggagttaaactggaggactttgcatgattagttcagggatgagtggtttctggggcatctgaggtcaggagttcgaaaccagcctggccaacttgatgaaaccccatctctacccgttctggagaacaggtcacgcctgtcctggagacagtgtgccgggaaaagggaacgtggtactcactggatgcacccaggccggcccgagcctcccaccgcagacagtgtggaacagagtgagcctgagctgcccaaggcgatgccctttgtgctgtatgactggaggcctctccgcgtgggtacttgggggtggggccacaaatctggcgaaaaacttcatgctggccgccgtgaggttttactccagcgttcccgccattgtcatggcgggtcttcgtcctaaactgagaagaaaagcattcctgtttgatcaccgccttagttaccagttctggatcagtcagtgtttctgcatggaataacaaccattaaaaaaagcactgggttctgccctttcatctttgtaagagattcttgcctctagcaatgacaacctgtgatgtctcacagtagagcacttagcgcagaatcaggtccccacggctgttgctcaataaaagtggcggaataaagtgcatccctgtgttcaaaaaac

SEQ ID NO: 61487 - DNA, 2665 bp, Homo sapiens
  misc_feature (2507)..(2507): n is a, c, g, or t
  misc_feature (2511)..(2512): n is a, c, g, or t
  misc_feature (2519)..(2519): n is a, c, g, or t
atacatggacacatgttttgcacacgcttgcacaggacacgcttgcacaggacacatgcacaggatgcatgttttgtacaggacacatgttttgcacatggaaacacatatccatgctttgcaaagggacacagggaagcatgcttacaatggatacatgtttacacacggacgcatgttttgcacaggacatatgcacaggatgcatgttttgcacacggacacacacgtttacataggacaagtgcacagggcacgttttgcaccggacgtattctgtgcacgggacgcacggtttgcagatgcaagcacacacactcctcggcgcgacgggcgaagcggggtgggcagcgacagcggagtccggacccagggacagcgctccgggaacctgccaaggcggcgggaactacaactcccggctcggtcgcctcgggacgacgcgcggcccagcgcagactggccccgcccagcggccccgcgcggcccggcccaggtcccggcgcccagagtcgccgcgcggccgccggtgagccgcatggagccccgggcggcggacggctgcttcctgggcgacgtgggtttctgggtggagcggacccctgtgcacgaggcagcccagcggggtgagagcctgcagctgcaacagctgatcgagagcggcgcctgcgtgaaccaggtcaccgtggactccatcacgcccctgcacgcagccagtctgcagggccaggcgcggtgtgtgcagctgctgctggcggctggggcccaggtggatgctcgcaacatcgacggcagcaccccgctctgcgatgcctgcgcctcgggcagcatcgagtgtgtgaagctcttgctgtcctacggggccaaggtcaaccctcccctgtacacagcgtcccccctgcacgaggcctgcatgagcgggagttccgaatgtgtgaggcttcttattgacgtcggggccaatctggaagcgcacgattgccattttgggacccctctgcacgttgcctgtgcccgggagcatctggactgtgtcaaagtgctgctcaatgcaggggccaacgtgaatgcggcaaagcttcatgagactgcccttcaccacgcggccaaggtcaagaatgttgacctcatcgagatgcttatcgagtttggcggcaacatctacgcccgggacaaccgcgggaagaagccgtctgactacacgtggagcagcagcgctcccgccaagtgcttcgagtactacgaaaagacacctctgactctgtcacagctctgcagggtgaacttgaggaaggccactggcgtccgagggctggagaagattgccaagttaaacatcccgccccggctcattgattacctctcctacaactgaattgcaggtggggtccggaccgtgactgcccccgttgtgcccagcattgcccgggtgagggctctgcctgttcctctgaagcagcgtgattgctgtagatagaacaacgctccttcgagtcccttcctgcgatcctgtttaggcttctctcctggatcctggataatgtttccagggtgttgggaaggcctgcgtctcaggtcacagttgtgggtgtggccctgcgctgttctacagaacctaccctctcaatgggcatgggcccaaccatccagttttcctcttttacggaccatcctcaaaggcactctcaggacagacggcgtggggagcacagaggaggctggcagagctggggactgagggcattgttgctgattctcactcaccggggcagcctgccgcagatgcacaggccccaggtgcaggccaccacctccgggtcggcaccaggactgccctcggtgctcatagggaatggctgggcccacggaaggtcggcctgggatgtggcctgggactgctgctctgctggctgctgtgtggatgcttttcctggagcactttccaaggcatcccccagccccaagcctgcgcgcatctgtcactcagggactttctatgggtctttgtgggggaaggccctggctttgtattccccacaagtagcactgagtttcttaggaaatttgtcttcagtattaggtctccaactcttgtaaaaagtttatatgtaggataaaaaccttttagaggacacgtaggcggtaccactaaggttttggtaatgagccattcaaaccgacagcagtgtgaaggtgtgtcaaggtgtatattctcgtggctcggcattctcagtgcaaaggcctgtttggagactctgtgggaattgtttttcatctgtttctatggttgtcaaatgaattcttcacccaccctacagtttgctaactccttgaagctatcaaattagtaagagaggctgcccgcacccagggggcaccatcgcccacttattatttagttttgcggatactcatggaccatctatcacatccagcattgtcccagtgctttgagttggacgggaatgggactctgcagccaaggcaggataagaaaatcttgcganccgnngggggtnaacacgcggctggttttagccaagtgggcatcggggcgaatctagatggtgggcgcaaggatttgggcaaattaaaacccgccacaggggaacgggggtgggaaacgcgagttgggcatgcacacacaccgaaaaccaacggaaaa

SEQ ID NO: 61488 - DNA, 2235 bp, Homo sapiens
atacatggacacatgttttgcacacgcttgcacaggacacgcttgcacaggacacatgcacaggatgcatgttttgtacaggacacatgttttgcacatggaaacacatatccatgctttgcaaagggacacagggaagcatgcttacaatggatacatgtttacacacggacgcatgttttgcacaggacatatgcacaggatgcatgttttgcacacggacacacacgtttacataggacaagtgcacagggcacgttttgcaccggacgtattctgtgcacgggacgcacggtttgcagatgcaagcacacacactcctcggcgcgacgggcgaagcggggtgggcagcgacagcggagtccggacccagggacagcgctccgggaacctgccaaggcggcgggaactacaactcccggctcggtcgcctcgggacgacgcgcggcccagcgcagactggccccgcccagcggccccgcgcggcccggcccaggtcccggcgcccagagtcgccgcgcggccgccggtgagccgcatggagccccgggcggcggacggctgcttcctgggcgacgtgggtttctgggtggagcggacccctgtgcacgaggcagcccagcggggtgagagcctgcagctgcaacagctgatcgagagcggcgcctgcgtgaaccaggtcaccgtggactccatcacgcccctgcacgcagccagtctgcagggccaggcgcggtgtgtgcagctgctgctggcggctggggcccaggtggatgctcgcaacatcgacggcagcaccccgctctgcgatgcctgcgcctcgggcagcatcgagtgtgtgaagctcttgctgtcctacggggccaaggtcaaccctcccctgtacacagcgtcccccctgcacgaggcctgcatgagcgggagttccgaatgtgtgaggcttcttattgacgtcggggccaatctggaagcgcacgattgccattttgggacccctctgcacgttgcctgtgcccgggagcatctggactgtgtcaaagtgctgctcaatgcaggggccaacgtgaatgcggcaaagcttcatgagactgcccttcaccacgcggccaaggtcaagaatgttgacctcatcgagatgcttatcgagtttggcggcaacatctacgcccgggacaaccgcgggaagaagccgtctgactacacgtggagcagcagcgctcccgccaagtgcttcgagtactacgaaaagacacctctgactctgtcacagctctgcagggtgaacttgaggaaggccactggcgtccgagggctggagaagattgccaagttaaacatcccgccccggctcattgattacctctcctacaactgaattgcaggtggggtccggaccgtgactgcccccgttgtgcccagcattgcccgggtgagggctctgcctgttcctctgaagcagcgtgattgctgtagatagaacaacgctccttcgagtcccttcctgcgatcctgtttaggcttctctcctggatcctggataatgtttccagggtgttgggaaggcctgcgtctcaggtcacagttgtgggtgtggccctgcgctgttctacagaacctaccctctcaatgggcatgggcccaaccatccagttttcctcttttacggaccatcctcaaaggcacttcttttcttatggggcagaaacaccaagatgggcgcatcctgtgtggatggagaggggtggctctcgtcttgctgtgtcccaggtcgtttggcagcgctgtgcttgccagggagccacactttcccatctcttccccaggtctcctgatgccaacttcagcaccccccttatgtggacttttcttgggggagacagacgctgtccacgggaccaggtgactgggattttgggtcctcccctgcccttatgcagggctgtgactgcacacaggtttatctgcttctctactctgagttgttccggaaagctgcaaaaccgagataatggatcagacttggagcattgaaggggtcttgatgaccaaccactgagccaagcccgtcacctcaggtggacgagattgggtccccagcgtcaggttttgtgttttttttttttttttttgaggtggagttgcactccagcctgggagacagagtgagactctgtccccacaaaaaagaaaaaaaaaagatgccttgaaaagcctaaagtggtccccaaatatgaa

SEQ ID NO: 61489 - DNA, 806 bp, Homo sapiens
agcatggagctccctaagcacaaggaggcggtgacgtgtcttgcagagaaaatgcatgtgtgagatgagcttggttcaggccgcagtgacagtgctggcggccgtgggtttcgtgttaatgaatcaatcatacgtagtcaataaggtgtctgtgaacagagcacgcggagaacaaggttatgcactgatgggtggatgacaacgtcagggccagaggctcccaggaccctgagccggcgtgtcccctaggagcagtggttccatatccgctaattcagcacgtgcagtaaatgtatagaatatgacttcaccagtatcgagactgactgatttctcacgttcccgtggcctcctgttagaactgcatggtgatggccgaccagaaccaggtgtgggttggctcggaagactccgtcatctacatcatcaacgtccacagcatgtcctgcaacaagcagctcacagcccactgctccagtgtcacggatttgattgtgcaggacggacaggaggcacccagcaacgtgtactcgtgcagcatggacggcatggtgctggtgtggaatgtgagcacactgcaggtgaccagccgcttccagctgccgcgaggtggcctgacgtccatcagactgcacggcggccgcctgtggtgctttttttgaggtaaaattttgcaattactctttcatttataaattaaactgttaagacaacaataaattatagatacactttctactagcctttaaaactattgtttttagatttgggattactttaatctatagtgattctagatcgcgagc

SEQ ID NO: 61490 - DNA, 722 bp, Homo sapiens
tttttccaggtgtttgttcttttattccttaccgaggtaaaacacacgtacagacaaacgcacaaattccagtgatttcccacaaattgaacacacacatgtaactagcacccagatgaggaaacagagcatgaccaggacttccccttccaaaatatacctccctttgtgccacctgtcaggcactaccgcagacctggggccactctgctgtcacccagcagcttggtgactttgcttttggtgaaaggtcccgtgcgtgtgtctgaatgagtgactcagtctgtatcgggcttgactcagtgcagctctcccataccaagtctaattagctactggctctaagttggtataatgcttgtgatctgttttagggaatgtcatacatgagtgtttattgttttgaataaatccaagaggtcagtgtaggccaaggttctcatctgatgcaggagccaacccagccatattttctagaacccactgcaagcttagaggctgttttcgagagcagtagtgagatgggtcttgtgttttgaatgcgtgtgtgtgcgttcctcattacttctggtccgggttatctctgatctatgctggtggaaaggagggaggagggagggggccccatggcacagggggtagaggacagagccatgccctgtgccttgattccctggttcccgttcagcccccttcctctgatggtgcatggaccaacagcc

SEQ ID NO: 61491 - DNA, 938 bp, Homo sapiens
aggcggcgcggctggtccccaggggtctgcgggcgactgcgcggctgaggcgcccgagtgcggtactggcggcgggcggcgggcagccatggcggaggccgcgtcgccgcacttgtcgctgccctcggggctgctggagctctgcgcgctgctgggcgccccccgggacagtctccgaagtctcgagcaggttgcttataaaaagggagtcaaacatctttctgctcttcttgatccagaggtcctgtccattttcgtgcctccttttatcagtaaagaggacagtcaaacggccggtgccaactgcggcactctcggtaaaacccggatgcgctccttgagaaagaagagagagaagcccagaccagagcagtggaagggcctcccggggccccccagagcgccagagcctgaggatgtcgccgtcccgggcggcgtggacctcctcaccctgccgcagctgtgcttcccagggggtgtgtgcgtggccactgaacctaaggaggattgcgtccacttcctggtgctgaccgatgtctgcgggaataggacctatggcgtggtggcccagtactaccggcccctgcatgatgagtactgtttctacaatggcaaaacgcaccgggagtgtcctggctgcttcgtgcccttcgcggtgtgcgtggtctccaggtttccctattacaactccctcaaggactgcctttcctggtgagctggggcaccgggggccaggggtggtagggggcagctctttgtgcctctccaggtgagccaagggaccagggggctggaggtggtgggggggcagctctctgttcctctcctggtgagccgggggaccaggcgctgggggcagtaggaggggcagttctctgtgcctcttaggctgttgcttaaggctgggggcagtgggcagggggtgtggcagcgggcgc

SEQ ID NO: 61492 - DNA, 593 bp, Homo sapiens
tgaatcctacctgccgtccatgggaacactgcccctcacccggggccctgccttccacatgccagcagggtgcgtgcctgcagcccatctgcctcttcattccagagcccgctctgcctctgtctctggtgaatccacgtgttctctgagtgtgacattcctaacttttcttttctgcctctgcaggaggtcaggagaaccactactacatttctacttcggagaatacccactttaaaaatcagagtggcgtccaagaaagaagtcttcgaagccaacctgaaaaccgagtgtgacctttggcacctgatggtgaaggagatgtgggctgggaagaagctggccgatgaccacaaggtgggagacgcgggtcccctctgccctttgctgtggctgcctcaggggcctctcgccacctgtgggtcctgtggcagtcctcagctgtgagtgctcgggctcgggtctgagtgtcttaagcagagtaagtttgtcggacaccatcttgacagaagcattgaagatgtggtctgtgtgacccagcgagaggcctcacggtgctacggaagagcatgatgagaaaacgcagggcggtc

SEQ ID NO: 61493 - DNA, 5493 bp, Homo sapiens
aggcggcgcggctggtccccaggggtctgcgggcgactgcgcggctgaggcgcccgagtgcggtactggcggcgggcggcgggcagccatggcggaggccgcgtcgccgcacttgtcgctgccctcggggctgctggagctctgcgcgctgctgggcgccccccgggacagtctccgaagtctcgagcaggttgcttataaaaagggagtcaaacatctttctgctcttcttgatccagaggtcctgtccattttcgtgcctccttttatcagtaaagaggacagtcaaacggccggtgccaactgcggcactctcggtaaaacccggatgcgctccttgagaaagaagagagagaagcccagaccagagcagtggaagggcctcccggggccccccagagcgccagagcctgaggatgtcgccgtcccgggcggcgtggacctcctcaccctgccgcagctgtgcttcccagggggtgtgtgcgtggccactgaacctaaggaggattgcgtccacttcctggtgctgaccgatgtctgcgggaataggacctatggcgtggtggcccagtactaccggcccctgcatgatgagtactgtttctacaatggcaaaacgcaccgggagtgtcctggctgcttcgtgcccttcgcggtgtgcgtggtctccaggtttccctattacaactccctcaaggactgcctttcctgtttattggctcttctgaagccctgtaaagattttgaagtggacagtcatataaaagatttcgctgcgaagctgtctttaatacccagcccgccacctggaccgctccatttggtatttaacatgaagtcgctccagattgtgttacctgcccgagcagaccccgaaagccccatcctggacctggaccttcacctgcccttgctgtgcttcaggcctgagaaggtgctacagatcctgacatgcatcctgacggaacagcggatcgtcttcttctcctcggactgggctctgctgacgctggtcactgagtgcttcatggcctacctgtatccgctgcagtggcagcaccccttcgtgcccatcctgtcggaccagatgctggatttcgtcatggcccccacgtccttcctgatgggctgccatctcgaccacttcgaagaagtcagcaaggaagccgacggtttagttctgataaatattgatcatgggagcatcacctactccaagtccacggacgataacgtggacattcctgatgtccccctcctggcagcccagacgtttattcagagggtgcagagcctccagctccaccatgagctgcacgccgcccacctcctctccagcacagacctgaaggagggccgagcccaccggcggtcctggcagcagaaactcaactgccagatacagcagaccaccctgcagctgctcgtgagcatcttcagggatgtaaagaatcatttaaactatgaacacagagtctttaatagtgaagaatttctcaaaaccagggctccaggggaccatcagttttataagcaggtcttagacacctacatgttccattcttttcttaaagcccggctcaataggaggatggacgcctttgctcagatggacctcgacacccagtcggaggaggacagaataaatggaatgcttctaagtccaaggagaccgaccgttgagaaaagagcctcccggaagtcctcgcacctgcatgtcacccacaggcgcatggtggtcagcatgcccaacctgcaggacattgccatgcctgagctggcacccaggaactcctcgctccggctgacggacaccgcaggctgtaggggcagcagcgcagttctgaatgtcacgccgaagtccccgtatacattcaagattcccgaaatccactttccgctggagagcaagtgcgtgcaggcataccatgcccactttgtctccatgctgagcgaggccatgtgctttctggcccccgataactctctgctcctggcccgctatttgtacctccgagggctcgtttatctgatgcagggacagctgctgaacgccctcttggacttccagaatctgtataaaacagacatacggatctttcccactgatttggtgaagaggacggtggaatccatgtctgcccctgagtgggagggggctgagcaggcgccggagctgatgaggctcatcagcgagatcctggacaagccgcacgaggcctcgaagctggacgaccacgtgaagaagttcaagctgcccaagaagcacatgcagctgggcgacttcatgaagcgggtccaggagtcagggatcgtgaaggacgccagcatcatacaccggctgttcgaggccttgactgtaggacaggagaaacaaatcgacccagaaacattcaaagatttctacaactgctggaaggagacggaagcagaagcccaggaggtcagtctgccgtggctggtgatggaacacctggataaaaacgagtgtgtgtgtaagttgtccagctccgtcaagacaaacctaggcgttggcaagatcgccatgacccagaagcgcctgttcctcctaaccgaaggaaggccaggctacttggagatttccaccttcagaaatatagaggaggtcaggagaaccactactacatttctacttcggagaatacccactttaaaaatcagagtggcgtccaagaaagaagtcttcgaagccaacctgaaaaccgagtgtgacctttggcacctgatggtgaaggagatgtgggctgggaagaagctggccgatgaccacaaggaccctcactacgtccagcaggcgctgaccaacgtcttgctgatggacgccgtcgtgggcacactgcagtcaccaggcgccatctacgctgcctccaagttatcctactttgataagatgagtaacgaaatgcccatgacgcttccggagacaaccctggaaacactgaagcataaaatcaacccctcggcgggggaggcgttcccacaagcggtggacgtgctgctctacactccagggcatcttgacccagccgaaaaagttgaagatgctcaccccaagttatggtgtgctctgagcgaaggcaaggtgaccgtgttcaatgcttcttcatggaccatccaccagcactcctttaaagtgggcactgcaaaagtgaactgcatggtgatggccgaccagaaccaggtgtgggttggctcggaagactccgtcatctacatcatcaacgtccacagcatgtcctgcaacaagcagctcacagcccactgctccagtgtcacggatttgattgtgcaggacggacaggaggcacccagcaacgtgtactcgtgcagcatggacggcatggtgctggtgtggaatgtgagcacactgcaggtgaccagccgcttccagctgccgcgaggtggcctgacgtccatcagactgcacggcggccgcctgtggtgctgcacaggtaacagcatcatggtcatgaaaatgaatggatccctccatcaagaattgaagattgaggagaacttcaaagacaccagtacctccttcctggccttccagctccttcctgaggaggagcagctgtgggcggcctgtgcaggacgcagcgaggtttacatctggagcctgaaggacctggcccagcccccgcagagggtgcccctcgaggactgctctgagatcaactgcatgatccgggtgaagaagcaggtctgggtgggcagccgagggctggggcagggaacacccaaggggaaaatctacgtgattgacgccgagaggaagaccgtggagaaggagctggtggcgcacatggacaccgtgaggacgctgtgctcggctgaggacagatacgtgctgagtgggtcgggcagggaggaggggaaagtcgccatttggaaaggcgaataaacgtggctgagtctgccaagtggaactgtgccctatgtgtggggactggctgccccctagagcctgccaggagcagaagcctggaggggtggcagggcagagcagcccaggctcagcatggagcccacttaccgtgtggccagccgcgagacccatggccacgcaccttctctcaggccttcgggccccctggttaaactgcaccaagggtgtttcctgttggggtgtgtctcaggcaggcagctgcgtcttgttggtgataacctctgctgggaggttactttgttgcctagaaagttctggaatccacaaccaggggctggcactggagccagcagcttggccgagtcacaggtgacccgtggccctcacgtctctggttttacctttccttacttcattcattcactcacccagtccttacgaatcaccgaggaacactgggctgagcacatgacagggagcctggagccccggggcctccagcgaggcctgagaagggtggttcgggtaaccactgtgggctctctcccatcacagaaggtggacagggcctacccaggtggaggggaccaccctgcgatcaggtgtttgcgacaggggttgggccagctgaggcaagctgtcttttttcccttttctttttaatagatgcaacatttttataataatcctagagaccttttttctaccaaagatcacagaccagaaaaagttccatctaaaatatcatgcccaggaaagcacatgggatcaaaagtaaaatagcatcatgtgtgatctcgtcttccagcgtgccgctcagttccccgaatccgtgtgcacacgtgtgatctcgtcttcagtgtgccgctcagttccctgaatccgtgtgcacactgcgtatgtgtacgcgcagatgctatactgaactcaacaagatcttggctgtacataaatatttgtaaaagagaccctttgcacctttttactgtaatgttgagacttcattacttaaatgttctacggaaggttctggtgtggttgttggagccggagggagcgtgtcagcacgtgctgagggcatggggcctgccccctgggcacccatccacaagctgggccacggagctccagcttctcaggacaaagccccggggctggcgcatcctgagggtctctgggggtgtttgccaggctcctgggatgggccgctttcagaagccctgcagtgcctccagatggaaaggcgggcccggcctccggttgggtctgcattttggagagtccacaccacggaccaggttttcccccaaggcttggctttgtgtagctactaacttcttggggcattctgagagtgtgggcagagagaattatgtggcctcatcctcccccaaggctgtgcttgcagcccgggcaccttcccactttctagctctggagaggttggattttgcttttgtaaacacatgaatccttatgataaaagtctgtcagtcaaaaatacatttataaattatttaatgccagtcctcatgtaacctcaggtatcttcagcttgtggagaataaatctggtttaataaa

SEQ ID NO: 61494 - DNA, 5444 bp, Homo sapiens
aggcggcgcggctggtccccaggggtctgcgggcgactgcgcggctgaggcgcccgagtgcggtactggcggcgggcggcgggcagccatggcggaggccgcgtcgccgcacttgtcgctgccctcggggctgctggagctctgcgcgctgctgggcgccccccgggacagtctccgaagtctcgagcagaggtcctgtccattttcgtgcctccttttatcagtaaagaggacagtcaaacggccggtgccaactgcggcactctcggtaaaacccggatgcgctccttgagaaagaagagagagaagcccagaccagagcagtggaagggcctcccggggccccccagagcgccagagcctgaggatgtcgccgtcccgggcggcgtggacctcctcaccctgccgcagctgtgcttcccagggggtgtgtgcgtggccactgaacctaaggaggattgcgtccacttcctggtgctgaccgatgtctgcgggaataggacctatggcgtggtggcccagtactaccggcccctgcatgatgagtactgtttctacaatggcaaaacgcaccgggagtgtcctggctgcttcgtgcccttcgcggtgtgcgtggtctccaggtttccctattacaactccctcaaggactgcctttcctgtttattggctcttctgaagccctgtaaagattttgaagtggacagtcatataaaagatttcgctgcgaagctgtctttaatacccagcccgccacctggaccgctccatttggtatttaacatgaagtcgctccagattgtgttacctgcccgagcagaccccgaaagccccatcctggacctggaccttcacctgcccttgctgtgcttcaggcctgagaaggtgctacagatcctgacatgcatcctgacggaacagcggatcgtcttcttctcctcggactgggctctgctgacgctggtcactgagtgcttcatggcctacctgtatccgctgcagtggcagcaccccttcgtgcccatcctgtcggaccagatgctggatttcgtcatggcccccacgtccttcctgatgggctgccatctcgaccacttcgaagaagtcagcaaggaagccgacggtttagttctgataaatattgatcatgggagcatcacctactccaagtccacggacgataacgtggacattcctgatgtccccctcctggcagcccagacgtttattcagagggtgcagagcctccagctccaccatgagctgcacgccgcccacctcctctccagcacagacctgaaggagggccgagcccaccggcggtcctggcagcagaaactcaactgccagatacagcagaccaccctgcagctgctcgtgagcatcttcagggatgtaaagaatcatttaaactatgaacacagagtctttaatagtgaagaatttctcaaaaccagggctccaggggaccatcagttttataagcaggtcttagacacctacatgttccattcttttcttaaagcccggctcaataggaggatggacgcctttgctcagatggacctcgacacccagtcggaggaggacagaataaatggaatgcttctaagtccaaggagaccgaccgttgagaaaagagcctcccggaagtcctcgcacctgcatgtcacccacaggcgcatggtggtcagcatgcccaacctgcaggacattgccatgcctgagctggcacccaggaactcctcgctccggctgacggacaccgcaggctgtaggggcagcagcgcagttctgaatgtcacgccgaagtccccgtatacattcaagattcccgaaatccactttccgctggagagcaagtgcgtgcaggcataccatgcccactttgtctccatgctgagcgaggccatgtgctttctggcccccgataactctctgctcctggcccgctatttgtacctccgagggctcgtttatctgatgcagggacagctgctgaacgccctcttggacttccagaatctgtataaaacagacatacggatctttcccactgatttggtgaagaggacggtggaatccatgtctgcccctgagtgggagggggctgagcaggcgccggagctgatgaggctcatcagcgagatcctggacaagccgcacgaggcctcgaagctggacgaccacgtgaagaagttcaagctgcccaagaagcacatgcagctgggcgacttcatgaagcgggtccaggagtcagggatcgtgaaggacgccagcatcatacaccggctgttcgaggccttgactgtaggacaggagaaacaaatcgacccagaaacattcaaagatttctacaactgctggaaggagacggaagcagaagcccaggaggtcagtctgccgtggctggtgatggaacacctggataaaaacgagtgtgtgtgtaagttgtccagctccgtcaagacaaacctaggcgttggcaagatcgccatgacccagaagcgcctgttcctcctaaccgaaggaaggccaggctacttggagatttccaccttcagaaatatagaggaggtcaggagaaccactactacatttctacttcggagaatacccactttaaaaatcagagtggcgtccaagaaagaagtcttcgaagccaacctgaaaaccgagtgtgacctttggcacctgatggtgaaggagatgtgggctgggaagaagctggccgatgaccacaaggaccctcactacgtccagcaggcgctgaccaacgtcttgctgatggacgccgtcgtgggcacactgcagtcaccaggcgccatctacgctgcctccaagttatcctactttgataagatgagtaacgaaatgcccatgacgcttccggagacaaccctggaaacactgaagcataaaatcaacccctcggcgggggaggcgttcccacaagcggtggacgtgctgctctacactccagggcatcttgacccagccgaaaaagttgaagatgctcaccccaagttatggtgtgctctgagcgaaggcaaggtgaccgtgttcaatgcttcttcatggaccatccaccagcactcctttaaagtgggcactgcaaaagtgaactgcatggtgatggccgaccagaaccaggtgtgggttggctcggaagactccgtcatctacatcatcaacgtccacagcatgtcctgcaacaagcagctcacagcccactgctccagtgtcacggatttgattgtgcaggacggacaggaggcacccagcaacgtgtactcgtgcagcatggacggcatggtgctggtgtggaatgtgagcacactgcaggtgaccagccgcttccagctgccgcgaggtggcctgacgtccatcagactgcacggcggccgcctgtggtgctgcacaggtaacagcatcatggtcatgaaaatgaatggatccctccatcaagaattgaagattgaggagaacttcaaagacaccagtacctccttcctggccttccagctccttcctgaggaggagcagctgtgggcggcctgtgcaggacgcagcgaggtttacatctggagcctgaaggacctggcccagcccccgcagagggtgcccctcgaggactgctctgagatcaactgcatgatccgggtgaagaagcaggtctgggtgggcagccgagggctggggcagggaacacccaaggggaaaatctacgtgattgacgccgagaggaagaccgtggagaaggagctggtggcgcacatggacaccgtgaggacgctgtgctcggctgaggacagatacgtgctgagtgggtcgggcagggaggaggggaaagtcgccatttggaaaggcgaataaacgtggctgagtctgccaagtggaactgtgccctatgtgtggggactggctgccccctagagcctgccaggagcagaagcctggaggggtggcagggcagagcagcccaggctcagcatggagcccacttaccgtgtggccagccgcgagacccatggccacgcaccttctctcaggccttcgggccccctggttaaactgcaccaagggtgtttcctgttggggtgtgtctcaggcaggcagctgcgtcttgttggtgataacctctgctgggaggttactttgttgcctagaaagttctggaatccacaaccaggggctggcactggagccagcagcttggccgagtcacaggtgacccgtggccctcacgtctctggttttacctttccttacttcattcattcactcacccagtccttacgaatcaccgaggaacactgggctgagcacatgacagggagcctggagccccggggcctccagcgaggcctgagaagggtggttcgggtaaccactgtgggctctctcccatcacagaaggtggacagggcctacccaggtggaggggaccaccctgcgatcaggtgtttgcgacaggggttgggccagctgaggcaagctgtcttttttcccttttctttttaatagatgcaacatttttataataatcctagagaccttttttctaccaaagatcacagaccagaaaaagttccatctaaaatatcatgcccaggaaagcacatgggatcaaaagtaaaatagcatcatgtgtgatctcgtcttccagcgtgccgctcagttccccgaatccgtgtgcacacgtgtgatctcgtcttcagtgtgccgctcagttccctgaatccgtgtgcacactgcgtatgtgtacgcgcagatgctatactgaactcaacaagatcttggctgtacataaatatttgtaaaagagaccctttgcacctttttactgtaatgttgagacttcattacttaaatgttctacggaaggttctggtgtggttgttggagccggagggagcgtgtcagcacgtgctgagggcatggggcctgccccctgggcacccatccacaagctgggccacggagctccagcttctcaggacaaagccccggggctggcgcatcctgagggtctctgggggtgtttgccaggctcctgggatgggccgctttcagaagccctgcagtgcctccagatggaaaggcgggcccggcctccggttgggtctgcattttggagagtccacaccacggaccaggttttcccccaaggcttggctttgtgtagctactaacttcttggggcattctgagagtgtgggcagagagaattatgtggcctcatcctcccccaaggctgtgcttgcagcccgggcaccttcccactttctagctctggagaggttggattttgcttttgtaaacacatgaatccttatgataaaagtctgtcagtcaaaaatacatttataaattatttaatgccagtcctcatgtaacctcaggtatcttcagcttgtggagaataaatctggtttaataaa

SEQ ID NO: 61495 - DNA, 4878 bp, Homo sapiens
acgctggggagattccagtgtgattagaaacgctaacgatgacaactgcgttctcatctttattttgcggtttgagttttgtgtttcgaatttcagtttattggctcttctgaagccctgtaaagattttgaagtggacagtcatataaaagatttcgctgcgaagctgtctttaatacccagcccgccacctggaccgctccatttggtatttaacatgaagtcgctccagattgtgttacctgcccgagcagaccccgaaagccccatcctggacctggaccttcacctgcccttgctgtgcttcaggcctgagaaggtgctacagatcctgacatgcatcctgacggaacagcggatcgtcttcttctcctcggactgggctctgctgacgctggtcactgagtgcttcatggcctacctgtatccgctgcagtggcagcaccccttcgtgcccatcctgtcggaccagatgctggatttcgtcatggcccccacgtccttcctgatgggctgccatctcgaccacttcgaagaagtcagcaaggaagccgacggtttagttctgataaatattgatcatgggagcatcacctactccaagtccacggacgataacgtggacattcctgatgtccccctcctggcagcccagacgtttattcagagggtgcagagcctccagctccaccatgagctgcacgccgcccacctcctctccagcacagacctgaaggagggccgagcccaccggcggtcctggcagcagaaactcaactgccagatacagcagaccaccctgcagctgctcgtgagcatcttcagggatgtaaagaatcatttaaactatgaacacagagtctttaatagtgaagaatttctcaaaaccagggctccaggggaccatcagttttataagcaggtcttagacacctacatgttccattcttttcttaaagcccggctcaataggaggatggacgcctttgctcagatggacctcgacacccagtcggaggaggacagaataaatggaatgcttctaagtccaaggagaccgaccgttgagaaaagagcctcccggaagtcctcgcacctgcatgtcacccacaggcgcatggtggtcagcatgcccaacctgcaggacattgccatgcctgagctggcacccaggaactcctcgctccggctgacggacaccgcaggctgtaggggcagcagcgcagttctgaatgtcacgccgaagtccccgtatacattcaagattcccgaaatccactttccgctggagagcaagtgcgtgcaggcataccatgcccactttgtctccatgctgagcgaggccatgtgctttctggcccccgataactctctgctcctggcccgctatttgtacctccgagggctcgtttatctgatgcagggacagctgctgaacgccctcttggacttccagaatctgtataaaacagacatacggatctttcccactgatttggtgaagaggacggtggaatccatgtctgcccctgagtgggagggggctgagcaggcgccggagctgatgaggctcatcagcgagatcctggacaagccgcacgaggcctcgaagctggacgaccacgtgaagaagttcaagctgcccaagaagcacatgcagctgggcgacttcatgaagcgggtccaggagtcagggatcgtgaaggacgccagcatcatacaccggctgttcgaggccttgactgtaggacaggagaaacaaatcgacccagaaacattcaaagatttctacaactgctggaaggagacggaagcagaagcccaggaggtcagtctgccgtggctggtgatggaacacctggataaaaacgagtgtgtgtgtaagttgtccagctccgtcaagacaaacctaggcgttggcaagatcgccatgacccagaagcgcctgttcctcctaaccgaaggaaggccaggctacttggagatttccaccttcagaaatatagaggaggtcaggagaaccactactacatttctacttcggagaatacccactttaaaaatcagagtggcgtccaagaaagaagtcttcgaagccaacctgaaaaccgagtgtgacctttggcacctgatggtgaaggagatgtgggctgggaagaagctggccgatgaccacaaggaccctcactacgtccagcaggcgctgaccaacgtcttgctgatggacgccgtcgtgggcacactgcagtcaccaggcgccatctacgctgcctccaagttatcctactttgataagatgagtaacgaaatgcccatgacgcttccggagacaaccctggaaacactgaagcataaaatcaacccctcggcgggggaggcgttcccacaagcggtggacgtgctgctctacactccagggcatcttgacccagccgaaaaagttgaagatgctcaccccaagttatggtgtgctctgagcgaaggcaaggtgaccgtgttcaatgcttcttcatggaccatccaccagcactcctttaaagtgggcactgcaaaagtgaactgcatggtgatggccgaccagaaccaggtgtgggttggctcggaagactccgtcatctacatcatcaacgtccacagcatgtcctgcaacaagcagctcacagcccactgctccagtgtcacggatttgattgtgcaggacggacaggaggcacccagcaacgtgtactcgtgcagcatggacggcatggtgctggtgtggaatgtgagcacactgcaggtgaccagccgcttccagctgccgcgaggtggcctgacgtccatcagactgcacggcggccgcctgtggtgctgcacaggtaacagcatcatggtcatgaaaatgaatggatccctccatcaagaattgaagattgaggagaacttcaaagacaccagtacctccttcctggccttccagctccttcctgaggaggagcagctgtgggcggcctgtgcaggacgcagcgaggtttacatctggagcctgaaggacctggcccagcccccgcagagggtgcccctcgaggactgctctgagatcaactgcatgatccgggtgaagaagcaggtctgggtgggcagccgagggctggggcagggaacacccaaggggaaaatctacgtgattgacgccgagaggaagaccgtggagaaggagctggtggcgcacatggacaccgtgaggacgctgtgctcggctgaggacagatacgtgctgagtgggtcgggcagggaggaggggaaagtcgccatttggaaaggcgaataaacgtggctgagtctgccaagtggaactgtgccctatgtgtggggactggctgccccctagagcctgccaggagcagaagcctggaggggtggcagggcagagcagcccaggctcagcatggagcccacttaccgtgtggccagccgcgagacccatggccacgcaccttctctcaggccttcgggccccctggttaaactgcaccaagggtgtttcctgttggggtgtgtctcaggcaggcagctgcgtcttgttggtgataacctctgctgggaggttactttgttgcctagaaagttctggaatccacaaccaggggctggcactggagccagcagcttggccgagtcacaggtgacccgtggccctcacgtctctggttttacctttccttacttcattcattcactcacccagtccttacgaatcaccgaggaacactgggctgagcacatgacagggagcctggagccccggggcctccagcgaggcctgagaagggtggttcgggtaaccactgtgggctctctcccatcacagaaggtggacagggcctacccaggtggaggggaccaccctgcgatcaggtgtttgcgacaggggttgggccagctgaggcaagctgtcttttttcccttttctttttaatagatgcaacatttttataataatcctagagaccttttttctaccaaagatcacagaccagaaaaagttccatctaaaatatcatgcccaggaaagcacatgggatcaaaagtaaaatagcatcatgtgtgatctcgtcttccagcgtgccgctcagttccccgaatccgtgtgcacacgtgtgatctcgtcttcagtgtgccgctcagttccctgaatccgtgtgcacactgcgtatgtgtacgcgcagatgctatactgaactcaacaagatcttggctgtacataaatatttgtaaaagagaccctttgcacctttttactgtaatgttgagacttcattacttaaatgttctacggaaggttctggtgtggttgttggagccggagggagcgtgtcagcacgtgctgagggcatggggcctgccccctgggcacccatccacaagctgggccacggagctccagcttctcaggacaaagccccggggctggcgcatcctgagggtctctgggggtgtttgccaggctcctgggatgggccgctttcagaagccctgcagtgcctccagatggaaaggcgggcccggcctccggttgggtctgcattttggagagtccacaccacggaccaggttttcccccaaggcttggctttgtgtagctactaacttcttggggcattctgagagtgtgggcagagagaattatgtggcctcatcctcccccaaggctgtgcttgcagcccgggcaccttcccactttctagctctggagaggttggattttgcttttgtaaacacatgaatccttatgataaaagtctgtcagtcaaaaatacatttataaattatttaatgccagtcctcatgtaacctcaggtatcttcagcttgtggagaataaatctggtttaataaa

SEQ ID NO: 61496 - DNA, 5420 bp, Homo sapiens
aggcggcgcggctggtccccaggggtctgcgggcgactgcgcggctgaggcgcccgagtgcggtactggcggcgggcggcgggcagccatggcggaggccgcgtcgccgcacttgtcgctgccctcggggctgctggagctctgcgcgctgctgggcgccccccgggacagtctccgaagtctcgagcaggttgcttataaaaagggagtcaaacatctttctgctcttcttgatccagaggtcctgtccattttcgtgcctccttttatcagtaaagaggacagtcaaacggccggtgccaactgcggcactctcggtaaaacccggatgcgctccttgagaaagaagagagagaagcccagaccagagcagtggaagggcctcccggggccccccagagcgccagagcctgaggatgtcgccgtcccgggcggcgtggacctcctcaccctgccgcagctgtgcttcccagggggtgtgtgcgtggccactgaacctaaggaggattgcgtccacttcctggtgctgaccgatgtctgcgggaataggacctatggcgtggtggcccagtactaccggcccctgcatgatgagtactgtttctacaatggcaaaacgcaccgggagtgtcctggctgcttcgtgcccttcgcggtgtgcgtggtctccaggtttccctattacaactccctcaaggactgcctttcctgtttattggctcttctgaagccctgtaaagattttgaagtggacagtcatataaaagatttcgctgcgaagctgtctttaatacccagcccgccacctggaccgctccatttggtatttaacatgaagtcgctccagattgtgttacctgcccgagcagaccccgaaagccccatcctggacctggaccttcacctgcccttgctgtgcttcaggcctgagaaggtgctacagatcctgacatgcatcctgacggaacagcggatcgtcttcttctcctcggactgggctctgctgacgctggtcactgagtgcttcatggcctacctgtatccgctgcagtggcagcaccccttcgtgcccatcctgtcggaccagatgctggatttcgtcatggcccccacgtccttcctgatgggctgccatctcgaccacttcgaagaagtcagcaaggaagccgacggtttagttctgataaatattgatcatgggagcatcacctactccaagtccacggacgataacgtggacattcctgatgtccccctcctggcagcccagacgtttattcagagggtgcagagcctccagctccaccatgagctgcacgccgcccacctcctctccagcacagacctgaaggagggccgagcccaccggcggtcctggcagcagaaactcaactgccagatacagcagaccaccctgcagctgctcgtgagcatcttcagggatgtaaagaatcatttaaactatgaacacagagtctttaatagtgaagaatttctcaaaaccagggctccaggggaccatcagttttataagcaggtcttagacacctacatgttccattcttttcttaaagcccggctcaataggaggatggacgcctttgctcagatggacctcgacacccagtcggaggaggacagaataaatggaatgcttctaagtccaaggagaccgaccgttgagaaaagagcctcccggaagtcctcgcacctgcatgtcacccacaggcgcatggtggtcagcatgcccaacctgcaggacattgccatgcctgagctggcacccaggaactcctcgctccggctgacggacaccgcaggctgtaggggcagcagcgcagttctgaatgtcacgccgaagtccccgtatacattcaagattcccgaaatccactttccgctggagagcaagtgcgtgcaggcataccatgcccactttgtctccatgctgagcgaggccatgtgctttctggcccccgataactctctgctcctggcccgctatttgtacctccgagggctcgtttatctgatgcagggacagctgctgaacgccctcttggacttccagaatctgtataaaacagacatacggatctttcccactgatttggtgaagaggacggtggaatccatgtctgcccctgagtgggagggggctgagcaggcgccggagctgatgaggctcatcagcgagatcctggacaagccgcacgaggcctcgaagctggacgaccacgtgaagaagttcaagctgcccaagaagcacatgcagctgggcgacttcatgaagcgggtccaggagtcagggatcgtgaaggacgccagcatcatacaccggctgttcgaggccttgactgtaggacaggagaaacaaatcgacccagaaacattcaaagatttctacaactgctggaaggagacggaagcagaagcccaggaggtcagtctgccgtggctggtgatggaacacctggataaaaacgagtgtgtgtgtaagttgtccagctccgtcaagacaaacctaggcgttggcaagatcgccatgacccagaagcgcctgttcctcctaaccgaaggaaggccaggctacttggagatttccaccttcagaaatatagaggaggtcaggagaaccactactacatttctacttcggagaatacccactttaaaaatcagagtggcgtccaagaaagaagtcttcgaagccaacctgaaaaccgagtgtgacctttggcacctgatggtgaaggagatgtgggctgggaagaagctggccgatgaccacaaggaccctcactacgtccagcaggcgctgaccaacgtcttgctgatggacgccgtcgtgggcacactgcagtcaccaggcgccatctacgctgcctccaagttatcctactttgataagatgagtaacgaaatgcccatgacgcttccggagacaaccctggaaacactgaagcataaaatcaacccctcggcgggggaggcgttcccacaagcggtggacgtgctgctctacactccagggcatcttgacccagccgaaaaagttgaagatgctcaccccaagttatggtgtgctctgagcgaaggcaaggtgaccgtgttcaatgcttcttcatggaccatccaccagcactcctttaaagtgggcactgcaaaagtgaactgcatggtgatggccgaccagaaccaggtgtgggttggctcggaagactccgtcatctacatcatcaacgtccacagcatgtcctgcaacaagcagctcacagcccactgctccagtgtcacggatttgattgtgcaggacggacaggaggcacccagcaacgtgtactcgtgcagcatggacggcatggtgctggtgtggaatgtgagcacactgcaggtgaccagccgcttccagctgccgcgaggtggcctgacgtccatcagactgcacggcggccgcctgtggtgctgcacaggtaacagcatcatggtcatgaaaatgaatggatccctccatcaagaattgaagattgaggagaacttcaaagacaccagtacctccttcctggccttccagctccttcctgaggaggagcagctgtgggcggcctgtgcaggacgcagcgaggtttacatctggagcctgaaggacctggcccagcccccgcagagggtgcccctcgaggactgctctgagatcaactgcatgatccgggtgaagaagcaggtctgggtgggcagccgagggctggggcagggaacacccaaggggaaaatctacgtgattgacgccgagaggaagaccgtggagaaggagctggtggcgcacatggacaccgtgaggacgctgtgctcggctgaggacagatacgtgctgagtgggtcgggcagggaggaggggaaagtcgccatttggaaaggcgaataaacgtggctgagtctgccaagtggaactgtgccctatgtgtggggactggctgccccctagagcctgccagccgcgagacccatggccacgcaccttctctcaggccttcgggccccctggttaaactgcaccaagggtgtttcctgttggggtgtgtctcaggcaggcagctgcgtcttgttggtgataacctctgctgggaggttactttgttgcctagaaagttctggaatccacaaccaggggctggcactggagccagcagcttggccgagtcacaggtgacccgtggccctcacgtctctggttttacctttccttacttcattcattcactcacccagtccttacgaatcaccgaggaacactgggctgagcacatgacagggagcctggagccccggggcctccagcgaggcctgagaagggtggttcgggtaaccactgtgggctctctcccatcacagaaggtggacagggcctacccaggtggaggggaccaccctgcgatcaggtgtttgcgacaggggttgggccagctgaggcaagctgtcttttttcccttttctttttaatagatgcaacatttttataataatcctagagaccttttttctaccaaagatcacagaccagaaaaagttccatctaaaatatcatgcccaggaaagcacatgggatcaaaagtaaaatagcatcatgtgtgatctcgtcttccagcgtgccgctcagttccccgaatccgtgtgcacacgtgtgatctcgtcttcagtgtgccgctcagttccctgaatccgtgtgcacactgcgtatgtgtacgcgcagatgctatactgaactcaacaagatcttggctgtacataaatatttgtaaaagagaccctttgcacctttttactgtaatgttgagacttcattacttaaatgttctacggaaggttctggtgtggttgttggagccggagggagcgtgtcagcacgtgctgagggcatggggcctgccccctgggcacccatccacaagctgggccacggagctccagcttctcaggacaaagccccggggctggcgcatcctgagggtctctgggggtgtttgccaggctcctgggatgggccgctttcagaagccctgcagtgcctccagatggaaaggcgggcccggcctccggttgggtctgcattttggagagtccacaccacggaccaggttttcccccaaggcttggctttgtgtagctactaacttcttggggcattctgagagtgtgggcagagagaattatgtggcctcatcctcccccaaggctgtgcttgcagcccgggcaccttcccactttctagctctggagaggttggattttgcttttgtaaacacatgaatccttatgataaaagtctgtcagtcaaaaatacatttataaattatttaatgccagtcctcatgtaacctcaggtatcttcagcttgtggagaataaatctggtttaataaa

SEQ ID NO: 61497 - DNA, 3994 bp, Homo sapiens
ggcttcatcctgcctagcaggtacatcttggcttaggctattagcttcatcctcaaataaagcctcagtacccgatacctcagtagtattactagttgtagcaaaccaaattgttcagtgaatgctagctgctattctccttggggtaccatggaagcaaagtgagggttctctcatgcctcccaggggggtgggtgtgtggagctttctggagggagcacacccattctcattttattttgcatccagagaaacattgtcctgacaagatgatgtgacagggacacgtgttcatttggaaggtctgtgctaatggtctccttttccccctgaatgttttagttctgaatgtcacgccgaagtccccgtatacattcaagattcccgaaatccactttccgctggagagcaagtgcgtgcaggcataccatgcccactttgtctccatgctgagcgaggccatgtgctttctggcccccgataactctctgctcctggcccgctatttgtacctccgagggctcgtttatctgatgcagggacagctgctgaacgccctcttggacttccagaatctgtataaaacagacatacggatctttcccactgatttggtgaagaggacggtggaatccatgtctgcccctgagtgggagggggctgagcaggcgccggagctgatgaggctcatcagcgagatcctggacaagccgcacgaggcctcgaagctggacgaccacgtgaagaagttcaagctgcccaagaagcacatgcagctgggcgacttcatgaagcgggtccaggagtcagggatcgtgaaggacgccagcatcatacaccggctgttcgaggccttgactgtaggacaggagaaacaaatcgacccagaaacattcaaagatttctacaactgctggaaggagacggaagcagaagcccaggaggtcagtctgccgtggctggtgatggaacacctggataaaaacgagtgtgtgtgtaagttgtccagctccgtcaagacaaacctaggcgttggcaagatcgccatgacccagaagcgcctgttcctcctaaccgaaggaaggccaggctacttggagatttccaccttcagaaatatagaggaggtcaggagaaccactactacatttctacttcggagaatacccactttaaaaatcagagtggcgtccaagaaagaagtcttcgaagccaacctgaaaaccgagtgtgacctttggcacctgatggtgaaggagatgtgggctgggaagaagctggccgatgaccacaaggaccctcactacgtccagcaggcgctgaccaacgtcttgctgatggacgccgtcgtgggcacactgcagtcaccaggcgccatctacgctgcctccaagttatcctactttgataagatgagtaacgaaatgcccatgacgcttccggagacaaccctggaaacactgaagcataaaatcaacccctcggcgggggaggcgttcccacaagcggtggacgtgctgctctacactccagggcatcttgacccagccgaaaaagttgaagatgctcaccccaagttatggtgtgctctgagcgaaggcaaggtgaccgtgttcaatgcttcttcatggaccatccaccagcactcctttaaagtgggcactgcaaaagtgaactgcatggtgatggccgaccagaaccaggtgtgggttggctcggaagactccgtcatctacatcatcaacgtccacagcatgtcctgcaacaagcagctcacagcccactgctccagtgtcacggatttgattgtgcaggacggacaggaggcacccagcaacgtgtactcgtgcagcatggacggcatggtgctggtgtggaatgtgagcacactgcaggtgaccagccgcttccagctgccgcgaggtggcctgacgtccatcagactgcacggcggccgcctgtggtgctgcacaggtaacagcatcatggtcatgaaaatgaatggatccctccatcaagaattgaagattgaggagaacttcaaagacaccagtacctccttcctggccttccagctccttcctgaggaggagcagctgtgggcggcctgtgcaggacgcagcgaggtttacatctggagcctgaaggacctggcccagcccccgcagagggtgcccctcgaggactgctctgagatcaactgcatgatccgggtgaagaagcaggtctgggtgggcagccgagggctggggcagggaacacccaaggggaaaatctacgtgattgacgccgagaggaagaccgtggagaaggagctggtggcgcacatggacaccgtgaggacgctgtgctcggctgaggacagatacgtgctgagtgggtcgggcagggaggaggggaaagtcgccatttggaaaggcgaataaacgtggctgagtctgccaagtggaactgtgccctatgtgtggggactggctgccccctagagcctgccaggagcagaagcctggaggggtggcagggcagagcagcccaggctcagcatggagcccacttaccgtgtggccagccgcgagacccatggccacgcaccttctctcaggccttcgggccccctggttaaactgcaccaagggtgtttcctgttggggtgtgtctcaggcaggcagctgcgtcttgttggtgataacctctgctgggaggttactttgttgcctagaaagttctggaatccacaaccaggggctggcactggagccagcagcttggccgagtcacaggtgacccgtggccctcacgtctctggttttacctttccttacttcattcattcactcacccagtccttacgaatcaccgaggaacactgggctgagcacatgacagggagcctggagccccggggcctccagcgaggcctgagaagggtggttcgggtaaccactgtgggctctctcccatcacagaaggtggacagggcctacccaggtggaggggaccaccctgcgatcaggtgtttgcgacaggggttgggccagctgaggcaagctgtcttttttcccttttctttttaatagatgcaacatttttataataatcctagagaccttttttctaccaaagatcacagaccagaaaaagttccatctaaaatatcatgcccaggaaagcacatgggatcaaaagtaaaatagcatcatgtgtgatctcgtcttccagcgtgccgctcagttccccgaatccgtgtgcacacgtgtgatctcgtcttcagtgtgccgctcagttccctgaatccgtgtgcacactgcgtatgtgtacgcgcagatgctatactgaactcaacaagatcttggctgtacataaatatttgtaaaagagaccctttgcacctttttactgtaatgttgagacttcattacttaaatgttctacggaaggttctggtgtggttgttggagccggagggagcgtgtcagcacgtgctgagggcatggggcctgccccctgggcacccatccacaagctgggccacggagctccagcttctcaggacaaagccccggggctggcgcatcctgagggtctctgggggtgtttgccaggctcctgggatgggccgctttcagaagccctgcagtgcctccagatggaaaggcgggcccggcctccggttgggtctgcattttggagagtccacaccacggaccaggttttcccccaaggcttggctttgtgtagctactaacttcttggggcattctgagagtgtgggcagagagaattatgtggcctcatcctcccccaaggctgtgcttgcagcccgggcaccttcccactttctagctctggagaggttggattttgcttttgtaaacacatgaatccttatgataaaagtctgtcagtcaaaaatacatttataaattatttaatgccagtcctcatgtaacctcaggtatcttcagcttgtggagaataaatctggtttaataaa

SEQ ID NO: 61498 - DNA, 2890 bp, Homo sapiens
ctagattgtcggaaggatgtcatgcgaaccgttacacacatttttcgttctcggagtgctcgcagcgtttaaaaatcagagtggcgtccaagaaagaagtcttcgaagccaacctgaaaaccgagtgtgacctttggcacctgatggtgaaggagatgtgggctgggaagaagctggccgatgaccacaaggaccctcactacgtccagcaggcgctgaccaacgtcttgctgatggacgccgtcgtgggcacactgcagtcaccaggcgccatctacgctgcctccaagttatcctactttgataagatgagtaacgaaatgcccatgacgcttccggagacaaccctggaaacactgaagcataaaatcaacccctcggcgggggaggcgttcccacaagcggtggacgtgctgctctacactccagggcatcttgacccagccgaaaaagttgaagatgctcaccccaagttatggtgtgctctgagcgaaggcaaggtgaccgtgttcaatgcttcttcatggaccatccaccagcactcctttaaagtgggcactgcaaaagtgaactgcatggtgatggccgaccagaaccaggtgtgggttggctcggaagactccgtcatctacatcatcaacgtccacagcatgtcctgcaacaagcagctcacagcccactgctccagtgtcacggatttgattgtgcaggacggacaggaggcacccagcaacgtgtactcgtgcagcatggacggcatggtgctggtgtggaatgtgagcacactgcaggtgaccagccgcttccagctgccgcgaggtggcctgacgtccatcagactgcacggcggccgcctgtggtgctgcacaggtaacagcatcatggtcatgaaaatgaatggatccctccatcaagaattgaagattgaggagaacttcaaagacaccagtacctccttcctggccttccagctccttcctgaggaggagcagctgtgggcggcctgtgcaggacgcagcgaggtttacatctggagcctgaaggacctggcccagcccccgcagagggtgcccctcgaggactgctctgagatcaactgcatgatccgggtgaagaagcaggtctgggtgggcagccgagggctggggcagggaacacccaaggggaaaatctacgtgattgacgccgagaggaagaccgtggagaaggagctggtggcgcacatggacaccgtgaggacgctgtgctcggctgaggacagatacgtgctgagtgggtcgggcagggaggaggggaaagtcgccatttggaaaggcgaataaacgtggctgagtctgccaagtggaactgtgccctatgtgtggggactggctgccccctagagcctgccaggagcagaagcctggaggggtggcagggcagagcagcccaggctcagcatggagcccacttaccgtgtggccagccgcgagacccatggccacgcaccttctctcaggccttcgggccccctggttaaactgcaccaagggtgtttcctgttggggtgtgtctcaggcaggcagctgcgtcttgttggtgataacctctgctgggaggttactttgttgcctagaaagttctggaatccacaaccaggggctggcactggagccagcagcttggccgagtcacaggtgacccgtggccctcacgtctctggttttacctttccttacttcattcattcactcacccagtccttacgaatcaccgaggaacactgggctgagcacatgacagggagcctggagccccggggcctccagcgaggcctgagaagggtggttcgggtaaccactgtgggctctctcccatcacagaaggtggacagggcctacccaggtggaggggaccaccctgcgatcaggtgtttgcgacaggggttgggccagctgaggcaagctgtcttttttcccttttctttttaatagatgcaacatttttataataatcctagagaccttttttctaccaaagatcacagaccagaaaaagttccatctaaaatatcatgcccaggaaagcacatgggatcaaaagtaaaatagcatcatgtgtgatctcgtcttccagcgtgccgctcagttccccgaatccgtgtgcacacgtgtgatctcgtcttcagtgtgccgctcagttccctgaatccgtgtgcacactgcgtatgtgtacgcgcagatgctatactgaactcaacaagatcttggctgtacataaatatttgtaaaagagaccctttgcacctttttactgtaatgttgagacttcattacttaaatgttctacggaaggttctggtgtggttgttggagccggagggagcgtgtcagcacgtgctgagggcatggggcctgccccctgggcacccatccacaagctgggccacggagctccagcttctcaggacaaagccccggggctggcgcatcctgagggtctctgggggtgtttgccaggctcctgggatgggccgctttcagaagccctgcagtgcctccagatggaaaggcgggcccggcctccggttgggtctgcattttggagagtccacaccacggaccaggttttcccccaaggcttggctttgtgtagctactaacttcttggggcattctgagagtgtgggcagagagaattatgtggcctcatcctcccccaaggctgtgcttgcagcccgggcaccttcccactttctagctctggagaggttggattttgcttttgtaaacacatgaatccttatgataaaagtctgtcagtcaaaaatacatttataaattatttaatgccagtcctcatgtaacctcaggtatcttcagcttgtggagaataaatctggtttaataaa

SEQ ID NO: 61499 - DNA, 5411 bp, Homo sapiens
aggcggcgcggctggtccccaggggtctgcgggcgactgcgcggctgaggcgcccgagtgcggtactggcggcgggcggcgggcagccatggcggaggccgcgtcgccgcacttgtcgctgccctcggggctgctggagctctgcgcgctgctgggcgccccccgggacagtctccgaagtctcgagcaggttgcttataaaaagggagtcaaacatctttctgctcttcttgatccagaggtcctgtccattttcgtgcctccttttatcagtaaagaggacagtcaaacggccggtgccaactgcggcactctcggtaaaacccggatgcgctccttgagaaagaagagagagaagcccagaccagagcagtggaagggcctcccggggccccccagagcgccagagcctgaggatgtcgccgtcccgggcggcgtggacctcctcaccctgccgcagctgtgcttcccagggggtgtgtgcgtggccactgaacctaaggaggattgcgtccacttcctggtgctgaccgatgtctgcgggaataggacctatggcgtggtggcccagtactaccggcccctgcatgatgagtactgtttctacaatggcaaaacgcaccgggagtgtcctggctgcttcgtgcccttcgcggtgtgcgtggtctccaggtttccctattacaactccctcaaggactgcctttcctgtttattggctcttctgaagccctgtaaagattttgaagtggacagtcatataaaagatttcgctgcgaagctgtctttaatacccagcccgccacctggaccgctccatttggtatttaacatgaagtcgctccagattgtgttacctgcccgagcagaccccgaaagccccatcctggacctggaccttcacctgcccttgctgtgcttcaggcctgagaaggtgctacagatcctgacatgcatcctgacggaacagcggatcgtcttcttctcctcggactgggctctgctgacgctggtcactgagtgcttcatggcctacctgtatccgctgcagtggcagcaccccttcgtgcccatcctgtcggaccagatgctggatttcgtcatggcccccacgtccttcctgatgggctgccatctcgaccacttcgaagaagtcagcaaggaagccgacggtttagttctgataaatattgatcatgggagcatcacctactccaagtccacggacgataacgtggacattcctgatgtccccctcctggcagcccagacgtttattcagagggtgcagagcctccagctccaccatgagctgcacgccgcccacctcctctccagcacagacctgaaggagggccgagcccaccggcggtcctggcagcagaaactcaactgccagatacagcagaccaccctgcagctgctcgtgagcatcttcagggatgtaaagaatcatttaaactatgaacacagagtctttaatagtgaagaatttctcaaaaccagggctccaggggaccatcagttttataagcaggtcttagacacctacatgttccattcttttcttaaagcccggctcaataggaggatggacgcctttgctcagatggacctcgacacccagtcggaggaggacagaataaatggaatgcttctaagtccaaggagaccgaccgttgagaaaagagcctcccggaagtcctcgcacctgcatgtcacccacaggcgcatggtggtcagcatgcccaacctgcaggacattgccatgcctgagctggcacccaggaactcctcgctccggctgacggacaccgcaggctgtaggggcagcagcgcagttctgaatgtcacgccgaagtccccgtatacattcaagattcccgaaatccactttccgctggagagcaagtgcgtgcaggcataccatgcccactttgtctccatgctgagcgaggccatgtgctttctggcccccgataactctctgctcctggcccgctatttgtacctccgagggctcgtttatctgatgcagggacagctgctgaacgccctcttggacttccagaatctgtataaaacagacatacggatctttcccactgatttggtgaagaggacggtggaatccatgtctgcccctgagtgggagggggctgagcaggcgccggagctgatgaggctcatcagcgagatcctggacaagccgcacgaggcctcgaagctggacgaccacgtgaagaagttcaagctgcccaagaagcacatgcagctgggcgacttcatgaagcgggtccaggagtcagggatcgtgaaggacgccagcatcatacaccggctgttcgaggccttgactgtaggacaggagaaacaaatcgacccagaaacattcaaagatttctacaactgctggaaggagacggaagcagaagcccaggaggtcagtctgccgtggctggtgatggaacacctggataaaaacgagtgtgtgtgtaagttgtccagctccgtcaagacaaacctaggcgttggcaagatcgccatgacccagaagcgcctgttcctcctaaccgaaggaaggccaggctacttggagatttccaccttcagaaatatagaggaggtcaggagaaccactactacatttctacttcggagaatacccactttaaaaatcagagtggcgtccaagaaagaagtcttcgaagccaacctgaaaaccgagtgtgacctttggcacctgatggtgaaggagatgtgggctgggaagaagctggccgatgaccacaaggaccctcactacgtccagcaggcgctgaccaacgtcttgctgatggacgccgtcgtgggcacactgcagtcaccaggcgccatctacgctgcctccaagttatcctactttgataagatgagtaacgaaatgcccatgacgcttccggagacaaccctggaaacactgaagcataaaatcaacccctcggcgggggaggcgttcccacaagcggtggacgtgctgctctacactccagggcatcttgacccagccgaaaaagttgaagatgctcaccccaagttatggtgtgctctgagcgaaggcaaggtgaccgtgttcaatgcttcttcatggaccatccaccagcactcctttaaagtgggcactgcaaaagtgaactgcatggtgatggccgaccagcccactgctccagtgtcacggatttgattgtgcaggacggacaggaggcacccagcaacgtgtactcgtgcagcatggacggcatggtgctggtgtggaatgtgagcacactgcaggtgaccagccgcttccagctgccgcgaggtggcctgacgtccatcagactgcacggcggccgcctgtggtgctgcacaggtaacagcatcatggtcatgaaaatgaatggatccctccatcaagaattgaagattgaggagaacttcaaagacaccagtacctccttcctggccttccagctccttcctgaggaggagcagctgtgggcggcctgtgcaggacgcagcgaggtttacatctggagcctgaaggacctggcccagcccccgcagagggtgcccctcgaggactgctctgagatcaactgcatgatccgggtgaagaagcaggtctgggtgggcagccgagggctggggcagggaacacccaaggggaaaatctacgtgattgacgccgagaggaagaccgtggagaaggagctggtggcgcacatggacaccgtgaggacgctgtgctcggctgaggacagatacgtgctgagtgggtcgggcagggaggaggggaaagtcgccatttggaaaggcgaataaacgtggctgagtctgccaagtggaactgtgccctatgtgtggggactggctgccccctagagcctgccaggagcagaagcctggaggggtggcagggcagagcagcccaggctcagcatggagcccacttaccgtgtggccagccgcgagacccatggccacgcaccttctctcaggccttcgggccccctggttaaactgcaccaagggtgtttcctgttggggtgtgtctcaggcaggcagctgcgtcttgttggtgataacctctgctgggaggttactttgttgcctagaaagttctggaatccacaaccaggggctggcactggagccagcagcttggccgagtcacaggtgacccgtggccctcacgtctctggttttacctttccttacttcattcattcactcacccagtccttacgaatcaccgaggaacactgggctgagcacatgacagggagcctggagccccggggcctccagcgaggcctgagaagggtggttcgggtaaccactgtgggctctctcccatcacagaaggtggacagggcctacccaggtggaggggaccaccctgcgatcaggtgtttgcgacaggggttgggccagctgaggcaagctgtcttttttcccttttctttttaatagatgcaacatttttataataatcctagagaccttttttctaccaaagatcacagaccagaaaaagttccatctaaaatatcatgcccaggaaagcacatgggatcaaaagtaaaatagcatcatgtgtgatctcgtcttccagcgtgccgctcagttccccgaatccgtgtgcacacgtgtgatctcgtcttcagtgtgccgctcagttccctgaatccgtgtgcacactgcgtatgtgtacgcgcagatgctatactgaactcaacaagatcttggctgtacataaatatttgtaaaagagaccctttgcacctttttactgtaatgttgagacttcattacttaaatgttctacggaaggttctggtgtggttgttggagccggagggagcgtgtcagcacgtgctgagggcatggggcctgccccctgggcacccatccacaagctgggccacggagctccagcttctcaggacaaagccccggggctggcgcatcctgagggtctctgggggtgtttgccaggctcctgggatgggccgctttcagaagccctgcagtgcctccagatggaaaggcgggcccggcctccggttgggtctgcattttggagagtccacaccacggaccaggttttcccccaaggcttggctttgtgtagctactaacttcttggggcattctgagagtgtgggcagagagaattatgtggcctcatcctcccccaaggctgtgcttgcagcccgggcaccttcccactttctagctctggagaggttggattttgcttttgtaaacacatgaatccttatgataaaagtctgtcagtcaaaaatacatttataaattatttaatgccagtcctcatgtaacctcaggtatcttcagcttgtggagaataaatctggtttaataaa

SEQ ID NO: 61500 - DNA, 5877 bp, Homo sapiens
aggcggcgcggctggtccccaggggtctgcgggcgactgcgcggctgaggcgcccgagtgcggtactggcggcgggcggcgggcagccatggcggaggccgcgtcgccgcacttgtcgctgccctcggggctgctggagctctgcgcgctgctgggcgccccccgggacagtctccgaagtctcgagcaggttgcttataaaaagggagtcaaacatctttctgctcttcttgatccagaggtcctgtccattttcgtgcctccttttatcagtaaagaggacagtcaaacggccggtgccaactgcggcactctcggtaaaacccggatgcgctccttgagaaagaagagagagaagcccagaccagagcagtggaagggcctcccggggccccccagagcgccagagcctgaggatgtcgccgtcccgggcggcgtggacctcctcaccctgccgcagctgtgcttcccagggggtgtgtgcgtggccactgaacctaaggaggattgcgtccacttcctggtgctgaccgatgtctgcgggaataggacctatggcgtggtggcccagtactaccggcccctgcatgatgagtactgtttctacaatggcaaaacgcaccgggagtgtcctggctgcttcgtgcccttcgcggtgtgcgtggtctccaggtttccctattacaactccctcaaggactgcctttcctgtttattggctcttctgaagccctgtaaagattttgaagtggacagtcatataaaagatttcgctgcgaagctgtctttaatacccagcccgccacctggaccgctccatttggtatttaacatgaagtcgctccagattgtgttacctgcccgagcagaccccgaaagccccatcctggacctggaccttcacctgcccttgctgtgcttcaggcctgagaaggtgctacagatcctgacatgcatcctgacggaacagcggatcgtcttcttctcctcggactgggctctgctgacgctggtcactgagtgcttcatggcctacctgtatccgctgcagtggcagcaccccttcgtgcccatcctgtcggaccagatgctggatttcgtcatggcccccacgtccttcctgatgggctgccatctcgaccacttcgaagaagtcagcaaggaagccgacggtttagttctgataaatattgatcatgggagcatcacctactccaagtccacggacgataacgtggacattcctgatgtccccctcctggcagcccagacgtttattcagagggtgcagagcctccagctccaccatgagctgcacgccgcccacctcctctccagcacagacctgaaggagggccgagcccaccggcggtcctggcagcagaaactcaactgccagatacagcagaccaccctgcagctgctcgtgagcatcttcagggatgtaaagaatcatttaaactatgaacacagagtctttaatagtgaagaatttctcaaaaccagggctccaggggaccatcagttttataagcaggtcttagacacctacatgttccattcttttcttaaagcccggctcaataggaggatggacgcctttgctcagatggacctcgacacccagtcggaggaggacagaataaatggaatgcttctaagtccaaggagaccgaccgttgagaaaagagcctcccggaagtcctcgcacctgcatgtcacccacaggcgcatggtggtcagcatgcccaacctgcaggacattgccatgcctgagctggcacccaggaactcctcgctccggctgacggacaccgcaggctgtaggggcagcagcgcagttctgaatgtcacgccgaagtccccgtatacattcaagattcccgaaatccactttccgctggagagcaagtgcgtgcaggcataccatgcccactttgtctccatgctgagcgaggccatgtgctttctggcccccgataactctctgctcctggcccgctatttgtacctccgagggctcgtttatctgatgcagggacagctgctgaacgccctcttggacttccagaatctgtataaaacagacatacggatctttcccactgatttggtgaagaggacggtggaatccatgtctgcccctgagtgggagggggctgagcaggcgccggagctgatgaggctcatcagcgagatcctggacaagccgcacgaggcctcgaagctggacgaccacgtgaagaagttcaagctgcccaagaagcacatgcagctgggcgacttcatgaagcgggtccaggagtcagggatcgtgaaggacgccagcatcatacaccggctgttcgaggccttgactgtaggacaggagaaacaaatcgacccagaaacattcaaagatttctacaactgctggaaggagacggaagcagaagcccaggaggtcagtctgccgtggctggtgatggaacacctggataaaaacgagtgtgtgtgtaagttgtccagctccgtcaagacaaacctaggcgttggcaagatcgccatgacccagaagcgcctgttcctcctaaccgaaggaaggccaggctacttggagatttccaccttcagaaatatagaggaggtcaggagaaccactactacatttctacttcggagaatacccactttaaaaatcagagtggcgtccaagaaagaagtcttcgaagccaacctgaaaaccgagtgtgacctttggcacctgatggtgaaggagatgtgggctgggaagaagctggccgatgaccacaaggaccctcactacgtccagcaggcgctgaccaacgtcttgctgatggacgccgtcgtgggcacactgcagtcaccaggcgccatctacgctgcctccaagttatcctactttgataagatgagtaacgaaatgcccatgacgcttccggagacaaccctggaaacactgaagcataaaatcaacccctcggcgggggaggcgttcccacaagcggtggacgtgctgctctacactccagggcatcttgacccagccgaaaaagttgaagatgctcaccccaagttatggtgtgctctgagcgaaggcaaggtgaccgtgttcaatgcttcttcatggaccatccaccagcactcctttaaagtgggcactgcaaaagtgaactgcatggtgatggccgaccagaaccaggtgtgggttggctcggaagactccgtcatctacatcatcaacgtccacagcatgtcctgcaacaagcagctcacagcccactgctccagtgtcacggatttgattgtgcaggacggacaggaggcacccagcaacgtgtactcgtgcagcatggacggcatggtgctggtgtggaatgtgagcacactgcaggtgaccagccgcttccagctgccgcgaggtggcctgacgtccatcagactgcacggcggccgcctgtggtgctgcacaggtaacagcatcatggtcatgaaaatgaatggatccctccatcaagaattgaagattgaggagaacttcaaagacaccagtacctccttcctggccttccagctccttcctgaggaggagcagctgtgggcggcctgtgcaggacgcagcgaggtttacatctggagcctgaaggacctggcccagcccccgcagagggtgcccctcgaggactgctctgagatcaactgcatgatccgggtgaagaagcaggtctgggtgggcagccgagggctggggcagggaacacccaaggggaaaatctacgtgattgacgccgagaggaagaccgtggagaaggagctggtggcgcacatggacaccgtgaggacgctgtgctcggctgaggacagatacgtgctgagtgggtcgggcagggaggaggggaaagtcgccatttggaaaggcgaataaacgtggctgagtctgccaagtggaactgtgccctatgtgtggggactggctgccccctagagcctgccaggagcagaagcctggaggggtggcagggcagagcagcccaggctcagcatggagcccacttaccgtgtggccagccgcgagacccatggccacgcaccttctctcaggccttcgggccccctggttaaactgcaccaagggtgtttcctgttggggtgtgtctcaggcaggcagctgcgtcttgttggtgataacctctgctgggaggttactttgttgcctagaaagttctggaatccacaaccaggggctggcactggagccagcagcttggccgagtcacaggtgacccgtggccctcacgtctctggttttacctttccttacttcattcattcactcacccagtccttacgaatcaccgaggaacactgggctgagcacatgacagggagcctggagccccggggcctccagcgaggcctgagaagggtggttcgggtaaccactgtgggctctctcccatcacagaaggtggacagggcctacccaggtggaggggaccaccctgcgatcaggtgtttgcgacaggggttgggccagctgaggcaagctgtcttttttcccttttctttttaatagatgcaacatttttataataatcctagagaccttttttctaccaaagatcacagaccagaaaaagttccatctaaaatatcatgcccaggaaagcacatgggatcaaaagtaaaatagcatcatgtgtgatctcgtcttccagcgtgccgctcagttccccgaatccgtgtgcacacgtgtgatctcgtcttcagtgtgccgctcagttccctgaatccgtgtgcacactgcgtatgtgtacgcgcagatgctatactgaactcaacaagatcttggctgtacataaatatttgtaaaagagaccctttgcacctttttactgtaatgttgagacttcattacttaaatgttctacggaaggttctggtgtggttgttggagccggagggagcgtgtcagcacgtgctgagggcatggggcctgccccctgggcacccatccacaagctgggccacggagctccagcttctcaggacaaagccccggggctggcgcatcctgagggtctctgggggtgtttgccaggctcctgggatgggccgctttcagaagccctgcagtgcctccagatggaaaggcgggcccggcctccggttgggtctgcattttggagagtccacaccacggaccaggttttcccccaaggcttggctttgtgtagctactaacttcttggggcattctgagagtgtgggcagagagaattatgtggcctcatcctcccccaaggctgtgcttgcagcccgggcaccttcccactttctagctctggagaggttggattttgcttttgtaaacacatgaatccttatgataaaagtctgtcagtcaaaaatacatttataaattatttaatgccagtcctcatgtaacctcaggtatcttcagcttgtggagaataaatctggtttaataaaaaaaaaaaatccggctccttacttcatccaacagtgacggggggaaggtcttgaaaatgacccgggaccattctgaacgtgctccttcctcactctaggcaccggtcacgttaccttaatgcagactcttcatgtcttttctccatggtgataatttcaagatcttacttgacagtgattgattgattgcgttttaggaaatggtcactcatataaaagagaaaacaggtgaacagaggtgctaaccagggagtaaatgtgctgggcaggcctgggttccatgtttattctgtgttatgcaaacagaatcctggccagtggagtttattgaaatggaaagggcactttgatgccttcgattttttcccctgtgctttggagaga

SEQ ID NO: 61501 - DNA, 4117 bp, Homo sapiens
aggcggcgcggctggtccccaggggtctgcgggcgactgcgcggctgaggcgcccgagtgcggtactggcggcgggcggcgggcagccatggcggaggccgcgtcgccgcacttgtcgctgccctcggggctgctggagctctgcgcgctgctgggcgccccccgggacagtctccgaagtctcgagcaggttgcttataaaaagggagtcaaacatctttctgctcttcttgatccagaggtcctgtccattttcgtgcctccttttatcagtaaagaggacagtcaaacggccggtgccaactgcggcactctcggtaaaacccggatgcgctccttgagaaagaagagagagaagcccagaccagagcagtggaagggcctcccggggccccccagagcgccagagcctgaggatgtcgccgtcccgggcggcgtggacctcctcaccctgccgcagctgtgcttcccagggggtgtgtgcgtggccactgaacctaaggaggattgcgtccacttcctggtgctgaccgatgtctgcgggaataggacctatggcgtggtggcccagtactaccggcccctgcatgatgagtactgtttctacaatggcaaaacgcaccgggagtgtcctggctgcttcgtgcccttcgcggtgtgcgtggtctccaggtttccctattacaactccctcaaggactgcctttcctgtttattggctcttctgaagccctgtaaagattttgaagtggacagtcatataaaagatttcgctgcgaagctgtctttaatacccagcccgccacctggaccgctccatttggtatttaacatgaagtcgctccagattgtgttacctgcccgagcagaccccgaaagccccatcctggacctggaccttcacctgcccttgctgtgcttcaggcctgagaaggtgctacagatcctgacatgcatcctgacggaacagcggatcgtcttcttctcctcggactgggctctgctgacgctggtcactgagtgcttcatggcctacctgtatccgctgcagtggcagcaccccttcgtgcccatcctgtcggaccagatgctggatttcgtcatggcccccacgtccttcctgatgggctgccatctcgaccacttcgaagaagtcagcaaggaagccgacggtttagttctgataaatattgatcatgggagcatcacctactccaagtccacggacgataacgtggacattcctgatgtccccctcctggcagcccagacgtttattcagagggtgcagagcctccagctccaccatgagctgcacgccgcccacctcctctccagcacagacctgaaggagggccgagcccaccggcggtcctggcagcagaaactcaactgccagatacagcagaccaccctgcagctgctcgtgagcatcttcagggatgtaaagaatcatttaaactatgaacacagagtctttaatagtgaagaatttctcaaaaccagggctccaggggaccatcagttttataagcaggtcttagacacctacatgttccattcttttcttaaagcccggctcaataggaggatggacgcctttgctcagatggacctcgacacccagtcggaggaggacagaataaatggaatgcttctaagtccaaggagaccgaccgttgagaaaagagcctcccggaagtcctcgcacctgcatgtcacccacaggcgcatggtggtcagcatgcccaacctgcaggacattgccatgcctgagctggcacccaggaactcctcgctccggctgacggacaccgcaggctgtaggggcagcagcgcagttctgaatgtcacgccgaagtccccgtatacattcaagattcccgaaatccactttccgctggagagcaagtgcgtgcaggcataccatgcccactttgtctccatgctgagcgagcaacgtgtactcgtgcagcatggacggcatggtgctggtgtggaatgtgagcacactgcaggtgaccagccgcttccagctgccgcgaggtggcctgacgtccatcagactgcacggcggccgcctgtggtgctgcacaggtaacagcatcatggtcatgaaaatgaatggatccctccatcaagaattgaagattgaggagaacttcaaagacaccagtacctccttcctggccttccagctccttcctgaggaggagcagctgtgggcggcctgtgcaggacgcagcgaggtttacatctggagcctgaaggacctggcccagcccccgcagagggtgcccctcgaggactgctctgagatcaactgcatgatccgggtgaagaagcaggtctgggtgggcagccgagggctggggcagggaacacccaaggggaaaatctacgtgattgacgccgagaggaagaccgtggagaaggagctggtggcgcacatggacaccgtgaggacgctgtgctcggctgaggacagatacgtgctgagtgggtcgggcagggaggaggggaaagtcgccatttggaaaggcgaataaacgtggctgagtctgccaagtggaactgtgccctatgtgtggggactggctgccccctagagcctgccaggagcagaagcctggaggggtggcagggcagagcagcccaggctcagcatggagcccacttaccgtgtggccagccgcgagacccatggccacgcaccttctctcaggccttcgggccccctggttaaactgcaccaagggtgtttcctgttggggtgtgtctcaggcaggcagctgcgtcttgttggtgataacctctgctgggaggttactttgttgcctagaaagttctggaatccacaaccaggggctggcactggagccagcagcttggccgagtcacaggtgacccgtggccctcacgtctctggttttacctttccttacttcattcattcactcacccagtccttacgaatcaccgaggaacactgggctgagcacatgacagggagcctggagccccggggcctccagcgaggcctgagaagggtggttcgggtaaccactgtgggctctctcccatcacagaaggtggacagggcctacccaggtggaggggaccaccctgcgatcaggtgtttgcgacaggggttgggccagctgaggcaagctgtcttttttcccttttctttttaatagatgcaacatttttataataatcctagagaccttttttctaccaaagatcacagaccagaaaaagttccatctaaaatatcatgcccaggaaagcacatgggatcaaaagtaaaatagcatcatgtgtgatctcgtcttccagcgtgccgctcagttccccgaatccgtgtgcacacgtgtgatctcgtcttcagtgtgccgctcagttccctgaatccgtgtgcacactgcgtatgtgtacgcgcagatgctatactgaactcaacaagatcttggctgtacataaatatttgtaaaagagaccctttgcacctttttactgtaatgttgagacttcattacttaaatgttctacggaaggttctggtgtggttgttggagccggagggagcgtgtcagcacgtgctgagggcatggggcctgccccctgggcacccatccacaagctgggccacggagctccagcttctcaggacaaagccccggggctggcgcatcctgagggtctctgggggtgtttgccaggctcctgggatgggccgctttcagaagccctgcagtgcctccagatggaaaggcgggcccggcctccggttgggtctgcattttggagagtccacaccacggaccaggttttcccccaaggcttggctttgtgtagctactaacttcttggggcattctgagagtgtgggcagagagaattatgtggcctcatcctcccccaaggctgtgcttgcagcccgggcaccttcccactttctagctctggagaggttggattttgcttttgtaaacacatgaatccttatgataaaagtctgtcagtcaaaaatacatttataaattatttaatgccagtcctcatgtaacctcaggtatcttcagcttgtggagaataaatctggtttaataaa

SEQ ID NO: 61502 - DNA, 2680 bp, Homo sapiens
agcatggagctccctaagcacaaggaggcggtgacgtgtcttgcagagaaaatgcatgtgtgagatgagcttggttcaggccgcagtgacagtgctggcggccgtgggtttcgtgttaatgaatcaatcatacgtagtcaataaggtgtctgtgaacagagcacgcggagaacaaggttatgcactgatgggtggatgacaacgtcagggccagaggctcccaggaccctgagccggcgtgtcccctaggagcagtggttccatatccgctaattcagcacgtgcagtaaatgtatagaatatgacttcaccagtatcgagactgactgatttctcacgttcccgtggcctcctgttagaactgcatggtgatggccgaccagaaccaggtgtgggttggctcggaagactccgtcatctacatcatcaacgtccacagcatgtcctgcaacaagcagctcacagcccactgctccagtgtcacggatttgattgtgcaggacggacaggaggcacccagcaacgtgtactcgtgcagcatggacggcatggtgctggtgtggaatgtgagcacactgcaggtgaccagccgcttccagctgccgcgaggtggcctgacgtccatcagactgcacggcggccgcctgtggtgctgcacaggtaacagcatcatggtcatgaaaatgaatggatccctccatcaagaattgaagattgaggagaacttcaaagacaccagtacctccttcctggccttccagctccttcctgaggaggagcagctgtgggcggcctgtgcaggacgcagcgaggtttacatctggagcctgaaggacctggcccagcccccgcagagggtgcccctcgaggactgctctgagatcaactgcatgatccgggtgaagaagcaggtctgggtgggcagccgagggctggggcagggaacacccaaggggaaaatctacgtgattgacgccgagaggaagaccgtggagaaggagctggtggcgcacatggacaccgtgaggacgctgtgctcggctgaggacagatacgtgctgagtgggtcgggcagggaggaggggaaagtcgccatttggaaaggcgaataaacgtggctgagtctgccaagtggaactgtgccctatgtgtggggactggctgccccctagagcctgccaggagcagaagcctggaggggtggcagggcagagcagcccaggctcagcatggagcccacttaccgtgtggccagccgcgagacccatggccacgcaccttctctcaggccttcgggccccctggttaaactgcaccaagggtgtttcctgttggggtgtgtctcaggcaggcagctgcgtcttgttggtgataacctctgctgggaggttactttgttgcctagaaagttctggaatccacaaccaggggctggcactggagccagcagcttggccgagtcacaggtgacccgtggccctcacgtctctggttttacctttccttacttcattcattcactcacccagtccttacgaatcaccgaggaacactgggctgagcacatgacagggagcctggagccccggggcctccagcgaggcctgagaagggtggttcgggtaaccactgtgggctctctcccatcacagaaggtggacagggcctacccaggtggaggggaccaccctgcgatcaggtgtttgcgacaggggttgggccagctgaggcaagctgtcttttttcccttttctttttaatagatgcaacatttttataataatcctagagaccttttttctaccaaagatcacagaccagaaaaagttccatctaaaatatcatgcccaggaaagcacatgggatcaaaagtaaaatagcatcatgtgtgatctcgtcttccagcgtgccgctcagttccccgaatccgtgtgcacacgtgtgatctcgtcttcagtgtgccgctcagttccctgaatccgtgtgcacactgcgtatgtgtacgcgcagatgctatactgaactcaacaagatcttggctgtacataaatatttgtaaaagagaccctttgcacctttttactgtaatgttgagacttcattacttaaatgttctacggaaggttctggtgtggttgttggagccggagggagcgtgtcagcacgtgctgagggcatggggcctgccccctgggcacccatccacaagctgggccacggagctccagcttctcaggacaaagccccggggctggcgcatcctgagggtctctgggggtgtttgccaggctcctgggatgggccgctttcagaagccctgcagtgcctccagatggaaaggcgggcccggcctccggttgggtctgcattttggagagtccacaccacggaccaggttttcccccaaggcttggctttgtgtagctactaacttcttggggcattctgagagtgtgggcagagagaattatgtggcctcatcctcccccaaggctgtgcttgcagcccgggcaccttcccactttctagctctggagaggttggattttgcttttgtaaacacatgaatccttatgataaaagtctgtcagtcaaaaatacatttataaattatttaatgccagtcctcatgtaacctcaggtatcttcagcttgtggagaataaatctggtttaataaa

SEQ ID NO: 61503 - DNA, 2475 bp, Homo sapiens
agaagcatatatcatagttagtaggaggagggtgatcggttaaggttgcatatgcaattcttagagcaaccagtgaaaaataaaacaaaaatataatgcttaaaaacagtaaagaagcttacaacagtatcaagtgtggtactcccaataatacattctttaagatttttgcttaagcagtcaatgatctttcaagaaagttaagaaaaattaagaaactgcccatatatttacgttttctggtgagcctcatttcttcttaaagacccagggttctagcttgcattttttcccagtagacctcacctgtgcattcctcaggcgccaggtggcacgtggtgatcccccccatcaccacgctggaaagagcagtgaggccggctctggtgctggcgtcttatgttgccaatgacactgcctggccccatcctagctccttccttccacaggcacaggtaacagcatcatggtcatgaaaatgaatggatccctccatcaagaattgaagattgaggagaacttcaaagacaccagtacctccttcctggccttccagctccttcctgaggaggagcagctgtgggcggcctgtgcaggacgcagcgaggtttacatctggagcctgaaggacctggcccagcccccgcagagggtgcccctcgaggactgctctgagatcaactgcatgatccgggtgaagaagcaggtctgggtgggcagccgagggctggggcagggaacacccaaggggaaaatctacgtgattgacgccgagaggaagaccgtggagaaggagctggtggcgcacatggacaccgtgaggacgctgtgctcggctgaggacagatacgtgctgagtgggtcgggcagggaggaggggaaagtcgccatttggaaaggcgaataaacgtggctgagtctgccaagtggaactgtgccctatgtgtggggactggctgccccctagagcctgccaggagcagaagcctggaggggtggcagggcagagcagcccaggctcagcatggagcccacttaccgtgtggccagccgcgagacccatggccacgcaccttctctcaggccttcgggccccctggttaaactgcaccaagggtgtttcctgttggggtgtgtctcaggcaggcagctgcgtcttgttggtgataacctctgctgggaggttactttgttgcctagaaagttctggaatccacaaccaggggctggcactggagccagcagcttggccgagtcacaggtgacccgtggccctcacgtctctggttttacctttccttacttcattcattcactcacccagtccttacgaatcaccgaggaacactgggctgagcacatgacagggagcctggagccccggggcctccagcgaggcctgagaagggtggttcgggtaaccactgtgggctctctcccatcacagaaggtggacagggcctacccaggtggaggggaccaccctgcgatcaggtgtttgcgacaggggttgggccagctgaggcaagctgtcttttttcccttttctttttaatagatgcaacatttttataataatcctagagaccttttttctaccaaagatcacagaccagaaaaagttccatctaaaatatcatgcccaggaaagcacatgggatcaaaagtaaaatagcatcatgtgtgatctcgtcttccagcgtgccgctcagttccccgaatccgtgtgcacacgtgtgatctcgtcttcagtgtgccgctcagttccctgaatccgtgtgcacactgcgtatgtgtacgcgcagatgctatactgaactcaacaagatcttggctgtacataaatatttgtaaaagagaccctttgcacctttttactgtaatgttgagacttcattacttaaatgttctacggaaggttctggtgtggttgttggagccggagggagcgtgtcagcacgtgctgagggcatggggcctgccccctgggcacccatccacaagctgggccacggagctccagcttctcaggacaaagccccggggctggcgcatcctgagggtctctgggggtgtttgccaggctcctgggatgggccgctttcagaagccctgcagtgcctccagatggaaaggcgggcccggcctccggttgggtctgcattttggagagtccacaccacggaccaggttttcccccaaggcttggctttgtgtagctactaacttcttggggcattctgagagtgtgggcagagagaattatgtggcctcatcctcccccaaggctgtgcttgcagcccgggcaccttcccactttctagctctggagaggttggattttgcttttgtaaacacatgaatccttatgataaaagtctgtcagtcaaaaatacatttataaattatttaatgccagtcctcatgtaacctcaggtatcttcagcttgtggagaataaatctggtttaataaa

SEQ ID NO: 61504 - DNA, 5089 bp, Homo sapiens
aggcggcgcggctggtccccaggggtctgcgggcgactgcgcggctgaggcgcccgagtgcggtactggcggcgggcggcgggcagccatggcggaggccgcgtcgccgcacttgtcgctgccctcggggctgctggagctctgcgcgctgctgggcgccccccgggacagtctccgaagtctcgagcaggttgcttataaaaagggagtcaaacatctttctgctcttcttgatccagaggtcctgtccattttcgtgcctccttttatcagtaaagaggacagtcaaacggccggtgccaactgcggcactctcggtaaaacccggatgcgctccttgagaaagaagagagagaagcccagaccagagcagtggaagggcctcccggggccccccagagcgccagagcctgaggatgtcgccgtcccgggcggcgtggacctcctcaccctgccgcagctgtgcttcccagggggtgtgtgcgtggccactgaacctaaggaggattgcgtccacttcctggtgctgaccgatgtctgcgggaataggacctatggcgtggtggcccagtactaccggcccctgcatgatgagtactgtttctacaatggcaaaacgcaccgggagtgtcctggctgcttcgtgcccttcgcggtgtgcgtggtctccaggtttccctattacaactccctcaaggactgcctttcctgtttattggctcttctgaagccctgtaaagattttgaagtggacagtcatataaaagatttcgctgcgaagctgtctttaatacccagcccgccacctggaccgctccatttggtatttaacatgaagtcgctccagattgtgttacctgcccgagcagaccccgaaagccccatcctggacctggaccttcacctgcccttgctgtgcttcaggcctgagaaggtgctacagatcctgacatgcatcctgacggaacagcggatcgtcttcttctcctcggactgggctctgctgacgctggtcactgagtgcttcatggcctacctgtatccgctgcagtggcagcaccccttcgtgcccatcctgtcggaccagatgctggatttcgtcatggcccccacgtccttcctgatgggctgccatctcgaccacttcgaagaagtcagcaaggaagccgacggtttagttctgataaatattgatcatgggagcatcacctactccaagtccacggacgataacgtggacattcctgatgtccccctcctggcagcccagacgtttattcagagggtgcagagcctccagctccaccatgagctgcacgccgcccacctcctctccagcacagacctgaaggagggccgagcccaccggcggtcctggcagcagaaactcaactgccagatacagcagaccaccctgcagctgctcgtgagcatcttcagggatgtaaagaatcatttaaactatgaacacagagtctttaatagtgaagaatttctcaaaaccagggctccaggggaccatcagttttataagcaggtcttagacacctacatgttccattcttttcttaaagcccggctcaataggaggatggacgcctttgctcagatggacctcgacacccagtcggaggaggacagaataaatggaatgcttctaagtccaaggagaccgaccgttgagaaaagagcctcccggaagtcctcgcacctgcatgtcacccacaggcgcatggtggtcagcatgcccaacctgcaggacattgccatgcctgagctggcacccaggaactcctcgctccggctgacggacaccgcaggctgtaggggcagcagcgcagttctgaatgtcacgccgaagtccccgtatacattcaagattcccgaaatccactttccgctggagagcaagtgcgtgcaggcataccatgcccactttgtctccatgctgagcgaggccatgtgctttctggcccccgataactctctgctcctggcccgctatttgtacctccgagggctcgtttatctgatgcagggacagctgctgaacgccctcttggacttccagaatctgtataaaacagacatacggatctttcccactgatttggtgaagaggacggtggaatccatgtctgcccctgagtgggagggggctgagcaggcgccggagctgatgaggctcatcagcgagatcctggacaagccgcacgaggcctcgaagctggacgaccacgtgaagaagttcaagctgcccaagaagcacatgcagctgggcgacttcatgaagcgggtccaggagtcagggatcgtgaaggacgccagcatcatacaccggctgttcgaggccttgactgtaggacaggagaaacaaatcgacccagaaacattcaaagatttctacaactgctggaaggagacggaagcagaagcccaggaggtcagtctgccgtggctggtgatggaacacctggataaaaacgagtgtgtgtgtaagttgtccagctccgtcaagacaaacctaggcgttggcaagatcgccatgacccagaagcgcctgttcctcctaaccgaaggaaggccaggctacttggagatttccaccttcagaaatatagaggaggtcaggagaaccactactacatttctacttcggagaatacccactttaaaaatcagagtggcgtccaagaaagaagtcttcgaagccaacctgaaaaccgagtgtgacctttggcacctgatggtgaaggagatgtgggctgggaagaagctggccgatgaccacaaggaccctcactacgtccagcaggcgctgaccaacgtcttgctgatggacgccgtcgtgggcacactgcagtcaccaggcgccatctacgctgcctccaagttatcctactttgataagatgagtaacgaaatgcccatgacgcttccggagacaaccctggaaacactgaagcataaaatcaacccctcggcgggggaggcgttcccacaagcggtggacgtgctgctctacactccagggcatcttgacccagccgaaaaagttgaagatgctcaccccaagttatggtgtgctctgagcgaaggcaaggtgaccgtgttcaatgcttcttcatggaccatccaccagcactcctttaaagtgggcactgcaaaagtgaactgcatggtgatggccgaccagaaccaggtgtgggttggctcggaagactccgtcatctacatcatcaacgtccacagcatgtcctgcaacaagcagctcacagcccactgctccagtgtcacggatttgattgtgcaggacggacaggaggcacccagcaacgtgtactcgtgcagcatggacggcatggtgctggtgtggaatgtgagcacactgcaggtgaccagccgcttccagctgccgcgaggtggcctgacgtccatcagactgcacggcggccgcctgtggtgctgcacaggtaacagcatcatggtcatgaaaatgaatggatccctccatcaagaattgaagattgaggagaacttcaaagacaccagtacctccttcctggccttccagctccttcctgaggaggagcagctgtgggcggcctgtgcaggacgcagcgaggtttacatctggagcctgaaggacctggcccagcccccgcagagggtgcccctcgaggactgctctgagatcaactgcatgatccgggtgaagaagcaggtagggtggagggcccgccatccccagcatccccggcaggtctcgcttgccctggccgcatccccatgctcccgagagccagccacacgcccttgtgccctcctgccttcgcctctcagggctcccctcctaacaggcacgtgcagggttggtgccaacgggcccacaggtcaccatgtgctggtttcatggtgtggtccaagcactccacagcgcattcccccaaactggatggcttcaaatgacagaacttaattttctcacagttctcgacgctggaggtccaaaaccaaggtgtcggcagagccgcttccctcgggggctcggggggagcgtgcactccaggcccttctctcccccacccgctcatgtggccgccgtccttggcgtgccctggctgtggacgtggcactctaacctgtgcctgcaccacatggcactctctctccctgtgtgtgtctcttatggggatgctggtcgtactggattaaccagtgtgaccacatctgaactatctgcagactctacttccaaagaagctcacattctgaggttcagaggatatggatttggggggacactgttcaacccattacagtctgccctctggccccctaaatccacatctgttccacatgcaaaatacaccccctccatcactacatcccccgaagtcccagtccctccagtgtcagttctgagccccaaatctccaagtgaagccaaagccctccgatgtgggtgagccgtgggcgggtcccacctggggcagaaccaacccctcttgcaccgtgaacctgcgcagctagaacaggctgtctcttcccaaaacacaaggctgggccaggcagaggttagacattctcatccgaaaagggagaaattggaaggaaagctggacttccaggccccgagcaagtcggagacacggcgggggtggggcggaattcgtttagtgttttcccccataacttaattggggtataattgatgaataaaaattatatatatctaaggtatacaaggtgatatttcagtatacattgtgaaataatcacaagctaattaccatatctgtcacctcacacaggtggctgttgtttggtgagaacacttaagatgcaccccagcacttttccagcacgcagtgcagtcttcttccccagaggcccctcggccattaggttctaagcccgagaagggtcctgtgcaggacgcagcgaggtttacatctggagcctgaaggccctggcccagcccccgcagagggtgcccctcgaggactgctctgagatcaactgcatgatccgggtgaagaagcaggtagggtggagggcccgcatccccagcatccccggcaggtct

SEQ ID NO: 61505 - DNA, 4849 bp, Homo sapiens
aggcggcgcggctggtccccaggggtctgcgggcgactgcgcggctgaggcgcccgagtgcggtactggcggcgggcggcgggcagccatggcggaggccgcgtcgccgcacttgtcgctgccctcggggctgctggagctctgcgcgctgctgggcgccccccgggacagtctccgaagtctcgagcaggttgcttataaaaagggagtcaaacatctttctgctcttcttgatccagaggtcctgtccattttcgtgcctccttttatcagtaaagaggacagtcaaacggccggtgccaactgcggcactctcggtaaaacccggatgcgctccttgagaaagaagagagagaagcccagaccagagcagtggaagggcctcccggggccccccagagcgccagagcctgaggatgtcgccgtcccgggcggcgtggacctcctcaccctgccgcagctgtgcttcccagggggtgtgtgcgtggccactgaacctaaggaggattgcgtccacttcctggtgctgaccgatgtctgcgggaataggacctatggcgtggtggcccagtactaccggcccctgcatgatgagtactgtttctacaatggcaaaacgcaccgggagtgtcctggctgcttcgtgcccttcgcggtgtgcgtggtctccaggtttccctattacaactccctcaaggactgcctttcctgtttattggctcttctgaagccctgtaaagattttgaagtggacagtcatataaaagatttcgctgcgaagctgtctttaatacccagcccgccacctggaccgctccatttggtatttaacatgaagtcgctccagattgtgttacctgcccgagcagaccccgaaagccccatcctggacctggaccttcacctgcccttgctgtgcttcaggcctgagaaggtgctacagatcctgacatgcatcctgacggaacagcggatcgtcttcttctcctcggactgggctctgctgacgctggtcactgagtgcttcatggcctacctgtatccgctgcagtggcagcaccccttcgtgcccatcctgtcggaccagatgctggatttcgtcatggcccccacgtccttcctgatgggctgccatctcgaccacttcgaagaagtcagcaaggaagccgacggtttagttctgataaatattgatcatgggagcatcacctactccaagtccacggacgataacgtggacattcctgatgtccccctcctggcagcccagacgtttattcagagggtgcagagcctccagctccaccatgagctgcacgccgcccacctcctctccagcacagacctgaaggagggccgagcccaccggcggtcctggcagcagaaactcaactgccagatacagcagaccaccctgcagctgctcgtgagcatcttcagggatgtaaagaatcatttaaactatgaacacagagtctttaatagtgaagaatttctcaaaaccagggctccaggggaccatcagttttataagcaggtcttagacacctacatgttccattcttttcttaaagcccggctcaataggaggatggacgcctttgctcagatggacctcgacacccagtcggaggaggacagaataaatggaatgcttctaagtccaaggagaccgaccgttgagaaaagagcctcccggaagtcctcgcacctgcatgtcacccacaggcgcatggtggtcagcatgcccaacctgcaggacattgccatgcctgagctggcacccaggaactcctcgctccggctgacggacaccgcaggctgtaggggcagcagcgcagttctgaatgtcacgccgaagtccccgtatacattcaagattcccgaaatccactttccgctggagagcaagtgcgtgcaggcataccatgcccactttgtctccatgctgagcgaggccatgtgctttctggcccccgataactctctgctcctggcccgctatttgtacctccgagggctcgtttatctgatgcagggacagctgctgaacgccctcttggacttccagaatctgtataaaacagacatacggatctttcccactgatttggtgaagaggacggtggaatccatgtctgcccctgagtgggagggggctgagcaggcgccggagctgatgaggctcatcagcgagatcctggacaagccgcacgaggcctcgaagctggacgaccacgtgaagaagttcaagctgcccaagaagcacatgcagctgggcgacttcatgaagcgggtccaggagtcagggatcgtgaaggacgccagcatcatacaccggctgttcgaggccttgactgtaggacaggagaaacaaatcgacccagaaacattcaaagatttctacaactgctggaaggagacggaagcagaagcccaggaggtcagtctgccgtggctggtgatggaacacctggataaaaacgagtgtgtgtgtaagttgtccagctccgtcaagacaaacctaggcgttggcaagatcgccatgacccagaagcgcctgttcctcctaaccgaaggaaggccaggctacttggagatttccaccttcagaaatatagaggaggtcaggagaaccactactacatttctacttcggagaatacccactttaaaaatcagagtggcgtccaagaaagaagtcttcgaagccaacctgaaaaccgagtgtgacctttggcacctgatggtgaaggagatgtgggctgggaagaagctggccgatgaccacaaggaccctcactacgtccagcaggcgctgaccaacgtcttgctgatggacgccgtcgtgggcacactgcagtcaccaggcgccatctacgctgcctccaagttatcctactttgataagatgagtaacgaaatgcccatgacgcttccggagacaaccctggaaacactgaagcataaaatcaacccctcggcgggggaggcgttcccacaagcggtggacgtgctgctctacactccagggcatcttgacccagccgaaaaagttgaagatgctcaccccaagttatggtgtgctctgagcgaaggcaaggtgaccgtgttcaatgcttcttcatggaccatccaccagcactcctttaaagtgggcactgcaaaagtgaactgcatggtgatggccgaccagaaccaggtgtgggttggctcggaagactccgtcatctacatcatcaacgtccacagcatgtcctgcaacaagcagctcacagcccactgctccagtgtcacggatttgattgtgcaggacggacaggaggcacccagcaacgtgtactcgtgcagcatggacggcatggtgctggtgtggaatgtgagcacactgcaggtgaccagccgcttccagctgccgcgaggtggcctgacgtccatcagactgcacggcggccgcctgtggtgctgcacaggtaacagcatcatggtcatgaaaatgaatggatccctccatcaagaattgaagattgaggagaacttcaaagacaccagtacctccttcctggccttccagctccttcctgaggaggagcagctgtgggcggcctgtgcaggacgcagcgaggtttacatctggagcctgaaggacctggcccagcccccgcagagggtgcccctcgaggactgctctgagatcaactgcatgatccgggtgaagaagcaggtagggtggagggcccgccatccccagcatccccggcaggtctcgcttgccctggccgcatccccatgctcccgagagccagccacacgcccttgtgccctcctgccttcgcctctcagggctcccctcctaacaggcacgtgcagggttggtgccaacgggcccacaggtcaccatgtgctggtttcatggtgtggtccaagcactccacagcgcattcccccaaactggatggcttcaaatgacagaacttaattttctcacagttctcgacgctggaggtccaaaaccaaggtgtcggcagagccgcttccctcgggggctcggggggagcgtgcactccaggcccttctctcccccacccgctcatgtggccgccgtccttggcgtgccctggctgtggacgtggcactctaacctgtgcctgcaccacatggcactctctctccctgtgtgtgtctcttatggggatgctggtcgtactggattaaccagtgtgaccacatctgaactatctgcagaagagaattatgtggcctcatcctcccccaaggctgtgcttgcagcccgggcaccttcccactttctagctctggagaggttggattttgcttttgtaaacacatgaatccttatgataaaagtctgtcagtcaaaaatacatttataaattatttaatgccagtcctcatgtaacctcaggtatcttcagcttgtggagaataaatctggtttaataaaaaaaaaaaatccggctccttacttcatccaacagtgacggggggaaggtcttgaaaatgacccgggaccattctgaacgtgctccttcctcactctaggcaccggtcacgttaccttaatgcagactcttcatgtcttttctccatggtgataatttcaagatcttacttgacagtgattgattgattgcgttttaggaaatggtcactcatataaaagagaaaacaggtgaacagaggtgctaaccagggagtaaatgtgctgggcaggcctgggttccatgtttattctgtgttatgcaaacagaatcctggccagtggagtttattgaaatggaaagggcactttgatgccttcgattttttcccctgtgctttggagaga

SEQ ID NO: 61506 - DNA, 4372 bp, Homo sapiens
aggcggcgcggctggtccccaggggtctgcgggcgactgcgcggctgaggcgcccgagtgcggtactggcggcgggcggcgggcagccatggcggaggccgcgtcgccgcacttgtcgctgccctcggggctgctggagctctgcgcgctgctgggcgccccccgggacagtctccgaagtctcgagcaggttgcttataaaaagggagtcaaacatctttctgctcttcttgatccagaggtcctgtccattttcgtgcctccttttatcagtaaagaggacagtcaaacggccggtgccaactgcggcactctcggtaaaacccggatgcgctccttgagaaagaagagagagaagcccagaccagagcagtggaagggcctcccggggccccccagagcgccagagcctgaggatgtcgccgtcccgggcggcgtggacctcctcaccctgccgcagctgtgcttcccagggggtgtgtgcgtggccactgaacctaaggaggattgcgtccacttcctggtgctgaccgatgtctgcgggaataggacctatggcgtggtggcccagtactaccggcccctgcatgatgagtactgtttctacaatggcaaaacgcaccgggagtgtcctggctgcttcgtgcccttcgcggtgtgcgtggtctccaggtttccctattacaactccctcaaggactgcctttcctgtttattggctcttctgaagccctgtaaagattttgaagtggacagtcatataaaagatttcgctgcgaagctgtctttaatacccagcccgccacctggaccgctccatttggtatttaacatgaagtcgctccagattgtgttacctgcccgagcagaccccgaaagccccatcctggacctggaccttcacctgcccttgctgtgcttcaggcctgagaaggtgctacagatcctgacatgcatcctgacggaacagcggatcgtcttcttctcctcggactgggctctgctgacgctggtcactgagtgcttcatggcctacctgtatccgctgcagtggcagcaccccttcgtgcccatcctgtcggaccagatgctggatttcgtcatggcccccacgtccttcctgatgggctgccatctcgaccacttcgaagaagtcagcaaggaagccgacggtttagttctgataaatattgatcatgggagcatcacctactccaagtccacggacgataacgtggacattcctgatgtccccctcctggcagcccagacgtttattcagagggtgcagagcctccagctccaccatgagctgcacgccgcccacctcctctccagcacagacctgaaggagggccgagcccaccggcggtcctggcagcagaaactcaactgccagatacagcagaccaccctgcagctgctcgtgagcatcttcagggatgtaaagaatcatttaaactatgaacacagagtctttaatagtgaagaatttctcaaaaccagggctccaggggaccatcagttttataagcaggtcttagacacctacatgttccattcttttcttaaagcccggctcaataggaggatggacgcctttgctcagatggacctcgacacccagtcggaggaggacagaataaatggaatgcttctaagtccaaggagaccgaccgttgagaaaagagcctcccggaagtcctcgcacctgcatgtcacccacaggcgcatggtggtcagcatgcccaacctgcaggacattgccatgcctgagctggcacccaggaactcctcgctccggctgacggacaccgcaggctgtaggggcagcagcgcagttctgaatgtcacgccgaagtccccgtatacattcaagattcccgaaatccactttccgctggagagcaagtgcgtgcaggcataccatgcccactttgtctccatgctgagcgaggccatgtgctttctggcccccgataactctctgctcctggcccgctatttgtacctccgagggctcgtttatctgatgcagggacagctgctgaacgccctcttggacttccagaatctgtataaaacagacatacggatctttcccactgatttggtgaagaggacggtggaatccatgtctgcccctgagtgggagggggctgagcaggcgccggagctgatgaggctcatcagcgagatcctggacaagccgcacgaggcctcgaagctggacgaccacgtgaagaagttcaagctgcccaagaagcacatgcagctgggcgacttcatgaagcgggtccaggagtcagggatcgtgaaggacgccagcatcatacaccggctgttcgaggccttgactgtaggacaggagaaacaaatcgacccagaaacattcaaagatttctacaactgctggaaggagacggaagcagaagcccaggaggtcagtctgccgtggctggtgatggaacacctggataaaaacgagtgtgtgtgtaagttgtccagctccgtcaagacaaacctaggcgttggcaagatcgccatgacccagaagcgcctgttcctcctaaccgaaggaaggccaggctacttggagatttccaccttcagaaatatagaggaggtcaggagaaccactactacatttctacttcggagaatacccactttaaaaatcagagtggcgtccaagaaagaagtcttcgaagccaacctgaaaaccgagtgtgacctttggcacctgatggtgaaggagatgtgggctgggaagaagctggccgatgaccacaaggaccctcactacgtccagcaggcgctgaccaacgtcttgctgatggacgccgtcgtgggcacactgcagtcaccaggcgccatctacgctgcctccaagttatcctactttgataagatgagtaacgaaatgcccatgacgcttccggagacaaccctggaaacactgaagcataaaatcaacccctcggcgggggaggcgttcccacaagcggtggacgtgctgctctacactccagggcatcttgacccagccgaaaaagttgaagatgctcaccccaagttatggtgtgctctgagcgaaggcaaggtgaccgtgttcaatgcttcttcatggaccatccaccagcactcctttaaagtgggcactgcaaaagtgaactgcatggtgatggccgaccagaaccaggtgtgggttggctcggaagactccgtcatctacatcatcaacgtccacagcatgtcctgcaacaagcagctcacagcccactgctccagtgtcacggatttgattgtgcaggacggacaggaggcacccagcaacgtgtactcgtgcagcatggacggcatggtgctggtgtggaatgtgagcacactgcaggtgaccagccgcttccagctgccgcgaggtggcctgacgtccatcagactgcacggcggccgcctgtggtgctgcacaggtaacagcatcatggtcatgaaaatgaatggatccctccatcaagaattgaagattgaggagaacttcaaagacaccagtacctccttcctggccttccagctccttcctgaggaggagcagctgtgggcggcctgtgcaggacgcagcgaggtttacatctggagcctgaaggacctggcccagcccccgcagagggtgcccctcgaggactgctctgagatcaactgcatgatccgggtgaagaagcaggtagggtggagggcccgccatccccagcatccccggcgggtcccacctggggcagaaccaacccctcttgcaccgtgaacctgcgcagctagaacaggctgtctcttcccaaaacacaaggctgggccaggcagaggttagacattctcatccgaaaagggagaaattggaaggaaagctggacttccaggccccgagcaagtcggagacacggcgggggtggggcggaattcgtttagtgttttcccccataacttaattggggtataattgatgaataaaaattatatatatctaaggtatacaaggtgatatttcagtatacattgtgaaataatcacaagctaattaccatatctgtcacctcacacaggtggctgttgtttggtgagaacacttaagatgcaccccagcacttttccagcacgcagtgcagtcttcttccccagaggcccctcggccattaggttctaagcccgagaagggtcctgtgcaggacgcagcgaggtttacatctggagcctgaaggccctggcccagcccccgcagagggtgcccctcgaggactgctctgagatcaactgcatgatccgggtgaagaagcaggtagggtggagggcccgcatccccagcatccccggcaggtct

SEQ ID NO: 61507 - DNA, 3351 bp, Homo sapiens
aggcggcgcggctggtccccaggggtctgcgggcgactgcgcggctgaggcgcccgagtgcggtactggcggcgggcggcgggcagccatggcggaggccgcgtcgccgcacttgtcgctgccctcggggctgctggagctctgcgcgctgctgggcgccccccgggacagtctccgaagtctcgagcaggttgcttataaaaagggagtcaaacatctttctgctcttcttgatccagaggtcctgtccattttcgtgcctccttttatcagtaaagaggacagtcaaacggccggtgccaactgcggcactctcggtaaaacccggatgcgctccttgagaaagaagagagagaagcccagaccagagcagtggaagggcctcccggggccccccagagcgccagagcctgaggatgtcgccgtcccgggcggcgtggacctcctcaccctgccgcagctgtgcttcccagggggtgtgtgcgtggccactgaacctaaggaggattgcgtccacttcctggtgctgaccgatgtctgcgggaataggacctatggcgtggtggcccagtactaccggcccctgcatgatgagtactgtttctacaatggcaaaacgcaccgggagtgtcctggctgcttcgtgcccttcgcggtgtgcgtggtctccaggtttccctattacaactccctcaaggactgcctttcctgtttattggctcttctgaagccctgtaaagattttgaagtggacagtcatataaaagatttcgctgcgaagctgtctttaatacccagcccgccacctggaccgctccatttggtatttaacatgaagtcgctccagattgtgttacctgcccgagcagaccccgaaagccccatcctggacctggaccttcacctgcccttgctgtgcttcaggcctgagaaggtgctacagatcctgacatgcatcctgacggaacagcggatcgtcttcttctcctcggactgggctctgctgacgctggtcactgagtgcttcatggcctacctgtatccgctgcagtggcagcaccccttcgtgcccatcctgtcggaccagatgctggatttcgtcatggcccccacgtccttcctgatgggctgccatctcgaccacttcgaagaagtcagcaaggaagccgacggtttagttctgataaatattgatcatgggagcatcacctactccaagtccacggacgataacgtggacattcctgatgtccccctcctggcagcccagacgtttattcagagggtgcagagcctccagctccaccatgagctgcacgccgcccacctcctctccagcacagacctgaaggagggccgagcccaccggcggtcctggcagcagaaactcaactgccagatacagcagaccaccctgcagctgctcgtgagcatcttcagggatgtaaagaatcatttaaactatgaacacagagtctttaatagtgaagaatttctcaaaaccagggctccaggggaccatcagttttataagcaggtcttagacacctacatgttccattcttttcttaaagcccggctcaataggaggatggacgcctttgctcagatggacctcgacacccagtcggaggaggacagaataaatggaatgcttctaagtccaaggagaccgaccgttgagaaaagagcctcccggaagtcctcgcacctgcatgtcacccacaggcgcatggtggtcagcatgcccaacctgcaggacattgccatgcctgagctggcacccaggaactcctcgctccggctgacggacaccgcaggctgtaggggcagcagcgcagttctgaatgtcacgccgaagtccccgtatacattcaagattcccgaaatccactttccgctggagagcaagtgcgtgcaggcataccatgcccactttgtctccatgctgagcgaggccatgtgctttctggcccccgataactctctgctcctggcccgctatttgtacctccgagggctcgtttatctgatgcagggacagctgctgaacgccctcttggacttccagaatctgtataaaacagacatacggatctttcccactgatttggtgaagaggacggtggaatccatgtctgcccctgagtgggagggggctgagcaggcgccggagctgatgaggctcatcagcgagatcctggacaagccgcacgaggcctcgaagctggacgaccacgtgaagaagttcaagctgcccaagaagcacatgcagctgggcgacttcatgaagcgggtccaggagtcagggatcgtgaaggacgccagcatcatacaccggctgttcgaggccttgactgtaggacaggagaaacaaatcgacccagaaacattcaaagatttctacaactgctggaaggagacggaagcagaagcccaggaggtcagtctgccgtggctggtgatggaacacctggataaaaacgagtgtgtgtgtaagttgtccagctccgtcaagacaaacctaggcgttggcaagatcgccatgacccagaagcgcctgttcctcctaaccgaaggaaggccaggctacttggagatttccaccttcagaaatatagaggaggtcaggagaaccactactacatttctacttcggagaatacccactttaaaaatcagagtggcgtccaagaaagaagtcttcgaagccaacctgaaaaccgagtgtgacctttggcacctgatggtgaaggagatgtgggctgggaagaagctggccgatgaccacaaggaccctcactacgtccagcaggcgctgaccaacgtcttgctgatggacgccgtcgtgggcacactgcagtcaccaggcgccatctacgctgcctccaagttatcctactttgataagatgagtaacgaaatgcccatgacgcttccggagacaaccctggaaacactgaagcataaaatcaacccctcggcgggggaggcgttcccacaagcggtggacgtgctgctctacactccagggcatcttgacccagccgaaaaagttgaagatgctcaccccaagttatggtgtgctctgagcgaaggcaaggtgaccgtgttcaatgcttcttcatggaccatccaccagcactcctttaaagtgggcactgcaaaagtggtgagtacacgaagcgtcaggaaagaagcctctgaattcacgtgatttctgaaacccaagtgtgttcatccatattcgacagtaggatacaagctattccacagcctcactcggtttctgtaaacagggggtcttaactttcacctggagttttcaaattaaatgtaagcttgttccca

SEQ ID NO: 61508 - DNA, 3030 bp, Homo sapiens
aggcggcgcggctggtccccaggggtctgcgggcgactgcgcggctgaggcgcccgagtgcggtactggcggcgggcggcgggcagccatggcggaggccgcgtcgccgcacttgtcgctgccctcggggctgctggagctctgcgcgctgctgggcgccccccgggacagtctccgaagtctcgagcaggttgcttataaaaagggagtcaaacatctttctgctcttcttgatccagaggtcctgtccattttcgtgcctccttttatcagtaaagaggacagtcaaacggccggtgccaactgcggcactctcggtaaaacccggatgcgctccttgagaaagaagagagagaagcccagaccagagcagtggaagggcctcccggggccccccagagcgccagagcctgaggatgtcgccgtcccgggcggcgtggacctcctcaccctgccgcagctgtgcttcccagggggtgtgtgcgtggccactgaacctaaggaggattgcgtccacttcctggtgctgaccgatgtctgcgggaataggacctatggcgtggtggcccagtactaccggcccctgcatgatgagtactgtttctacaatggcaaaacgcaccgggagtgtcctggctgcttcgtgcccttcgcggtgtgcgtggtctccaggtttccctattacaactccctcaaggactgcctttcctgtttattggctcttctgaagccctgtaaagattttgaagtggacagtcatataaaagatttcgctgcgaagctgtctttaatacccagcccgccacctggaccgctccatttggtatttaacatgaagtcgctccagattgtgttacctgcccgagcagaccccgaaagccccatcctggacctggaccttcacctgcccttgctgtgcttcaggcctgagaaggtgctacagatcctgacatgcatcctgacggaacagcggatcgtcttcttctcctcggactgggctctgctgacgctggtcactgagtgcttcatggcctacctgtatccgctgcagtggcagcaccccttcgtgcccatcctgtcggaccagatgctggatttcgtcatggcccccacgtccttcctgatgggctgccatctcgaccacttcgaagaagtcagcaaggaagccgacggtttagttctgataaatattgatcatgggagcatcacctactccaagtccacggacgataacgtggacattcctgatgtccccctcctggcagcccagacgtttattcagagggtgcagagcctccagctccaccatgagctgcacgccgcccacctcctctccagcacagacctgaaggagggccgagcccaccggcggtcctggcagcagaaactcaactgccagatacagcagaccaccctgcagctgctcgtgagcatcttcagggatgtaaagaatcatttaaactatgaacacagagtctttaatagtgaagaatttctcaaaaccagggctccaggggaccatcagttttataagcaggtcttagacacctacatgttccattcttttcttaaagcccggctcaataggaggatggacgcctttgctcagatggacctcgacacccagtcggaggaggacagaataaatggaatgcttctaagtccaaggagaccgaccgttgagaaaagagcctcccggaagtcctcgcacctgcatgtcacccacaggcgcatggtggtcagcatgcccaacctgcaggacattgccatgcctgagctggcacccaggaactcctcgctccggctgacggacaccgcaggctgtaggggcagcagcgcagttctgaatgtcacgccgaagtccccgtatacattcaagattcccgaaatccactttccgctggagagcaagtgcgtgcaggcataccatgcccactttgtctccatgctgagcgaggccatgtgctttctggcccccgataactctctgctcctggcccgctatttgtacctccgagggctcgtttatctgatgcagggacagctgctgaacgccctcttggacttccagaatctgtataaaacagacatacggatctttcccactgatttggtgaagaggacggtggaatccatgtctgcccctgagtgggagggggctgagcaggcgccggagctgatgaggctcatcagcgagatcctggacaagccgcacgaggcctcgaagctggacgaccacgtgaagaagttcaagctgcccaagaagcacatgcagctgggcgacttcatgaagcgggtccaggagtcagggatcgtgaaggacgccagcatcatacaccggctgttcgaggccttgactgtaggacaggagaaacaaatcgacccagaaacattcaaagatttctacaactgctggaaggagacggaagcagaagcccaggaggtcagtctgccgtggctggtgatggaacacctggataaaaacgagtgtgtgtgtaagttgtccagctccgtcaagacaaacctaggcgttggcaagatcgccatgacccagaagcgcctgttcctcctaaccgaaggaaggccaggctacttggagatttccaccttcagaaatatagaggaggtcaggagaaccactactacatttctacttcggagaatacccactttaaaaatcagagtggcgtccaagaaagaagtcttcgaagccaacctgaaaaccgagtgtgacctttggcacctgatggtgaaggagatgtgggctgggaagaagctggccgatgaccacaaggtgggagacgcgggtcccctctgccctttgctgtggctgcctcaggggcctctcgccacctgtgggtcctgtggcagtcctcagctgtgagtgctcgggctcgggtctgagtgtcttaagcagagtaagtttgtcggacaccatcttgacagaagcattgaagatgtggtctgtgtgacccagcgagaggcctcacggtgctacggaagagcatgatgagaaaacgcagggcggtc

SEQ ID NO: 61509 - DNA, 2816 bp, Homo sapiens
aggcggcgcggctggtccccaggggtctgcgggcgactgcgcggctgaggcgcccgagtgcggtactggcggcgggcggcgggcagccatggcggaggccgcgtcgccgcacttgtcgctgccctcggggctgctggagctctgcgcgctgctgggcgccccccgggacagtctccgaagtctcgagcaggttgcttataaaaagggagtcaaacatctttctgctcttcttgatccagaggtcctgtccattttcgtgcctccttttatcagtaaagaggacagtcaaacggccggtgccaactgcggcactctcggtaaaacccggatgcgctccttgagaaagaagagagagaagcccagaccagagcagtggaagggcctcccggggccccccagagcgccagagcctgaggatgtcgccgtcccgggcggcgtggacctcctcaccctgccgcagctgtgcttcccagggggtgtgtgcgtggccactgaacctaaggaggattgcgtccacttcctggtgctgaccgatgtctgcgggaataggacctatggcgtggtggcccagtactaccggcccctgcatgatgagtactgtttctacaatggcaaaacgcaccgggagtgtcctggctgcttcgtgcccttcgcggtgtgcgtggtctccaggtttccctattacaactccctcaaggactgcctttcctgtttattggctcttctgaagccctgtaaagattttgaagtggacagtcatataaaagatttcgctgcgaagctgtctttaatacccagcccgccacctggaccgctccatttggtatttaacatgaagtcgctccagattgtgttacctgcccgagcagaccccgaaagccccatcctggacctggaccttcacctgcccttgctgtgcttcaggcctgagaaggtgctacagatcctgacatgcatcctgacggaacagcggatcgtcttcttctcctcggactgggctctgctgacgctggtcactgagtgcttcatggcctacctgtatccgctgcagtggcagcaccccttcgtgcccatcctgtcggaccagatgctggatttcgtcatggcccccacgtccttcctgatgggctgccatctcgaccacttcgaagaagtcagcaaggaagccgacggtttagttctgataaatattgatcatgggagcatcacctactccaagtccacggacgataacgtggacattcctgatgtccccctcctggcagcccagacgtttattcagagggtgcagagcctccagctccaccatgagctgcacgccgcccacctcctctccagcacagacctgaaggagggccgagcccaccggcggtcctggcagcagaaactcaactgccagatacagcagaccaccctgcagctgctcgtgagcatcttcagggatgtaaagaatcatttaaactatgaacacagagtctttaatagtgaagaatttctcaaaaccagggctccaggggaccatcagttttataagcaggtcttagacacctacatgttccattcttttcttaaagcccggctcaataggaggatggacgcctttgctcagatggacctcgacacccagtcggaggaggacagaataaatggaatgcttctaagtccaaggagaccgaccgttgagaaaagagcctcccggaagtcctcgcacctgcatgtcacccacaggcgcatggtggtcagcatgcccaacctgcaggacattgccatgcctgagctggcacccaggaactcctcgctccggctgacggacaccgcaggctgtaggggcagcagcgcagttctgaatgtcacgccgaagtccccgtatacattcaagattcccgaaatccactttccgctggagagcaagtgcgtgcaggcataccatgcccactttgtctccatgctgagcgaggccatgtgctttctggcccccgataactctctgctcctggcccgctatttgtacctccgagggctcgtttatctgatgcagggacagctgctgaacgccctcttggacttccagaatctgtataaaacagacatacggatctttcccactgatttggtgaagaggacggtggaatccatgtctgcccctgagtgggagggggctgagcaggcgccggagctgatgaggctcatcagcgagatcctggacaagccgcacgaggcctcgaagctggacgaccacgtgaagaagttcaagctgcccaagaagcacatgcagctgggcgacttcatgaagcgggtccaggagtcagggatcgtgaaggacgccagcatcatacaccggctgttcgaggccttgactgtaggacaggagaaacaaatcgacccagaaacattcaaagatttctacaactgctggaaggagacggaagcagaagcccaggaggtcagtctgccgtggctggtgatggaacacctggataaaaacgagtgtgtgtgtaagttgtccagctccgtcaagacaaacctaggcgttggcaagatcgccatgacccagaagcgcctgttcctcctaaccgaaggaaggccaggctacttggagatttccaccttcagaaatatagaggtaaggacagcacaggcagacggcgccagaccccacctgtgtttaggagacagatggctggagtgggccctgagcagtctgccagccatgccaagtaccagctgcagcccttctgcagaccgaatgccttcctgtccctcagtttgctcatctgtaaagcaggaataaggctgataccttctcagtgggtggt

SEQ ID NO: 61510 - DNA, 1646 bp, Homo sapiens
aagcttgcggccgcctgtggtgctgcacaggtaacagcatcatggtcatgaaaatgaatggatccctccatcaagaattgaagattgaggagaacttcaaagacaccagtacctccttcctggccttccagctccttcctgaggaggagcagctgtgggcggcctgtgcaggacgcagcgaggtttacatctggagcctgaaggacctggcccagcccccgcagagggtgcccctcgaggactgctctgagatcaactgcatgatccgggtgaagaagcaggtagggtggagggcccgccatccccagcatccccggcaggtctcgcttgccctggccgcatccccatgctcccgagagccagccacacgcccttgtgccctcctgccttcgcctctcagggctcccctcctaacaggcacgtgcagggttggtgccaacgggcccacaggtcaccatgtgctggtttcatggtgtggtccaagcactccacagcgcattcccccaaactggatggcttcaaatgacagaacttaattttctcacagttctcgacgctggaggtccaaaaccaaggtgtcggcagagccgcttccctcgggggctcggggggagcgtgcactccaggcccttctctcccccacccgctcatgtggccgccgtccttggcgtgccctggctgtggacgtggcactctaacctgtgcctgcaccacatggcactctctctccctgtgtgtgtctcttatggggatgctggtcgtactggattaaccagtgtgaccacatctgaactatctgcagactctacttccaaagaagctcacattctgaggttcagaggatatggatttggggggacactgttcaacccattacagtctgccctctggccccctaaatccacatctgttccacatgcaaaatacaccccctccatcactacatcccccgaagtcccagtccctccagtgtcagttctgagccccaaatctccaagtgaagccaaagccctccgatgtgggtgagccgtgggcgggtcccacctggggcagaaccaacccctcttgcaccgtgaacctgcgcagctagaacaggctgtctcttcccaaaacacaaggctgggccaggcagaggttagacattctcatccgaaaagggagaaattggaaggaaagctggacttccaggccccgagcaagtcggagacacggcgggggtggggcggaattcgtttagtgttttcccccataacttaattggggtataattgatgaataaaaattatatatatctaaggtatacaaggtgatatttcagtatacattgtgaaataatcacaagctaattaccatatctgtcacctcacacaggtggctgttgtttggtgagaacacttaagatgcaccccagcacttttccagcacgcagtgcagtcttcttccccagaggcccctcggccattaggttctaagcccgagaagggtcctgtgcaggacgcagcgaggtttacatctggagcctgaaggccctggcccagcccccgcagagggtgcccctcgaggactgctctgagatcaactgcatgatccgggtgaagaagcaggtagggtggagggcccgcatccccagcatccccggcaggtct

SEQ ID NO: 61511 - DNA, 433 bp, Homo sapiens
ggacttccccttccaaaatatacctccctttgtgccacctgtcaggcactaccgcagacctggggccactctgctgtcacccagcagcttggtgactttgcttttggtgaaaggtcctggagctgctgctgcagacgctggggagattccagtgtgattagaaacgctaacgatgacaactgcgttctcatctttattttgcggtttgagttttgtgtttcgaatttcagtttattggctcttctgaagccctgtaaagattttgaagtggacagtcatataaaagatttcgctgcgaagctgtctttaatacccagcccgccacctggaccgctccatttggtaaagtatatctgaaattatattgttttttctttgcaatagtaaaagtaagatgttgaagataatgtaaatgctcacaactatttctgaa

SEQ ID NO: 61512 - DNA, 469 bp, Homo sapiens
tgtgtgaacggggaccgctgacgaggttccatttcagttcatggtcatgtcatggctctatgacaacacctcattgagcctgcggcccgcggtggtgggagaggtgggcgtcccgagaaacccgccttttcctgccgagtcagttacatttgagccaagcctggctgtggctgcattcatagcatgtttgcatgttattatcatgtttgcaggttacgtttgcaggttattatgtttgcatgttattatcatgtttgcaggttatccgtgttgagcacattttctctcatggcgacttggttctctcttgggttaaaatgtgcacagtgttttcaggggcccaagttaaaggtgtgtgtgtgtgttttgtgccccccaacgtgtactcgtgcagcatggacggcatggtgctggtgtggaatgtgagcacactgcaggtgaccagccgcttccagctgccgcgaggtgg

SEQ ID NO: 61513 - DNA, 867 bp, Homo sapiens
  misc_feature (106)..(106): n is a, c, g, or t
cacgattctaccaggccctccagctgcgtggtctccgcagaccaggctctgtgtgggctagaggaatgtcgcccattactcctcaggcctggccctcgggcctccntgatgggagccccccaggaggggtcagatgctggaaggggccgctttctggggagtgaggtgagacatagcggcccaggcgctgccttcactcctggagtttccatttccagctggaatctgcagccacccccatttcctgttttccattcccccgttctggccgcgccccactgcccacctgaaggggtggtttccagccctccggagagtgggcttggccctaggccctccagctcagccagaaaaagcccagaaacccaggtgctggaccagggccctcagggaggggaccctgcggctagagtgggctaggccctggctttgcccgtcagatttgaacgaatgtgtgtcccttgagcccaaggagagcggcaggaggggtgggaccaggctgggaggacagagccagcagctgccatgccctcctgctccccccaccccagccctagccctttagcctttcaccctgtgctctggaaaggctaccaaatactggccaaggtcaggaggagcaaaaatgagccagcaccagcgccttggctttgtgttagcatttcctcctgaagtgttctgttggcaataaaatgcactttgactgtttgttgtcaaaaaacagaaacggtagacaaaaaggggggcggggtaaagatcaccccgggggtcagacgtagcgagaccgttttggcaagggcccaaggggggataagagaaggcgggcggtaacatggcgggaacggtcggcttgggggccacttgggg

SEQ ID NO: 61514 - DNA, 343 bp, Homo sapiens
ccctgcggctagagtgggctaggccctggctttgcccgtcagatttgaacgaatgtgtgtcccttgagcccaaggagagcggcaggaggggtgggaccaggctgggaggacagagccagcagctgccatgccctcctgctccccccaccccagccctagccctttagcctttcaccctgtgctctggaaaggctaccaaatactggccaaggtcaggaggagcaaaaatgagccagcaccagcgccttggctttgtgttagcatttcctcctgaagtgttctgttggcaataaaatgcactttgactgttaaaaaaaaaaaaagaaaaaaaaaattatgaaag

SEQ ID NO: 61515 - DNA, 708 bp, Homo sapiens
  misc_feature (106)..(106): n is a, c, g, or t
cacgattctaccaggccctccagctgcgtggtctccgcagaccaggctctgtgtgggctagaggaatgtcgcccattactcctcaggcctggccctcgggcctccntgatgggagccccccaggaggggtcagatgctggaaggggccgctttctggggagtgaggtgagacatagcggcccaggcgctgccttcactcctggagtttccatttccagctggaatctgcagccacccccatttcctgttttccattcccccgttctggccgcgccccactgcccacctgaaggggtggtttccagccctccggagagtgggcttggccctaggccctccagctcagccagaaaaagcccagaaacccaggtgctggaccagggccctcagggaggggaccctgcggctagagtgggctaggccctggctttgcccgtcagatttgaacgaatgtgtgtcccttgagcccaaggagagcggcaggaggggtgggaccaggctgggaggacagagccagcagctgccatgccctcctgctccccccaccccagccctagccctttagcctttcaccctgtgctctggaaaggctaccaaatactggccaaggtcaggaggagcaaaaatgagccagcaccagcgccttggctttgtgttagcatttcctcctgaagtgttctgttggcaataaaatgcactttgactgtt

SEQ ID NO: 61516 - DNA, 560 bp, Homo sapiens
ccctgaaaaggaaaaagaagaaatagagaaaagttgaaggatatgtacaaattcactcaggtcatatgtactggagtcacaattcaaacctagatgtaagttttccagagtcagggtgcttgtggtatgcttaatacaagcttttaaaagtgtcatggttaggtcccacagctagactacctgagttcaaatcctaactgccctcagtagtcacgtgttcttgggtaacgttcttaacttttctgtatctcagtttcctcatctctaaaatagtaggaatattaatagtctacacctcataagattgttgtgaagattaaacgagttaataaagtgctgtgaatgatgcctggcacaaagaaggcactcaataaatagtagttcttatagttgttgtatatgctttatttgttactcgttttcatagcaggattgtaactacttgtttcagggccaagataccagtttctttttatccctagagcctaaaatggcatcattcactaaaataaaattgtgtttaaaaataaagatatatacttaattctaaaaaaaaatca

SEQ ID NO: 61517 - DNA, 433 bp, Homo sapiens
aggatcactgttgttgctaattttttttcttttaaaaaatacagatatttttaataaaagtatgttaattatgttaacctgtaatgggcttattatttcaaaatcaattaacaatgtaaatatttaaaacttctgtgttaaaatttctaatagtataaatagcagtagatttagcccactctaagggagatggttgtgctttagtcaggagtaggccgaggcagccttctggtgcagcatgactcagtgggtttggaggcaggcacacaactccacacattatgtaaccatgccatgtgaggtgcattaggtgaccactcatatgagcacgtgcttggctcaaagccactattgtctgtaaaaggtaaaattaccctgctgacactacatatggcttgcacccagagagagaataaagccatgtcgaaaccgc

SEQ ID NO: 61518 - DNA, 157 bp, Homo sapiens
acatttaactacataaacaaaaaatatggcattgaattacaaaacaaccagataagtataggatggtatgaacttgccttgacaggcccaaaaaaaaaaaaaaaaaaaaaaaattgtggtcctctcagctggatcattagcttactatgaggcaaag

SEQ ID NO: 61519 - DNA, 476 bp, Homo sapiens
cagacagcatagtaagtagaaaatggaaatgagattttactaaacccttctccttcctcacttcgaaggccttctgggaaagacagcaaagttgagctcatataaaccaaaagctctggccccagctctacctgcatggtggggggaatggcccattcttccttacttctgacaactggctcttcaaatacacttcaaatacctgggaacctattcatatccatcctctgaatgggaagaaaattgcttctccttggcaaacagctttggcctgggcaatggtcccaatctgtcattagtatgagaaactttccagtattttcatttttgtggtcactgttctcttctatttccttttatgtattagttcataagcactatgtttcaaaaggactaagacattctagagtccttgattgttcactcatctttccattcattttttaaataaacatttattaagttcctttatatgt

SEQ ID NO: 61520 - DNA, 401 bp, Homo sapiens
ttaaacgtcagggagttttagaaactgttattgttgtgtggacagttgagcacaacagaggggaaaagactagactcgctggctcacaaaaacaagacaatgctccatattgcacgtaatcatcgagcctgcccacgggactatccaggaagattgctcagtgacaaatcgatgctggagcagcttttgttctaaaacagagcaaaaggaaaacttggcaacaaaacagacactggcaggttactctatcacaatagacagtctgcagttatattttttgctgagcaatttttacaatatgacatattcattttacagttttgattttatttttcagagagatgtagtccttgtaaatgctgggtgcgattttcacttggtttatgttaaatccagtgtga

SEQ ID NO: 61521 - DNA, 218 bp, Homo sapiens
tcagctgtgtgcctcactatgctaggccgccccgctgaggttgttggaggccttattgtggctccatggtgacctcttggttcagagcttgcttgacctccagccctctccgtggatggctccttcctgccctcacaggcaccgtcctggccccggctccagttatgtccatgcctcggccctctgcagcttcctcccattccatgtgtcccagggcc

SEQ ID NO: 61522 - DNA, 677 bp, Homo sapiens
ggtaccggtccggcagttcccgggatatcgttttaagctgcaaatctgatggccttaatttcctttttgacactgaaagttttgtaaaagaaatcatgtccatacactttgttgcaagatgtgaattattgacactgaacttaataactgtgtactgttcggaaggggttcctcaaattttttgactttttttgtatgtgtgttttttctttttttttaagttcttatgaggaggggagggtaaataaaccactgtgcgtcttggtgtaatttgaagattgccccatctagactagcaatctcttcattattctctgctatatataaaacggtgctgtgagggaggggaaaagcatttttcaatatattgaacttttgtactgaatttttttgtaataagcaatcaaggttataattttttttaaaatagaaattttgtaagaaggcaatattaacctaatcaccatgtaagcactctggatgatggattccacaaaacttggttttatggttacttcttctcttagattcttaattcatgaggagggtgggggagggaggtggagggagggaagggtttctctattaaaatgcattcgttgtgttttttaagatagtgtaacttgcttaaatttcttatgtgacattaacaaataaaaaagctcttttaatattga

SEQ ID NO: 61523 - DNA, 2517 bp, Homo sapiens
gctccgtgcagcctgagaggaaacaaagtgctgcgagcaggagacggcggcggcgcgaaccctgctgggcctccagtcaccctcgtcttgcattttcccgcgtgcgtgtgtgagtgggtgtgtgtgttttcttacaaagggtatttcgcgatcgatcgattgattcgtagttcccccccgcgcgcctttgccctttgtgctgtaatcgagctcccgccatcccaggtgcttctccgttcctctaaacgccagcgtctggacgtgagcgcaggtcgccggtttgtgccttcggtccccgcttcgcccctgcagatcgagctgggcaagtgcaaggcggaacacgaccagctgctcctcaactatgctaagaaggaatctgatcttaatggcgcccagatcaagcttcgagaatatgaagcagcactgaattcgaaagatgcagctcttgctactgcacttggtgacaaaaaaagtttagagggagatttggaggatctgaaggatcagattgcccagttggaagcctccttagctgcagccaaaaaacagttagcagatgaaactttacttaaagtagatttggagaatcgttgtcagagccttactgaggacttggagtttcgcaaaagcatgtatgaagaggagattaacgagaccagaaggaagcatgaaacgcgcttggtagaggtggattctgggcgtcaaattgagtatgagtacaagctggcgcaagcccttcatgagatgagagagcaacatgatgcccaagtgaggctgtataaggaggagctggagcagacttaccatgccaaacttgagaatgccagactgtcatcagagatgaatacttctactgtcaacagtgccagggaagaactgatggaaagccgcatgagaattgagagcctttcatcccagctttctaatctacagaaagagtctagagcatgtttggaaaggattcaagaattagaggacttgcttgctaaagaaaaagacaactctcgtcgcatgctgacagacaaagagagagagatggcggaaataagggatcaaatgcagcaacagctgaatgactatgaacagcttcttgatgtaaagttagccctggacatggaaatcagtgcttacaggaaactcttagaaggcgaagaagagaggttgaagctgtctccaagcccttcttcccgtgtgacagtatcccgagcatcctcaagtcgtagtgtacgtacaactagaggaaagcggaagagggttgatgtggaagaatcagaggcgagtagtagtgttagcatctctcattccgcctcagccactggaaatgtttgcatcgaagaaattgatgttgatgggaaatttatccgcttgaagaacacttctgaacaggatcaaccaatgggaggctgggagatgatcagaaaaattggagacacatcagtcagttataaatatacctcaagatatgtgctgaaggcaggccagactgttacaatttgggctgcaaacgctggtgtcacagccagccccccaactgacctcatctggaagaaccagaactcgtggggcactggcgaagatgtgaaggttatattgaaaaattctcagggagaggaggttgctcaaagaagtacagtctttaaaacaaccatacctgaagaagaggaggaggaggaagaagcagctggagtggttgttgaggaagaacttttccaccagcagggaaccccaagagcatccaatagaagctgtgcaattatgtaaaattttcaactgtcttcctcaaaataaagaagtatggtaatccttacctgtatacagtgcagagccttctcagaagcacagaatatttttatatttcctttatgtgaatttttaagctgcaaatctgatggccttaatttcctttttgacactgaaagttttgtaaaagaaatcatgtccatacactttgttgcaagatgtgaattattgacactgaacttaataactgtgtactgttcggaaggggttcctcaaattttttgactttttttgtatgtgtgttttttctttttttttaagttcttatgaggaggggagggtaaataaaccactgtgcgtcttggtgtaatttgaagattgccccatctagactagcaatctcttcattattctctgctatatataaaacggtgctgtgagggaggggaaaagcatttttcaatatattgaacttttgtactgaatttttttgtaataagcaatcaaggttataattttttttaaaatagaaattttgtaagaaggcaatattaacctaatcaccatgtaagcactctggatgatggattccacaaaacttggttttatggttacttcttctcttagattcttaattcatgaggagggtgggggagggaggtggagggagggaagggtttctctattaaaatgcattcgttgtgttttttaagatagtgtaacttgcttaaatttcttatgtgacattaacaaataaaaaagctcttttaatattga

SEQ ID NO: 61524 - DNA, 2036 bp, Homo sapiens
gctccgtgcagcctgagaggaaacaaagtgctgcgagcaggagacggcggcggcgcgaaccctgctgggcctccagtcaccctcgtcttgcattttcccgcgtgcgtgtgtgagtgggtgtgtgtgttttcttacaaagggtatttcgcgatcgatcgattgattcgtagttcccccccgcgcgcctttgccctttgtgctgtaatcgagctcccgccatcccaggtgcttctccgttcctctaaacgcaagcccttcatgagatgagagagcaacatgatgcccaagtgaggctgtataaggaggagctggagcagacttaccatgccaaacttgagaatgccagactgtcatcagagatgaatacttctactgtcaacagtgccagggaagaactgatggaaagccgcatgagaattgagagcctttcatcccagctttctaatctacagaaagagtctagagcatgtttggaaaggattcaagaattagaggacttgcttgctaaagaaaaagacaactctcgtcgcatgctgacagacaaagagagagagatggcggaaataagggatcaaatgcagcaacagctgaatgactatgaacagcttcttgatgtaaagttagccctggacatggaaatcagtgcttacaggaaactcttagaaggcgaagaagagaggttgaagctgtctccaagcccttcttcccgtgtgacagtatcccgagcatcctcaagtcgtagtgtacgtacaactagaggaaagcggaagagggttgatgtggaagaatcagaggcgagtagtagtgttagcatctctcattccgcctcagccactggaaatgtttgcatcgaagaaattgatgttgatgggaaatttatccgcttgaagaacacttctgaacaggatcaaccaatgggaggctgggagatgatcagaaaaattggagacacatcagtcagttataaatatacctcaagatatgtgctgaaggcaggccagactgttacaatttgggctgcaaacgctggtgtcacagccagccccccaactgacctcatctggaagaaccagaactcgtggggcactggcgaagatgtgaaggttatattgaaaaattctcagggagaggaggttgctcaaagaagtacagtctttaaaacaaccatacctgaagaagaggaggaggaggaagaagcagctggagtggttgttgaggaagaacttttccaccagcagggaaccccaagagcatccaatagaagctgtgcaattatgtaaaattttcaactgtcttcctcaaaataaagaagtatggtaatccttacctgtatacagtgcagagccttctcagaagcacagaatatttttatatttcctttatgtgaatttttaagctgcaaatctgatggccttaatttcctttttgacactgaaagttttgtaaaagaaatcatgtccatacactttgttgcaagatgtgaattattgacactgaacttaataactgtgtactgttcggaaggggttcctcaaattttttgactttttttgtatgtgtgttttttctttttttttaagttcttatgaggaggggagggtaaataaaccactgtgcgtcttggtgtaatttgaagattgccccatctagactagcaatctcttcattattctctgctatatataaaacggtgctgtgagggaggggaaaagcatttttcaatatattgaacttttgtactgaatttttttgtaataagcaatcaaggttataattttttttaaaatagaaattttgtaagaaggcaatattaacctaatcaccatgtaagcactctggatgatggattccacaaaacttggttttatggttacttcttctcttagattcttaattcatgaggagggtgggggagggaggtggagggagggaagggtttctctattaaaatgcattcgttgtgttttttaagatagtgtaacttgcttaaatttcttatgtgacattaacaaataaaaaagctcttttaatattga

SEQ ID NO: 61525 - DNA, 1920 bp, Homo sapiens
cttttggaagtaaaggctttgtaagggagccagacttgacttttaccaaaaccacatcttaacatttttttggctaagtacagaaaaattatatgtatatttacagaacttacatttgtggaatatgtcttttattcttttatcagccaaaactatcctgaggtctgtgttttgtatttgaggaattttgggttttaatttcttaaaatctcttgaattctagtgagttagagattccatagggttgtactgttttccagtctaggaaatgatttaaaatagctgcctggtgctaatgttggaatgttcctagaaagtaaatatgtttccttgcatcttaagtctagagcatgtttggaaaggattcaagaattagaggacttgcttgctaaagaaaaagacaactctcgtcgcatgctgacagacaaagagagagagatggcggaaataagggatcaaatgcagcaacagctgaatgactatgaacagcttcttgatgtaaagttagccctggacatggaaatcagtgcttacaggaaactcttagaaggcgaagaagagaggttgaagctgtctccaagcccttcttcccgtgtgacagtatcccgagcatcctcaagtcgtagtgtacgtacaactagaggaaagcggaagagggttgatgtggaagaatcagaggcgagtagtagtgttagcatctctcattccgcctcagccactggaaatgtttgcatcgaagaaattgatgttgatgggaaatttatccgcttgaagaacacttctgaacaggatcaaccaatgggaggctgggagatgatcagaaaaattggagacacatcagtcagttataaatatacctcaagatatgtgctgaaggcaggccagactgttacaatttgggctgcaaacgctggtgtcacagccagccccccaactgacctcatctggaagaaccagaactcgtggggcactggcgaagatgtgaaggttatattgaaaaattctcagggagaggaggttgctcaaagaagtacagtctttaaaacaaccatacctgaagaagaggaggaggaggaagaagcagctggagtggttgttgaggaagaacttttccaccagcagggaaccccaagagcatccaatagaagctgtgcaattatgtaaaattttcaactgtcttcctcaaaataaagaagtatggtaatccttacctgtatacagtgcagagccttctcagaagcacagaatatttttatatttcctttatgtgaatttttaagctgcaaatctgatggccttaatttcctttttgacactgaaagttttgtaaaagaaatcatgtccatacactttgttgcaagatgtgaattattgacactgaacttaataactgtgtactgttcggaaggggttcctcaaattttttgactttttttgtatgtgtgttttttctttttttttaagttcttatgaggaggggagggtaaataaaccactgtgcgtcttggtgtaatttgaagattgccccatctagactagcaatctcttcattattctctgctatatataaaacggtgctgtgagggaggggaaaagcatttttcaatatattgaacttttgtactgaatttttttgtaataagcaatcaaggttataattttttttaaaatagaaattttgtaagaaggcaatattaacctaatcaccatgtaagcactctggatgatggattccacaaaacttggttttatggttacttcttctcttagattcttaattcatgaggagggtgggggagggaggtggagggagggaagggtttctctattaaaatgcattcgttgtgttttttaagatagtgtaacttgcttaaatttcttatgtgacattaacaaataaaaaagctcttttaatattga

SEQ ID NO: 61526 - DNA, 2568 bp, Homo sapiens
gctccgtgcagcctgagaggaaacaaagtgctgcgagcaggagacggcggcggcgcgaaccctgctgggcctccagtcaccctcgtcttgcattttcccgcgtgcgtgtgtgagtgggtgtgtgtgttttcttacaaagggtatttcgcgatcgatcgattgattcgtagttcccccccgcgcgcctttgccctttgtgctgtaatcgagctcccgccatcccaggtgcttctccgttcctctaaacgccagcgtctggacgtgagcgcaggtcgccggtttgtgccttcggtccccgcttcgccccctgccgtcccctccttatcacggtcccgctcgcggcctcgccgccccgctgtctccgccgcccgccatggcgactgcgacccccgtgccgccgcggatgggcagccgcgctggcggccccaccacgccgctgagccccacgcgcctgtcgcggctccaggagaaggaggagctgcgcgagctcaatgaccggctggcggtgtacatcgacaaggtgcgcagcctggagacggagaacagcgcgctgcagctgcaggtgacggagcgcgaggaggtgcgcggccgtgagctcaccggcctcaaggcgctctacgagaccgagctggccgacgcgcgacgcgcgctcgacgacacggcccgcgagcgcgccaagctgcagatcgagctgggcaagtgcaaggcggaacacgaccagctgctcctcaactatgctaagaaggaatctgatcttaatggcgcccagatcaagcttcgagaatatgaagcagcactgaattcgaaagatgcagctcttgctactgcacttggtgacaaaaaaagtttagagggagatttggaggatctgaaggatcagattgcccagttggaagcctccttagctgcagccaaaaaacagttagcagatgaaactttacttaaagtagatttggagaatcgttgtcagagccttactgaggacttggagtttcgcaaaagcatgtatgaagaggagattaacgagaccagaaggaagcatgaaacgcgcttggtagaggtggattctgggcgtcaaattgagtatgagtacaagctggcgcaagcccttcatgagatgagagagcaacatgatgcccaagtgaggctgtataaggaggagctggagcagacttaccatgccaaacttgagaatgccagactgtcatcagagatgaatacttctactgtcaacagtgccagggaagaactgatggaaagccgcatgagaattgagagcctttcatcccagctttctaatctacagaaagagtctagagcatgtttggaaaggattcaagaattagaggacttgcttgctaaagaaaaagacaactctcgtcgcatgctgacagacaaagagagagagatggcggaaataagggatcaaatgcagcaacagctgaatgactatgaacagcttcttgatgtaaagttagccctggacatggaaatcagtgcttacaggaaactcttagaaggcgaagaagagaggttgaagctgtctccaagcccttcttcccgtgtgacagtatcccgagcatcctcaagtcgtagtgtacgtacaactagaggaaagcggaagagggttgatgtggaagaatcagaggcgagtagtagtgttagcatctctcattccgcctcagccactggaaatgtttgcatcgaagaaattgatgttgatgggaaatttatccgcttgaagaacacttctgaacaggatcaaccaatgggaggctgggagatgatcagaaaaattggagacacatcagtcagttataaatatacctcaagatatgtgctgaaggcaggccagactgttacaatttgggctgcaaacgctggtgtcacagccagccccccaactgacctcatctggaagaaccagaactcgtggggcactggcgaagatgtgaaggttatattgaaaaattctcagggagaggaggttgctcaaagaagtacagtctttaaaacaaccatacctgaagaagaggaggaggaggaagaagcagctggagtggttgttgaggaagaacttttccaccagcagggaaccccaagagcatccaatagaagctgtgcaattatgtaaaattttcaactgtcttcctcaaaataaagaagtatggtaatccttacctgtatacagtgcagagccttctcagaagcacagaatatttttatatttcctttatgtgaatttttaagctgcaaatctgatggccttaatttcctttttgacactgaaagttttgtaaaagaaatcatgtccatacactttgttgcaagatgtgaattattgacactgaacttaataactgtgtactgttcggaaggggttcctcaaattttttgactttttttgtatgtgtgttttttctttttttttaagttcttatgaggagggaggtggagggagggaagggtttctctattaaaatgcattcgttgtgttttttaagatagtgtaacttgcttaaatttcttatgtgacattaacaaataaaaaagctcttttaatattga

SEQ ID NO: 61527 - DNA, 929 bp, Homo sapiens
acgcttgattgcccatggtagaggaggttgctcaaagaagtacagtctttaaaacaaccatacctgaagaagaggaggaggaggaagaagcagctggagtggttgttgaggaagaacttttccaccagcagggaaccccaagagcatccaatagaagctgtgcaattatgtaaaattttcaactgtcttcctcaaaataaagaagtatggtaatccttacctgtatacagtgcagagccttctcagaagcacagaatatttttatatttcctttatgtgaatttttaagctgcaaatctgatggccttaatttcctttttgacactgaaagttttgtaaaagaaatcatgtccatacactttgttgcaagatgtgaattattgacactgaacttaataactgtgtactgttcggaaggggttcctcaaattttttgactttttttgtatgtgtgttttttctttttttttaagttcttatgaggaggggagggtaaataaaccactgtgcgtcttggtgtaatttgaagattgccccatctagactagcaatctcttcattattctctgctatatataaaacggtgctgtgagggaggggaaaagcatttttcaatatattgaacttttgtactgaatttttttgtaataagcaatcaaggttataattttttttaaaatagaaattttgtaagaaggcaatattaacctaatcaccatgtaagcactctggatgatggattccacaaaacttggttttatggttacttcttctcttagattcttaattcatgaggagggtgggggagggaggtggagggagggaagggtttctctattaaaatgcattcgttgtgttttttaagatagtgtaacttgcttaaatttcttatgtgacattaacaaataaaaaagctcttttaatattga

SEQ ID NO: 61528 - DNA, 956 bp, Homo sapiens
atttggtgattttaagtgtgttttttaacttaaactactattgtttttaggaggttgctcaaagaagtacagtctttaaaacaaccatacctgaagaagaggaggaggaggaagaagcagctggagtggttgttgaggaagaacttttccaccagcagggaaccccaagagcatccaatagaagctgtgcaattatgtaaaattttcaactgtcttcctcaaaataaagaagtatggtaatccttacctgtatacagtgcagagccttctcagaagcacagaatatttttatatttcctttatgtgaatttttaagctgcaaatctgatggccttaatttcctttttgacactgaaagttttgtaaaagaaatcatgtccatacactttgttgcaagatgtgaattattgacactgaacttaataactgtgtactgttcggaaggggttcctcaaattttttgactttttttgtatgtgtgttttttctttttttttaagttcttatgaggaggggagggtaaataaaccactgtgcgtcttggtgtaatttgaagattgccccatctagactagcaatctcttcattattctctgctatatataaaacggtgctgtgagggaggggaaaagcatttttcaatatattgaacttttgtactgaatttttttgtaataagcaatcaaggttataattttttttaaaatagaaattttgtaagaaggcaatattaacctaatcaccatgtaagcactctggatgatggattccacaaaacttggttttatggttacttcttctcttagattcttaattcatgaggagggtgggggagggaggtggagggagggaagggtttctctattaaaatgcattcgttgtgttttttaagatagtgtaacttgcttaaatttcttatgtgacattaacaaataaaaaagctcttttaatattga

SEQ ID NO: 61529 - DNA, 1466 bp, Homo sapiens
taagttatcaaaagaggttattgaacaatggttttcaaattgagctgcacattagaattactttaaaattatatatagatagctaccctttcccagtaaaatgagaaattcttatttgattgatcaagggacctagatcagaatttgttttaaactcctcaggatctgaatgtgtagccagagttgacaattactgttctggaatttgttggggggtattctagaaagaagtccataaaagaaggttagaggccagatacggtggctcacgcctgtaatcccagcactttgggaggccaagggcaggtggatcacttgaggccaggagttcaagaccagcctggctaacgtggtggtgatgcacacctgtagtcgcagctgctcgggaggctgaggcatgagaatcgcttgaacccaggaggtagaggttgcagtgagccaagattgcaccactgcactccagcctgggcaacagagtgagactctatctcaaacaaacaaagaaaaagaaaaaaagaaaaggttagaaaagatgagagatgataaagggtccatttgaggttaggtaatatggtttggtatccctgtagttaaaagtttttgtcttattttagaatactgtgatctatttctttagtattaatttttccttctgttttcctcatcagggaaccccaagagcatccaatagaagctgtgcaattatgtaaaattttcaactgtcttcctcaaaataaagaagtatggtaatccttacctgtatacagtgcagagccttctcagaagcacagaatatttttatatttcctttatgtgaatttttaagctgcaaatctgatggccttaatttcctttttgacactgaaagttttgtaaaagaaatcatgtccatacactttgttgcaagatgtgaattattgacactgaacttaataactgtgtactgttcggaaggggttcctcaaattttttgactttttttgtatgtgtgttttttctttttttttaagttcttatgaggaggggagggtaaataaaccactgtgcgtcttggtgtaatttgaagattgccccatctagactagcaatctcttcattattctctgctatatataaaacggtgctgtgagggaggggaaaagcatttttcaatatattgaacttttgtactgaatttttttgtaataagcaatcaaggttataattttttttaaaatagaaattttgtaagaaggcaatattaacctaatcaccatgtaagcactctggatgatggattccacaaaacttggttttatggttacttcttctcttagattcttaattcatgaggagggtgggggagggaggtggagggagggaagggtttctctattaaaatgcattcgttgtgttttttaagatagtgtaacttgcttaaatttcttatgtgacattaacaaataaaaaagctcttttaatattga

SEQ ID NO: 61530 - DNA, 1019 bp, Homo sapiens
ctcccttccaccgcctcccttccccagcactagttctctgtctctcccttccaccgctcccttccaccagcctcccttccagcagctcccttccaccagcctcccttccaccagcctcccttccaccagcctcccttccaccagcctcccttccaccagcctcccttccaccagcctcccttccaccagcctcccttccaccagctcccttccaccagcagggaaccccaagagcatccaatagaagctgtgcaattatgtaaaattttcaactgtcttcctcaaaataaagaagtatggtaatccttacctgtatacagtgcagagccttctcagaagcacagaatatttttatatttcctttatgtgaatttttaagctgcaaatctgatggccttaatttcctttttgacactgaaagttttgtaaaagaaatcatgtccatacactttgttgcaagatgtgaattattgacactgaacttaataactgtgtactgttcggaaggggttcctcaaattttttgactttttttgtatgtgtgttttttctttttttttaagttcttatgaggaggggagggtaaataaaccactgtgcgtcttggtgtaatttgaagattgccccatctagactagcaatctcttcattattctctgctatatataaaacggtgctgtgagggaggggaaaagcatttttcaatatattgaacttttgtactgaatttttttgtaataagcaatcaaggttataattttttttaaaatagaaattttgtaagaaggcaatattaacctaatcaccatgtaagcactctggatgatggattccacaaaacttggttttatggttacttcttctcttagattcttaattcatgaggagggtgggggagggaggtggagggagggaagggtttctctattaaaatgcattcgttgtgttttttaagatagtgtaacttgcttaaatttcttatgtgacattaacaaataaaaaagctcttttaatattga

SEQ ID NO: 61531 - DNA, 2409 bp, Homo sapiens
gctccgtgcagcctgagaggaaacaaagtgctgcgagcaggagacggcggcggcgcgaaccctgctgggcctccagtcaccctcgtcttgcattttcccgcgtgcgtgtgtgagtgggtgtgtgtgttttcttacaaagggtatttcgcgatcgatcgattgattcgtagttcccccccgcgcgcctttgccctttgtgctgtaatcgagctcccgccatcccaggtgcttctccgttcctctaaacgccagcgtctggacgtgagcgcaggtcgccggtttgtgccttcggtccccgcttcgccccctgccgtcccctccttatcacggtcccgctcgcggcctcgccgccccgctgtctccgccgcccgccatggcgactgcgacccccgtgccgccgcggatgggcagccgcgctggcggccccaccacgccgctgagccccacgcgcctgtcgcggctccaggagaaggaggagctgcgcgagctcaatgaccggctggcggtgtacatcgacaaggtgcgcagcctggagacggagaacagcgcgctgcagctgcaggtgacggagcgcgaggaggtgcgcggccgtgagctcaccggcctcaaggcgctctacgagaccgagctggccgacgcgcgacgcgcgctcgacgacacggcccgcgagcgcgccaagctgcagatcgagctgggcaagtgcaaggcggaacacgaccagctgctcctcaactatgctaagaaggaatctgatcttaatggcgcccagatcaagcttcgagaatatgaagcagcactgaattcgaaagatgcagctcttgctactgcacttggtgacaaaaaaagtttagagggagatttggaggatctgaaggatcagattgcccagttggaagcctccttagctgcagccaaaaaacagttagcagatgaaactttacttaaagtagatttggagaatcgttgtcagagccttactgaggacttggagtttcgcaaaagcatgtatgaagaggagattaacgagaccagaaggaagcatgaaacgcgcttggtagaggtggattctgggcgtcaaattgagtatgagtacaagctggcgcaagcccttcatgagatgagagagcaacatgatgcccaagtgaggctgtataaggaggagctggagcagacttaccatgccaaacttgagaatgccagactgtcatcagagatgaatacttctactgtcaacagtgccagggaagaactgatggaaagccgcatgagaattgagagcctttcatcccagctttctaatctacagaaagagtctagagcatgtttggaaaggattcaagaattagaggacttgcttgctaaagaaaaagacaactctcgtcgcatgctgacagacaaagagagagagatggcggaaataagggatcaaatgcagcaacagctgaatgactatgaacagcttcttgatgtaaagttagccctggacatggaaatcagtgcttacaggaaactcttagaaggcgaagaagagaggtaaggaacttaagggtcaccctaccttatggtccactttttgcctctcaccctttttattgaaataaaaataaatagcattttaaaaagaactttattttcttggtcatttctttgaacacctaggtatagaagtagtaatagatcatatttctacctcatcgcagaaaatgttgctcaagtactcttagtttatttattattattactttaaatgctgaactgcatcaggatggattagttcctttgagattttaagtgttttggtgatttaatatattgtaaaatgccaaactggctgaaagagactttacatattatttatttatttatttatttatttatttatttatctatttatatgtgagacagagtcgtcaggcctgttgcccaggctagagtgcagtggtgtgattctcggctcactgcaaccttcacctcctggtttcaagcgatttgcctacctcagcctcctgagtaactgggattacaggcgtgtgtcaccacacccggctaattttgtttttagtagagaagaggtttcaccatgttggccaggctggtctcaaactcctgactgcaagtgacccacccgcctcagcctcccaaagtgctgttgggttacagacatgagcctctgtgcccagcccttgtttttttgtttttttttttttttccttttttgaaacgagtctcactccgtcacccaggctggagtgcagtgcagtggcacgatctcagctcactgcaaccactgcctcctgagttcaagcgattctcctgtcacagcctcccaagttgctgggactacaggcgcatgccatcaagcccagctaagtttgtatttttagtagaggctcccccatgaagctgtcc

SEQ ID NO: 61532 - DNA, 519 bp, Homo sapiens
gtgcgtcttggtgtaatttgaagattgccccatctagactagcaatctcttcattattctctgctatatataaaacggtgctgtgagggaggggaaaagcatttttcaatatattgaacttttgtactgaatttttttgtaataagcaatcaaggttataattttttttaaaatagaaattttgtaagaaggcaatattaacctaatcaccatgtaagcactctggatgatggattccacaaaacttggttttatggttacttcttctcttagattcttaattcatgaggagggtgggggagggaggtggagggagggaagggtttctctattaaaatgcattcgttgtgttttttaagatagtgtaacttgcttaaatttcttatgtgacattaacaaataaaaaagctcttttaatattgatatactgtcctttttaacgctttaaaaacagattttgaggggagaaaagtattgtttcagttttgcttttgataaaaatataatttgacttctttg

SEQ ID NO: 61533 - DNA, 2890 bp, Homo sapiens
gctccgtgcagcctgagaggaaacaaagtgctgcgagcaggagacggcggcggcgcgaaccctgctgggcctccagtcaccctcgtcttgcattttcccgcgtgcgtgtgtgagtgggtgtgtgtgttttcttacaaagggtatttcgcgatcgatcgattgattcgtagttcccccccgcgcgcctttgccctttgtgctgtaatcgagctcccgccatcccaggtgcttctccgttcctctaaacgccagcgtctggacgtgagcgcaggtcgccggtttgtgccttcggtccccgcttcgccccctgccgtcccctccttatcacggtcccgctcgcggcctcgccgccccgctgtctccgccgcccgccatggcgactgcgacccccgtgccgccgcggatgggcagccgcgctggcggccccaccacgccgctgagccccacgcgcctgtcgcggctccaggagaaggaggagctgcgcgagctcaatgaccggctggcggtgtacatcgacaaggtgcgcagcctggagacggagaacagcgcgctgcagctgcaggtgacggagcgcgaggaggtgcgcggccgtgagctcaccggcctcaaggcgctctacgagaccgagctggccgacgcgcgacgcgcgctcgacgacacggcccgcgagcgcgccaagctgcagatcgagctgggcaagtgcaaggcggaacacgaccagctgctcctcaactatgctaagaaggaatctgatcttaatggcgcccagatcaagcttcgagaatatgaagcagcactgaattcgaaagatgcagctcttgctactgcacttggtgacaaaaaaagtttagagggagatttggaggatctgaaggatcagattgcccagttggaagcctccttagctgcagccaaaaaacagttagcagatgaaactttacttaaagtagatttggagaatcgttgtcagagccttactgaggacttggagtttcgcaaaagcatgtatgaagaggagattaacgagaccagaaggaagcatgaaacgcgcttggtagaggtggattctgggcgtcaaattgagtatgagtacaagctggcgcaagcccttcatgagatgagagagcaacatgatgcccaagtgaggctgtataaggaggagctggagcagacttaccatgccaaacttgagaatgccagactgtcatcagagatgaatacttctactgtcaacagtgccagggaagaactgatggaaagccgcatgagaattgagagcctttcatcccagctttctaatctacagaaagagtctagagcatgtttggaaaggattcaagaattagaggacttgcttgctaaagaaaaagacaactctcgtcgcatgctgacagacaaagagagagagatggcggaaataagggatcaaatgcagcaacagctgaatgactatgaacagcttcttgatgtaaagttagccctggacatggaaatcagtgcttacaggaaactcttagaaggcgaagaagagaggttgaagctgtctccaagcccttcttcccgtgtgacagtatcccgagcatcctcaagtcgtagtgtacgtacaactagaggaaagcggaagagggttgatgtggaagaatcagaggcgagtagtagtgttagcatctctcattccgcctcagccactggaaatgtttgcatcgaagaaattgatgttgatgggaaatttatccgcttgaagaacacttctgaacaggatcaaccaatgggaggctgggagatgatcagaaaaattggagacacatcagtcagttataaatatacctcaagatatgtgctgaaggcaggccagactgttacaatttgggctgcaaacgctggtgtcacagccagccccccaactgacctcatctggaagaaccagaactcgtggggcactggcgaagatgtgaaggttatattgaaaaattctcagggagaggaggttgctcaaagaagtacagtctttaaaacaaccatacctgaagaagaggaggaggaggaagaagcagctggagtggttgttgaggaagaacttttccaccagcagggaaccccaagagcatccaatagaagctgtgcaattatgtaaaattttcaactgtcttcctcaaaataaagaagtatggtaatccttacctgtatacagtgcagagccttctcagaagcacagaatatttttatatttcctttatgtgaatttttaagctgcaaatctgatggccttaatttcctttttgacactgaaagttttgtaaaagaaatcatgtccatacactttgttgcaagatgtgaattattgacactgaacttaataactgtgtactgttcggaaggggttcctcaaattttttgactttttttgtatgtgtgttttttctttttttttaagttcttatgaggaggggagggtaaataaaccactgtgcgtcttggtgtaatttgaagattgccccatctagactagcaatctcttcattattctctgctatatataaaacggtgctgtgagggaggggaaaagcatttttcaatatattgaacttttgtactgaatttttttgtaataagcaatcaaggttataattttttttaaaatagaaattttgtaagaaggcaatattaacctaatcaccatgtaagcactctggatgatggattccacaaaacttggttttatggttacttcttctcttagattcttaattcatgaggagggtgggggagggaggtggagggagggaagggtttctctattaaaatgcattcgttgtgttttttaagatagtgtaacttgcttaaatttcttatgtgacattaacaaataaaaaagctcttttaatattga

SEQ ID NO: 61534 - DNA, 3629 bp, Homo sapiens
gctccgtgcagcctgagaggaaacaaagtgctgcgagcaggagacggcggcggcgcgaaccctgctgggcctccagtcaccctcgtcttgcattttcccgcgtgcgtgtgtgagtgggtgtgtgtgttttcttacaaagggtatttcgcgatcgatcgattgattcgtagttcccccccgcgcgcctttgccctttgtgctgtaatcgagctcccgccatcccaggtgcttctccgttcctctaaacgccagcgtctggacgtgagcgcaggtcgccggtttgtgccttcggtccccgcttcgccccctgccgtcccctccttatcacggtcccgctcgcggcctcgccgccccgctgtctccgccgcccgccatggcgactgcgacccccgtgccgccgcggatgggcagccgcgctggcggccccaccacgccgctgagccccacgcgcctgtcgcggctccaggagaaggaggagctgcgcgagctcaatgaccggctggcggtgtacatcgacaaggtgcgcagcctggagacggagaacagcgcgctgcagctgcaggtgacggagcgcgaggaggtgcgcggccgtgagctcaccggcctcaaggcgctctacgagaccgagctggccgacgcgcgacgcgcgctcgacgacacggcccgcgagcgcgccaagctgcagatcgagctgggcaagtgcaaggcggaacacgaccagctgctcctcaactatgctaagaaggaatctgatcttaatggcgcccagatcaagcttcgagaatatgaagcagcactgaattcgaaagatgcagctcttgctactgcacttggtgacaaaaaaagtttagagggagatttggaggatctgaaggatcagattgcccagttggaagcctccttagctgcagccaaaaaacagttagcagatgaaactttacttaaagtagatttggagaatcgttgtcagagccttactgaggacttggagtttcgcaaaagcatgtatgaagaggagattaacgagaccagaaggaagcatgaaacgcgcttggtagaggtggattctgggcgtcaaattgagtatgagtacaagctggcgcaagcccttcatgagatgagagagcaacatgatgcccaagtgaggctgtataaggaggagctggagcagacttaccatgccaaacttgagaatgccagactgtcatcagagatgaatacttctactgtcaacagtgccagggaagaactgatggaaagccgcatgagaattgagagcctttcatcccagctttctaatctacagaaagagtctagagcatgtttggaaaggattcaagaattagaggacttgcttgctaaagaaaaagacaactctcgtcgcatgctgacagacaaagagagagagatggcggaaataagggatcaaatgcagcaacagctgaatgactatgaacagcttcttgatgtaaagttagccctggacatggaaatcagtgcttacaggaaactcttagaaggcgaagaagagaggttgaagctgtctccaagcccttcttcccgtgtgacagtatcccgagcatcctcaagtcgtagtgtacgtacaactagaggaaagcggaagagggttgatgtggaagaatcagaggcgagtagtagtgttagcatctctcattccgcctcagccactggaaatgtttgcatcgaagaaattgatgttgatgggaaatttatccgcttgaagaacacttctgaacaggatcaaccaatgggaggctgggagatgatcagaaaaattggagacacatcagtcagttataaatatacctcaagatatgtgctgaaggcaggccagactgttacaatttgggctgcaaacgctggtgtcacagccagccccccaactgacctcatctggaagaaccagaactcgtggggcactggcgaagatgtgaaggttatattgaaaaattctcagggagaggaggttgctcaaagaagtacagtctttaaaacaaccatacctgaagaagaggaggaggaggaagaagcagctggagtggttgttgaggaagaacttttccaccagcagggaaccccaagagcatccaatagaagctgtgcaattatgtaaaattttcaactgtcttcctcaaaataaagaagtatggtaatccttacctgtatacagtgcagagccttctcagaagcacagaatatttttatatttcctttatgtgaatttttaagctgcaaatctgatggccttaatttcctttttgacactgaaagttttgtaaaagaaatcatgtccatacactttgttgcaagatgtgaattattgacactgaacttaataactgtgtactgttcggaaggggttcctcaaattttttgactttttttgtatgtgtgttttttctttttttttaagttcttatgaggaggggagggtaaataaaccactgtgcgtcttggtgtaatttgaagattgccccatctagactagcaatctcttcattattctctgctatatataaaacggtgctgtgagggaggggaaaagcatttttcaatatattgaacttttgtactgaatttttttgtaataagcaatcaaggttataattttttttaaaatagaaattttgtaagaaggcaatattaacctaatcaccatgtaagcactctggatgatggattccacaaaacttggttttatggttacttcttctcttagattcttaattcatgaggagggtgggggagggaggtggagggagggaagggtttctctattaaaatgcattcgttgtgttttttaagatagtgtaacttgcttaaatttcttatgtgacattaacaaataaaaaagctcttttaatattgaaaacacaaaaaaaaaaaaaaaaaaaaaaaaaaaaaaaaaaaaaaaacaaaaaacacacacaacacaacaaacaaaaaaaaaaaaaaaaaaaaaaaaaaaaaataaaactacgcggcgcactacacctatacattcactcttccacatagcccaacaaaaataaacatctaaccactattgtcataacaaacaatgctctacataataaggcggggactgtatatatataataacaagaacgactgggtgcgctatattttctataacacgaggtgtggtctggtataacaatctcggatcaaatcgtatactcttttatgcagaggacgcaccttattttctgtgggagtgccatccaaaacaataaggagcagacaacactacatcaacaaacgtatacccacacccgacagcggcaacatctatcaacctctcataagcagataactatactcgtgctacaacaacaagagaaatataagccggcagcacgcaaaaaaaagtttgcaccacgctagtaagataactaaaaaaagaaaaaataaacggaggaggcacaacaaatacaactaatagccagcgcgcccacgtcaacaaacacaagataccgaaaccagatacccaacgtcctaagatcacagcaagcggcagtgcatgagccccagcgcagccagcataagttcagcagcagtgtacacgtcctagcatcacttctcacgaaaaaacatcacacaacccc

SEQ ID NO: 61535 - DNA, 2582 bp, Homo sapiens
gctccgtgcagcctgagaggaaacaaagtgctgcgagcaggagacggcggcggcgcgaaccctgctgggcctccagtcaccctcgtcttgcattttcccgcgtgcgtgtgtgagtgggtgtgtgtgttttcttacaaagggtatttcgcgatcgatcgattgattcgtagttcccccccgcgcgcctttgccctttgtgctgtaatcgagctcccgccatcccaggtgcttctccgttcctctaaacgccagcgtctggacgtgagcgcaggtcgccggtttgtgccttcggtccccgcttcgccccctgccgtcccctccttatcacggtcccgctcgcggcctcgccgccccgctgtctccgccgcccgccatggcgactgcgacccccgtgccgccgcggatgggcagccgcgctggcggccccaccacgccgctgagccccacgcgcctgtcgcggctccaggagaaggaggagctgcgcgagctcaatgaccggctggcggtgtacatcgacaaggtgcgcagcctggagacggagaacagcgcgctgcagctgcaggtgacggagcgcgaggaggtgcgcggccgtgagctcaccggcctcaaggcgctctacgagaccgagctggccgacgcgcgacgcgcgctcgacgacacggcccgcgagcgcgccaagctgcagatcgagctgggcaagtgcaaggcggaacacgaccagctgctcctcaactatgctaagaaggaatctgatcttaatggcgcccagatcaagcttcgagaatatgaagcagcactgaattcgaaagatgcagctcttgctactgcacttggtgacaaaaaaagtttagagggagatttggaggatctgaaggatcagattgcccagttggaagcctccttagctgcagccaaaaaacagttagcagatgaaactttacttaaagtagatttggagaatcgttgtcagagccttactgaggacttggagtttcgcaaaagcatgtatgaagaggagattaacgagaccagaaggaagcatgaaacgcgcttggtagaggtggattctgggcgtcaaattgagtatgagtacaagctggcgcaagcccttcatgagatgagagagcaacatgatgcccaagtgaggctgtataaggaggagctggagcagacttaccatgccaaacttgagaatgccagactgtcatcagagatgaatacttctactgtcaacagtgccagggaagaactgatggaaagccgcatgagaattgagagcctttcatcccagctttctaatctacagaaagagtctagagcatgtttggaaaggattcaagaattagaggacttgcttgctaaagaaaaagacaactctcgtcgcatgctgacagacaaagagagagagatggcggaaataagggatcaaatgcagcaacagctgaatgactatgaacagcttcttgatgtaaagttagccctggacatggaaatcagtgcttacaggaaactcttagaaggcgaagaagagaggttgaagctgtctccaagcccttcttcccgtgtgacagtatcccgagcatcctcaagtcgtagtgtacgtacaactagaggaaagcggaagagggttgatgtggaagaatcagaggcgagtagtagtgttagcatctctcattccgcctcagccactggaaatgtttgcatcgaagaaattgatgttgatgggaaatttatccgcttgaagaacacttctgaacaggatcaaccaatgggaggctgggagatgatcagaaaaattggagacacatcagtcagttataaatatacctcaagatatgtgctgaaggcaggccagactgttacaatttgggctgcaaacgctggtgtcacagccagccccccaactgacctcatctggaagaaccagaactcgtggggcactggcgaagatgtgaaggttatattgaaaaattctcagggagaggaggttgctcaaagaagtacagtctttaaaacaaccatacctgaagaagaggaggaggaggaagaagcagctggagtggttgttgaggaagaacttttccaccagcagggaaccccaagagcatccaatagaagctgtgcaattatgtaaaattttcaactgtcttcctcaaaataaagaagtatggtaatccttacctgtatacagtgcagagccttctcagaagcacagaatatttttatatttcctttatgtgaatttttaagctgcaaatctgatggccttaatttcctttttgacactgaaagttttgtaaaagaaatcatgtccatacactttgttgcaagatgtgaattattgacactgaacttaataactgtgtactgttcggaaggggttcctcaaattttttgactttttttgtatgtgtgttttttctttttttttaagttcttatgaggaggggagggtaaataaaccactgtgcgtcttggtgtaatttgaagattgccccatctagactagcaatctcttcattattctctgctatatataaaacggtgctgtttgttgaggtagcactggtaccggagctcga

SEQ ID NO: 61536 - DNA, 2412 bp, Homo sapiens
gctccgtgcagcctgagaggaaacaaagtgctgcgagcaggagacggcggcggcgcgaaccctgctgggcctccagtcaccctcgtcttgcattttcccgcgtgcgtgtgtgagtgggtgtgtgtgttttcttacaaagggtatttcgcgatcgatcgattgattcgtagttcccccccgcgcgcctttgccctttgtgctgtaatcgagctcccgccatcccaggtgcttctccgttcctctaaacgccagcgtctggacgtgagcgcaggtcgccggtttgtgccttcggtccccgcttcgccccctgccgtcccctccttatcacggtcccgctcgcggcctcgccgccccgctgtctccgccgcccgccatggcgactgcgacccccgtgccgccgcggatgggcagccgcgctggcggccccaccacgccgctgagccccacgcgcctgtcgcggctccaggagaaggaggagctgcgcgagctcaatgaccggctggcggtgtacatcgacaaggtgcgcagcctggagacggagaacagcgcgctgcagctgcaggtgacggagcgcgaggaggtgcgcggccgtgagctcaccggcctcaaggcgctctacgagaccgagctggccgacgcgcgacgcgcgctcgacgacacggcccgcgagcgcgccaagctgcagatcgagctgggcaagtgcaaggcggaacacgaccagctgctcctcaactatgctaagaaggaatctgatcttaatggcgcccagatcaagcttcgagaatatgaagcagcactgaattcgaaagatgcagctcttgctactgcacttggtgacaaaaaaagtttagagggagatttggaggatctgaaggatcagattgcccagttggaagcctccttagctgcagccaaaaaacagttagcagatgaaactttacttaaagtagatttggagaatcgttgtcagagccttactgaggacttggagtttcgcaaaagcatgtatgaagaggagattaacgagaccagaaggaagcatgaaacgcgcttggtagaggtggattctgggcgtcaaattgagtatgagtacaagctggcgcaagcccttcatgagatgagagagcaacatgatgcccaagtgaggctgtataaggaggagctggagcagacttaccatgccaaacttgagaatgccagactgtcatcagagatgaatacttctactgtcaacagtgccagggaagaactgatggaaagccgcatgagaattgagagcctttcatcccagctttctaatctacagaaagagtctagagcatgtttggaaaggattcaagaattagaggacttgcttgctaaagaaaaagacaactctcgtcgcatgctgacagacaaagagagagagatggcggaaataagggatcaaatgcagcaacagctgaatgactatgaacagcttcttgatgtaaagttagccctggacatggaaatcagtgcttacaggaaactcttagaaggcgaagaagagaggttgaagctgtctccaagcccttcttcccgtgtgacagtatcccgagcatcctcaagtcgtagtgtacgtacaactagaggaaagcggaagagggttgatgtggaagaatcagaggcgagtagtagtgttagcatctctcattccgcctcagccactggaaatgtttgcatcgaagaaattgatgttgatgggaaatttatccgcttgaagaacacttctgaacaggatcaaccaatgggaggctgggagatgatcagaaaaattggagacacatcagtcagttataaatatacctcaagatatgtgctgaaggcaggccagactgttacaatttgggctgcaaacgctggtgtcacagccagccccccaactgacctcatctggaagaaccagaactcgtggggcactggcgaagatgtgaaggttatattgaaaaattctcagggagaggaggttgctcaaagaagtacagtctttaaaacaaccatacctgaagaagaggaggaggaggaagaagcagctggagtggttgttgaggaagaacttttccaccagcagggaaccccaagagcatccaatagaagctgtgcaattatgtaaaattttcaactgtcttcctcaaaataaagaagtatggtaatccttacctgtatacagtgcagagccttctcagaagcacagaatatttttatatttcctttatgtgaatttttaagctgcaaatctgatggccttaatttcctttttgacactgaaagttttgtaaaagaaatcatgtccatacactttgttgcaagatgtgaattattgacactgaacttaataactgtgtactgttcggaaggggttctccgcgtcgtctgtttatcctcaagagt

SEQ ID NO: 61537 - DNA, 1270 bp, Homo sapiens
gctccgtgcagcctgagaggaaacaaagtgctgcgagcaggagacggcggcggcgcgaaccctgctgggcctccagtcaccctcgtcttgcattttcccgcgtgcgtgtgtgagtgggtgtgtgtgttttcttacaaagggtatttcgcgatcgatcgattgattcgtagttcccccccgcgcgcctttgccctttgtgctgtaatcgagctcccgccatcccaggtgcttctccgttcctctaaacgccagcgtctggacgtgagcgcaggtcgccggtttgtgccttcggtccccgcttcgccccctgccgtcccctccttatcacggtcccgctcgcggcctcgccgccccgctgtctccgccgcccgccatggcgactgcgacccccgtgccgccgcggatgggcagccgcgctggcggccccaccacgccgctgagccccacgcgcctgtcgcggctccaggagaaggaggagctgcgcgagctcaatgaccggctggcggtgtacatcgacaaggtgcgcagcctggagacggagaacagcgcgctgcagctgcaggtgacggagcgcgaggaggtgcgcggccgtgagctcaccggcctcaaggcgctctacgagaccgagctggccgacgcgcgacgcgcgctcgacgacacggcccgcgagcgcgccaagctgcagatcgagctgggcaagtgcaaggcggaacacgaccagctgctcctcaactatgctaagaaggaatctgatcttaatggcgcccagatcaagcttcgagaatatgaagcagcactgaattcgaaagatgcagctcttgctactgcacttggtgacaaaaaaagtttagagggagatttggaggatctgaaggatcagattgcccagttggaagcctccttagctgcagccaaaaaacagttagcagatgaaactttacttaaagtagatttggagaatcgttgtcagagccttactgaggacttggagtttcgcaaaagcatgtatgaagaggtaactatatataattttgctttgtaaaggaatggaggggttctagaatgactttgtcatagctaaacatgtaattatattttatttatgatttctttgccacaaaaatatatcagataaagaaataataaggtttggggatggggagaaattttgcaggtagattattcaagctactgctgctaaaagaccgcatttgagaactcaagctgttaccgtaaacagatatgatttcacttcatcttacttattttt

SEQ ID NO: 61538 - DNA, 392 bp, Homo sapiens
aagttgtggcactcagtgcacatatatgctttttctagaaaggatgagaagacctggatttatcactgggacaagctagagaaggctcagcaaatgctgagctcctgttcaggacaccaggtctattttttgtctgcacatttagtgccctaatgcaggttaatgagaagccaggcagtcaagtcaccactggaagagtgcactgtcaatcccttctggggagaagcatgaaactgcttttttagccccttctctgtactgctcatgggagtgcttgtgcacccatttaaaaccaccccttcattttgtgatctggggagacttgcacattcccagtcttctctacttccagagcttagaggtttaagatatagtcctttgggtgtaagctg

SEQ ID NO: 61539 - DNA, 442 bp, Homo sapiens
ccatgggtctttttgaaactgttttcagtagatgtatgggggtttctcagtatatgtctatttattttaacatgccagaatctattttaataaaaactatacaatgaaaagctatacacagtaaatatatacgcaaataaaaactggttatacaagtctcacaaaggaaatagctttatcactttactcatacctgtttgctttattttgatttgttttgttttaagaagccagtacagacaggcacagtggctcatgcctgtaatcacagcattttgggaaggctgggatgggaggatcacttgagcccaagagtttaagactagcctgggcaacatagggacaccccatctctagaagaaaaaaaaaattagccaggcatggtggtacacacctgtggtcccagcctcaggaggctcaggtgggaggattgcttgagcct

SEQ ID NO: 61540 - DNA, 503 bp, Homo sapiens
attatttttaaaccaacctaatatattgtattaggtattaaagtcatctggacatgaattaaagtatatgatgccagcctggacaaaaggcaaaaccctgtctctacaaaaaatacaaaaattagctgggcatggtggtgtgtgcctgtagtcctggctactccggagcctgaggtgggaggatcgcttgagtctgggaggcagaggctgcattgagctatgatcatggcactgcattccagcctgggtgacagtgcaagaccttgtctcagaataaataaagtatgtgatgaagatgtgcatacattatatgcaaatactgttttttttttttttaatttaaacagtctcactgtgttgcccaggatggagtgcaatggcacagtcttggctcatggcaaactctgcctcgcaagcagctgggactacaggcatgctccacggtgcccagttaattttttttgtattcttagtggagacagggtttcaccatgttggccagg

SEQ ID NO: 61541 - DNA, 807 bp, Homo sapiens
gattgatccacatggacatggagagatgaccaggaaacagttacatttaagcaaatttccatgtgcgttttagtatgtgatgatccattttgtagaataaaattatatatccatcacagggcaaatgtgatattgttattaaaagaaattaggtgcttcacaaatcttaaacattacagcattctcaggtcattaagttattataatattctatctaattaacataaaaaattcaatttaaaacccagaagaagaacatcattcagggtcaaggtttgtttgttggatgagaagaaatatacattcgttataaccgtgttttgttttcaataaatatgaaaaagtattcctttcaaaacattacactctggattggtgatgttcttttcccaatgagcatacctttgtaaaataaaatttactttactttgtctattacttggtatctctctgtctcttttacttttgattgtggagaatttcaaacatgcagggaagtcagcagcccagtaaaatgaatgccctcgtggcctatggtctcaataaccatcaacccttggccagtcttgccctatccacacctagattcccttccccagcccctgttcctacgtgagtttgaagcaaatcccaggcatcatttaaacacctccatttagctgggtgccatgactcatgcctgtaatcccaaccctttgggagactgaggtgggagggtcatttgaaggagtttgagaccagcctggggcaacacagtgaggacctcatctctacaaaaaattttttttaaaaacttaggctggacgt

SEQ ID NO: 61542 - DNA, 227 bp, Homo sapiens
gagaaaccctgttgaagtatcaggtaaatggtgtgacaaaattagaatcctgtcaaatcacctatccagccatcggggtcccttccttttttagactaatttctaaggtaaccagaatctaatgtatctatgttagggtctcagtaaagcaaagacgtttgtcagggcgtagactcttgagttaaattttttaatcattttttaaagcaaggcggttcttagaaagt

SEQ ID NO: 61543 - DNA, 396 bp, Homo sapiens
gagcttttaaggaaaaaattacttagtttttctagtcaaatctcaatacttgtaggataaagtccaagtctcttagctagtactgatagaattcattattcatacaataagtattttaagacattcctggccgggcatggtggctcatgcctgtaatcccagcacttagagaggctgaggcaggcagatcacttgagctcaggagttcaagaggagctggggcagcatggcgaaaccttgtctctactaaaaatacaaaagctagctgggcatggtgatgtgcacctgtagtcccagctagtcaggaggctgagatgggaggattgcttgagtcctggaggacagaactgcagtgagctgtgattacaccactgcattccagcctgggtgacagag

SEQ ID NO: 61544 - DNA, 593 bp, Homo sapiens
ccctaccccagaccactggtcctgcctcaagtgatggacataaccctctcctaggacatacatgtaaatgcacaatgtgactcattctcatacttttttgttcagctctgagccctcaaaagtgatttgtcagcagcgctggcattgcagctttgcctggctgctatctctagaggcaagtctgccacgagagggcactgcaggcgaagcagttgtgcttgctcattgcctcagcccaagtgtactcaaagaaaagaggcagccagctgtgcgtgctgtacggaaagcctcccgccctccctgcagctccccgccctcagtggcccagggctttgttgaagtggaactccccacttccaacctggtatggctccttctgcgaagggaagctgatcccagcctcctgagctgaatccttcaaaggcacagcaggcagaatgaggccacaggcaggagtggtgtgggcacactgcttaggagtcaacatcttcatcattgggctttctttaaaacgtgcactttgtaatttgaaagagaattattaaagcatactgaaaaaaggaaatttacaatttcccagccctcacaattaa

SEQ ID NO: 61545 - DNA, 555 bp, Homo sapiens
ccctaccccagaccactggtcctgcctcaagtgatggacataaccctctcctaggacatacatgtaaatgcacaatgtgactcattctcatacttttttgttcagctctgagccctcaaaagtgatttgtcagcagcgctggcattgcagctttgcctggctgctatctctagaggcaagtctgccacgagagggcactgcaggcgaagcagttgtgcttgctcattgcctcagcccaagtgtactcaaagaaaagaggcagccagctgtgcgtgctgtacggaaagcctcccgccctccctgcagctccccgccctcagtggcccagggctttgttgaagtggaactccccacttccaacctggtatggctccttctgcgaagggaagctgatcccagcctcctgagctgaatccttcaaaggcacagcaggcagaatgaggccacaggcaggagtggtgtgggcacactgcttaggagtcaacatcttcatcattgggctttctttaaaacgtgcactttgtaatttgaaagagaattattaaagcatactga

SEQ ID NO: 61546 - DNA, 2972 bp, Homo sapiens
ccccacccgaaacacactcagcccttgcactgacctgccttctgattggaggctggttgcttcggataatgacctccaggaccccactgttggttacagcctgtttgtattattcttactgcaactcaagacacctgcagcagggcgtgagaaaaagtaaaagaccagtattttcacattgccaggtaccagaaacacagaagactgacacccgccacttaagtggggccagggctggtgtctgcccatgttgccatcctgatgggctgcttgccacaatgagggatcttcttcaatacatcgcttgcttctttgcctttttctctgctgggtttttgattgtggccacctggactgactgttggatggtgaatgctgatgactctctggaggtgagcacaaaatgccgaggcctctggtgggaatgcgtcacaaatgcttttgatgggattcgcacctgtgatgagtacgattccatacttgcggagcatcccttgaagctggtggtaactcgagcgttgatgattactgcagatattctagctgggtttggatttctcaccctgctccttggtcttgactgcgtgaaattcctccctgatgagccgtacattaaagtccgcatctgctttgttgctggagccacgttactaatagcaggtaccccaggaatcattggctctgtgtggtatgctgttgatgtgtatgtggaacgttctactttggttttgcacaatatatttcttggtatccaatataaatttggttggtcctgttggctcggaatggctgggtctctgggttgctttttggctggagctgttctcacctgctgcttatatctttttaaagatgttggacctgagagaaactatccttattccttgaggaaagcctattcagccgcgggtgtttccatggccaagtcatactcagcccctcgcacagagacggccaaaatgtatgctgtagacacaagggtgtaaaatgcacgtttcagggtgtgtttgcatatgatttaatcaatcagtatggttacattgataaaatagtaagtcaatccaggaacagttatttagaattcatattgaattaaattaattgctagcttaatcaaaatgtttgattctcctatactttttctttctattactcttatattttcccgtcattctctctgctaaccttccaccttatgcacacactttccctatattttaagataagtctgctaggatgtagaaatatttgtttgtgatttctatatagctattagagattatgacatagtaatattaaaatgaaatgatacttaaacagaaagcaatttccaaagaggccagggaccctaatctttgaagagatgaagaaacttacttttctccctggcttttggttcactttttgtacttttaacaagtgggtgaattatttgataattttgaggaagattattcttttaaattcaaactagtatgtcaatgcctaccattactctgattatattaaaacagaaaaaggaaataacaacttcgtataccagccactggtgagagttaaagacaagagctgcccccccacccccaaatgtcaaaggcaaatgctaaattgatactggagctcgtggtgactttctacctcactaacaacataagggatctccatattatttcaccactattctagcttgctgatatatgccaaatgattagactacagaatagttcaaccagagaatttactcatttattgattaaacatccaaatactattgtaatatactatgttaaaattcatcaattcaagtgcccacacaccactgaatcatcagcaccaagcaatatattagacatatggcaaaattcaacaaatatattttgatataaataaataaacgttcacgactttacttaaaaaatcaatgttgcggctgggcacggtagctcgcgtctgtaatccccgcactttgggaggccaaggcgggtggatcacgaggtcaagagaatcgtttgaacccaggaggtggaggttgcagtgagcggagatcgcaccattgcactccagtctggcaacagagcgagactccatctcaaaaaacaaaaataaataaataaataaatattcttcataaaatgtgggttttggggaaaatatagaattacatatacatttaacgaagtcgctaatgacatttcattcatattcataatgtaaccatcttgaatttttttaattgtagcgattttaaaaatgtttgtaaaatttaatttccagttttctaattacttgtcagtcacattaataacattagtacctttatggtacccttgcagtacctgaaaagaatatcaacctgaaaagaatatcaactcacccagaaattagttctttgaaaaaaaagaaattaagttgtgaatttctaaagaccttgaaataagtgtttcaaatttaaagaacaaagaatgatgtgaaaatgagattatgattcctactacatgaattaacgtttcgagattgctgtttattacttcccagagtatctttaacagtattctctgaagcagttccaatctagttggagaattaacagcaattgatttaactatctcatttttattaactgtaatttactttaaaaatatttgcaaatcatactcattagttatttgatcattgttctatgcattttaaaattaattttgtgttgttcctctcaatatttgtttttaacatttattcccatttttattttatactattgtctgtcatgctttatgtattccaataagtgtcttgaaatccttgtggggaaaggcaggacaaaaataattagttaattagatttgaaaaatgtaatttttccattttaaatatttcatttgtataagaaaatatttcagagaaccatgatgataatggatatgtgtgactgttttgaatttttttctcaattaaaacattttgtatgtaat

SEQ ID NO: 61547 - DNA, 478 bp, Homo sapiens
cagagaatttactcatttattgattaaacatccaaatactattgtaatatactatgttaaaattcatcaattcaagtgcccacacaccactgaatcatcagcaccaagcaatatattagacatatggcaaaattcaacaaatatattttgatataaataaataaacgttcacgactttacttaaaaaatcaatgttgcggctgggcacggtagctcgcgtctgtaatccccgcactttgggaggccaaggcgggtggatcacgaggtcaagagacggagaccatcctggctaacatggtgaaaccctgtctctactaaaaatacaaaaattagccgggcgtggtggcggtgcctgtagtcccagctactcgggaggctgaggcaggagaatcgtttgaacccaggaggtggaggttgcagtgagcggagatcgcaccattgcactccagtctggcaacagagcgagactccatctcaa

SEQ ID NO: 61548 - DNA, 526 bp, Homo sapiens
gcagcggatcttgcaaatgttcactgcccagagcatgtgttccccactgtgcacaccctcccagccagatcctgactgctgtcatggcgtgccctctggagaaggccctggatgtgatggtgtccaccttccacaagtactcgggcaaagagggtgacaagttcaagctcaacaagtcagaactaaaggagctgctgacccgggagctgcccagcttcttggggaaaaggacagatgaagctgctttccagaagctgatgagcaacttggacagcaacagggacaacgaggtggacttccaagagtactgtgtcttcctgtcctgcatcgccatgatgtgtaacgaattctttgaaggcttcccagataagcagcccaggaagaaatgaaaactcctctgatgtggttggggggtctgccagctggggccctccctgtcgccagtgggcacttttttttttccaccctggctccttcagacacgtgcttgatgctgagcaagttcaataaagattcttggaagttt

SEQ ID NO: 61549 - DNA, 747 bp, Homo sapiens
ggcagttgaggcaggagacatcaagagagtatttgtgccctcctcgggttttaccttccagccgagattcttcccctctctacaaccctctctcctcagcgcttcttctttcttggtttgatcctgactgctgtcatggcgtgccctctggagaaggccctggatgtgatggtgtccaccttccacaagtactcgggcaaagagggtgacaagttcaagctcaacaagtcagaactaaaggagctgctgacccgggagctgcccagcttcttggggaaaaggacagatgaagctgctttccagaagctgatgagcaacttggacagcaacagggacaacgaggtggacttccaagagtactgtgtcttcctgtcctgcatcgccatgatgtgtaacgaattctttgaaggcttcccagataagcagcccaggaagaaatgaaaactcctctgatgtggttggggggtctgccagctggggccctccctgtcgccagtgggcacttttttttttccaccctggctccttcagacacgtgcttgatgctgagcaagttcaataaagattcttggaagtttaaaaacacaaaacaaaaaatgaagccggattcaattcactgggccggcgtttacaacatcgggaatggaaaaccctggcgtaccaacttaatagcctggagacatccccctttgcagctgggggaataaaaggcccgacccatcgcccttccatgggaacctgatgggg

SEQ ID NO: 61550 - DNA, 220 bp, Homo sapiens
tcaagcttctaacgatgtacggggacatgatgtgtaacgaattctttgaaggcttcccagataagcagcccaggaagaaatgaaaactcctctgatgtggttggggggtctgccagctggggccctccctgtcgccagtgggcacttttttttttccaccctggctccttcagacacgtgcttgatgctgagcaagttcaataaagattcttggaagttt

SEQ ID NO: 61551 - DNA, 707 bp, Homo sapiens
  misc_feature (641)..(641): n is a, c, g, or t
  misc_feature (643)..(643): n is a, c, g, or t
  misc_feature (655)..(655): n is a, c, g, or t
  misc_feature (663)..(664): n is a, c, g, or t
  misc_feature (667)..(667): n is a, c, g, or t
  misc_feature (673)..(673): n is a, c, g, or t
  misc_feature (675)..(675): n is a, c, g, or t
  misc_feature (684)..(684): n is a, c, g, or t
  misc_feature (686)..(686): n is a, c, g, or t
  misc_feature (693)..(693): n is a, c, g, or t
ggcagttgaggcaggagacatcaagagagtatttgtgccctcctcgggttttaccttccagccgagattcttcccctctctacaaccctctctcctcagcgcttcttctttcttggtttgatcctgactgctgtcatggcgtgccctctggagaaggccctggatgtgatggtgtccaccttccacaagtactcgggcaaagagggtgacaagttcaagctcaacaagtcagaactaaaggagctgctgacccgggagctgcccagcttcttggggaaaaggacagatgaagctgctttccagaagctgatgagcaacttggacagcaacagggacaacgaggtggacttccaagagtactgtgtcttcctgtcctgcatcgccatgatgtgtaacgaattctttgaaggcttcccagataagcagcccaggaagaaatgaaaactcctctgatgtggttggggggtctgccagctggggccctccctgtcgccagtgggcacttttttttttccaccctggctccttcagacacgtgcttgatgctgagcaagttcaataaagattcttggaagtttaaaaaaaaaaaaaaaaaaaaaaaaaaaaaaaaaaaaaaaaaaaaaaggggggggggcaaaaanancccgggggggcncaagttannggncgaccnantttttgggnanaaggggngcccaaaagggagc

SEQ ID NO: 61552 - DNA, 733 bp, Homo sapiens
ggcagttgaggcaggagacatcaagagagtatttgtgccctcctcgggttttaccttccagccgagattcttcccctctctacaaccctctctcctcagcgcttcttctttcttggtttgatcctgactgctgtcatggcgtgccctctggagaaggccctggatgtgatggtgtccaccttccacaagtactcgggcaaagagggtgacaagttcaagctcaacaagtcagaactaaaggagctgctgacccgggagctgcccagcttcttggggaaaaggacagatgaagctgctttccagaagctgatgagcaacttggacagcaacagggacaacgaggtggacttccaagagtactgtgtcttcctgtcctgcatcgccatgatgtgtaacgaattctttgaaggcttcccagataagcagcccaggaagaaatgaaaactcctctgatgtggttggggggtctgccagctggggccctccctgtcgccagtgggcacttttttttttccaccctggctccttcagacacgtgcttgatgctgagcaagttcaataaagattcttggaagtttaaaaaaaaaaaaaaaaaaaaaaaaaaaaaaaaaaaaaaaaaaaaaaaaaaaaaaaaaaaaaaaaaaaaaaaaaaaaaaaaaaaaaaaaaaaaaaaaaaaaaaaaaaaaaaaaaaaaaggggggggggcgcacaaaaaaaacccccgggggggggc

SEQ ID NO: 61553 - DNA, 627 bp, Homo sapiens
ggcagttgaggcaggagacatcaagagagtatttgtgccctcctcgggttttaccttccagccgagattcttcccctctctacaaccctctctcctcagcgcttcttctttcttggtttggtgcttctgagatgtgggcttgcacacgctgttgctatagtacgtgttgatcctgactgctgtcatggcgtgccctctggagaaggccctggatgtgatggtgtccaccttccacaagtactcgggcaaagagggtgacaagttcaagctcaacaagtcagaactaaaggagctgctgacccgggagctgcccagcttcttggggaaaaggacagatgaagctgctttccagaagctgatgagcaacttggacagcaacagggacaacgaggtggacttccaagagtactgtgtcttcctgtcctgcatcgccatgatgtgtaacgaattctttgaaggcttcccagataagcagcccaggaagaaatgaaaactcctctgatgtggttggggggtctgccagctggggccctccctgtcgccagtgggcacttttttttttccaccctggctccttcagacacgtgcttgatgctgagcaagttcaataaagattcttggaagttt

SEQ ID NO: 61554 - DNA, 715 bp, Homo sapiens
ggcagttgaggcaggagacatcaagagagtatttgtgccctcctcgggttttaccttccagccgagattcttcccctctctacaaccctctctcctcagcgcttcttctttcttggtttgatcctgactgctgtcatggcgtgccctctggagaaggccctggatgtgatggtgtccaccttccacaagtactcgggcaaagagggtgacaagttcaagctcaacaagtcagaactaaaggagctgctgacccgggagctgcccagcttcttggggaaaaggacagatgaagctgctttccagaagctgatgagcaacttggacagcaacagggacaacgaggtggacttccaagagtactgtgtcttcctgtcctgcatcgccatgatgtgtaacgaattctttgaaggcttcccagataagcagcccaggaagaaatgaaaactcctctgatgtggttggggggtctgccagctggggccctccctgtcgccagtgggcacttttttttttccaccctggctccttcagacacgtgcttgatgctgagcaagttcaataaagattcttggaagtttaaaaaaaaaaaaaaaaaaaaaaaaaaaaaaaaaaaaaaaaaaaaaaaaaaaaaaaaaaaaaaaaaaaaaaaaaaaaaaaaaaaaaaaaaaaaaaaaaaaggggggggggcgcacaaaaaaaacccccgggggggggc

SEQ ID NO: 61555 - DNA, 710 bp, Homo sapiens
  misc_feature (632)..(632): n is a, c, g, or t
  misc_feature (641)..(641): n is a, c, g, or t
  misc_feature (666)..(666): n is a, c, g, or t
ggcagttgaggcaggagacatcaagagagtatttgtgccctcctcgggttttaccttccagccgagattcttcccctctctacaaccctctctcctcagcgcttcttctttcttggtttgatcctgactgctgtcatggcgtgccctctggagaaggccctggatgtgatggtgtccaccttccacaagtactcgggcaaagagggtgacaagttcaagctcaacaagtcagaactaaaggagctgctgacccgggagctgcccagcttcttggggaaaaggacagatgaagctgctttccagaagctgatgagcaacttggacagcaacagggacaacgaggtggacttccaagagtactgtgtcttcctgtcctgcatcgccatgatgtgtaacgaattctttgaaggcttcccagataagcagcccaggaagaaatgaaaactcctctgatgtggttggggggtctgccagctggggccctccctgtcgccagtgggcacttttttttttccaccctggctccttcagacacgtgcttgatgctgagcaagttcaataaagattcttggaagtttaaaaaaaaaaaaaaaaaaaaaaaaaaaaaaaaaaaaaaaaaaaaaaaaaattanaattttatnttataggttgatttttttcaaattnttttataatcatgataataatattttagatccgttataaaaaaa

SEQ ID NO: 61556 - DNA, 604 bp, Homo sapiens
gtgtgcgtgggtgtgcatggcacacacacacatgcacgtaagacggaggaaaaaacaaacagaaaagtgagcaagtgactgaatttgagctctccaggtgcttctgagatgtgggcttgcacacgctgttgctatagtacgtgttgatcctgactgctgtcatggcgtgccctctggagaaggccctggatgtgatggtgtccaccttccacaagtactcgggcaaagagggtgacaagttcaagctcaacaagtcagaactaaaggagctgctgacccgggagctgcccagcttcttggggaaaaggacagatgaagctgctttccagaagctgatgagcaacttggacagcaacagggacaacgaggtggacttccaagagtactgtgtcttcctgtcctgcatcgccatgatgtgtaacgaattctttgaaggcttcccagataagcagcccaggaagaaatgaaaactcctctgatgtggttggggggtctgccagctggggccctccctgtcgccagtgggcacttttttttttccaccctggctccttcagacacgtgcttgatgctgagcaagttcaataaagattcttggaagttt

SEQ ID NO: 61557 - DNA, 782 bp, Homo sapiens
ggcagttgaggcaggagacatcaagagagtatttgtgccctcctcgggttttaccttccagccgagattcttcccctctctacaaccctctctcctcagcgcttcttctttcttggtttggtgcttctgagatgtgggcttgcacacgctgttgctatagtacgtgttgatcctgactgctgtcatggcgtgccctctggagaaggccctggatgtgatggtgtccaccttccacaagtactcgggcaaagagggtgacaagttcaagctcaacaagtcagaactaaaggagctgctgacccgggagctgcccagcttcttggggaaaaggacagatgaagctgctttccagaagctgatgagcaacttggacagcaacagggacaacgaggtggacttccaagagtactgtgtcttcctgtcctgcatcgccatgatgtgtaacgaattctttgaaggcttcccagataagcagcccaggaagaaatgaaaactcctctgatgtggttggggggtctgccagctggggccctccctgtcgccagtgggcacttttttttttccaccctggctccttcagacacgtgcttgatgctgagcaagttcaataaagattcttggaagtttaaaaaaaaaaaaaaaaaaaaaaaaaaaaaaaaaaaaaaaaaaaaaaaaaaaaaaaaaaaaaaaaaaaaaaaaaaaaaaaaaaaaaaaaaaaaaaaaaaaaaaaaaaaaaaaaaaaaaggggggggggcgcacaaaaaaaacccccgggggggggc

SEQ ID NO: 61558 - DNA, 578 bp, Homo sapiens
ggcagttgaggcaggagacatcaagagagtatttgtgccctcctcgggttttaccttccagccgagattcttcccctctctacaaccctctctcctcagcgcttcttctttcttggtttgatcctgactgctgtcatggcgtgccctctggagaaggccctggatgtgatggtgtccaccttccacaagtactcgggcaaagagggtgacaagttcaagctcaacaagtcagaactaaaggagctgctgacccgggagctgcccagcttcttggggaaaaggacagatgaagctgctttccagaagctgatgagcaacttggacagcaacagggacaacgaggtggacttccaagagtactgtgtcttcctgtcctgcatcgccatgatgtgtaacgaattctttgaaggcttcccagataagcagcccaggaagaaatgaaaactcctctgatgtggttggggggtctgccagctggggccctccctgtcgccagtgggcacttttttttttccaccctggctccttcagacacgtgcttgatgctgagcaagttcaataaagattcttggaagttt

SEQ ID NO: 61559 - DNA, 637 bp, Homo sapiens
gcagcggatcttgcaaatgttcactgcccagagcatgtgttccccactgtgcacaccctcccagccagatcctgactgctgtcatggcgtgccctctggagaaggccctggatgtgatggtgtccaccttccacaagtactcgggcaaagagggtgacaagttcaagctcaacaagtcagaactaaaggagctgctgacccgggagctgcccagcttcttggggaaaaggacagatgaagctgctttccagaagctgatgagcaacttggacagcaacagggacaacgaggtggacttccaagagtactgtgtcttcctgtcctgcatcgccatgatgtgtaacgaattctttgaaggcttcccagataagcagcccaggaagaaatgaaaactcctctgatgtggttggggggtctgccagctggggccctccctgtcgccagtgggcacttttttttttccaccctggctccttcagacacgtgcttgatgctgagcaagttcaataaagattcttggaagtttaaaaaaaaaaaaaaaaaaaaaaaaaaaaaaaaaaaaaaaaaaaaaaaaaaaaaaaaaaaaaaaaaaaaaaaaaggggggggggcgcacaaaaaaaacccccgggggggggc

SEQ ID NO: 61560 - DNA, 737 bp, Homo sapiens
  misc_feature (627)..(628): n is a, c, g, or t
  misc_feature (737)..(737): n is a, c, g, or t
ggcagttgaggcaggagacatcaagagagtatttgtgccctcctcgggttttaccttccagccgagattcttcccctctctacaaccctctctcctcagcgcttcttctttcttggtttgatcctgactgctgtcatggcgtgccctctggagaaggccctggatgtgatggtgtccaccttccacaagtactcgggcaaagagggtgacaagttcaagctcaacaagtcagaactaaaggagctgctgacccgggagctgcccagcttcttggggaaaaggacagatgaagctgctttccagaagctgatgagcaacttggacagcaacagggacaacgaggtggacttccaagagtactgtgtcttcctgtcctgcatcgccatgatgtgtaacgaattctttgaaggcttcccagataagcagcccaggaagaaatgaaaactcctctgatgtggttggggggtctgccagctggggccctccctgtcgccagtgggcacttttttttttccaccctggctccttcagacacgtgcttgatgctgagcaagttcaataaagattcttggaagtttaaaaaaaaaaaaaaaaaaaaaaaaaaaaaaaaaaaaaaaaaaaattaannaccgatttacaattcactgcccggcggtttaccaccgtcgggatgggaaacccctggggttcccaacttaattcgcttgaagaaatcccctttggccagctggggaaan

SEQ ID NO: 61561 - DNA, 812 bp, Homo sapiens
  misc_feature (588)..(588): n is a, c, g, or t
ggcagttgaggcaggagacatcaagagagtatttgtgccctcctcgggttttaccttccagccgagattcttcccctctctacaaccctctctcctcagcgcttcttctttcttggtttgatcctgactgctgtcatggcgtgccctctggagaaggccctggatgtgatggtgtccaccttccacaagtactcgggcaaagagggtgacaagttcaagctcaacaagtcagaactaaaggagctgctgacccgggagctgcccagcttcttggggaaaaggacagatgaagctgctttccagaagctgatgagcaacttggacagcaacagggacaacgaggtggacttccaagagtactgtgtcttcctgtcctgcatcgccatgatgtgtaacgaattctttgaaggcttcccagataagcagcccaggaagaaatgaaaactcctctgatgtggttggggggtctgccagctggggccctccctgtcgccagtgggcacttttttttttccaccctggctccttcagacacgtgcttgatgctgagcaagttcaataaagattcttggaagtttaaaaaaaaanaaaggtgaataatactctgaataaggatttctataaatacgctcagcaccaaggcctcacagaaaatcgaaagggggccaccaaaataaaaaatttcgtgaaacccctttggggcgctctggcccaaaggttttaaaattgagaaagtttttcatgggcccaatattggctaaatggccaattcccctatagggggtgttaaaatcacgagccggtgtaacagg

SEQ ID NO: 61562 - DNA, 696 bp, Homo sapiens
  misc_feature (630)..(630): n is a, c, g, or t
  misc_feature (632)..(632): n is a, c, g, or t
  misc_feature (644)..(644): n is a, c, g, or t
  misc_feature (652)..(653): n is a, c, g, or t
  misc_feature (656)..(656): n is a, c, g, or t
  misc_feature (662)..(662): n is a, c, g, or t
  misc_feature (664)..(664): n is a, c, g, or t
  misc_feature (673)..(673): n is a, c, g, or t
  misc_feature (675)..(675): n is a, c, g, or t
  misc_feature (682)..(682): n is a, c, g, or t
ggcagttgaggcaggagacatcaagagagtatttgtgccctcctcgggttttaccttccagccgagattcttcccctctctacaaccctctctcctcagcgcttcttctttcttggtttgatcctgactgctgtcatggcgtgccctctggagaaggccctggatgtgatggtgtccaccttccacaagtactcgggcaaagagggtgacaagttcaagctcaacaagtcagaactaaaggagctgctgacccgggagctgcccagcttcttggggaaaaggacagatgaagctgctttccagaagctgatgagcaacttggacagcaacagggacaacgaggtggacttccaagagtactgtgtcttcctgtcctgcatcgccatgatgtgtaacgaattctttgaaggcttcccagataagcagcccaggaagaaatgaaaactcctctgatgtggttggggggtctgccagctggggccctccctgtcgccagtgggcacttttttttttccaccctggctccttcagacacgtgcttgatgctgagcaagttcaataaagattcttggaagtttaaaaaaaaaaaaaaaaaaaaaaaaaaaaaaaaaaaggggggggggcaaaaanancccgggggggcncaagttannggncgaccnantttttgggnanaaggggngcccaaaagggagc

SEQ ID NO: 61563 - DNA, 351 bp, Homo sapiens
aggacttaggtttaaaatgtttaatccaacacaatggggaaaacagaaaatataccaataatgtgaaaagtacaagaagctacaagggtgacaagtcatatttgtttgttttttgtgcatgtgggggtttttttgttttgttttgtttttttgttttttgagacagagtttcactcttgtcgcccaggctggagtgcaatggcatgaccttggctcaccacaacctctgcctcctgggttcaagtgattctcctgactcagcctcccaagtagctgggaatacaggcacccaccaccatgcccagctaattttgtatttttagtagagacggggtttctccatgttggtca

SEQ ID NO: 61564 - DNA, 561 bp, Homo sapiens
aatatcagcctttcatttctgatatttggtctttgaagaggaaacataatgcaatagtaattcataatagtggagggttctttcctcacatccttgaaagccaccagtcttattcttcagcctggctcttgagctattgctgtattaattttaaatagggtgtgatagcataagctgatggaagcctgcagagatctcactttgaaatggtgatacattacatgggaaaagattagagaggtgttttatactgcacatcggtgaggcctaataagaaagtagaatagacgtaaaccattgttttcatcatcctttaagacagggatttcaaactcaagaaccaggcagctacctatttaaatgagtcaagtgggccctaatgtaagacaatgtgatgggtaaggattgattctgagggaacaggagcaggcatgccctctctaacagaggccgtcagttctgctgtacctgaaatgtgggcccattgttgctggcgattccacacttacatctaaaatttcctgattttttaagaatgacaataactaatttaaaaaaaaa

SEQ ID NO: 61565 - DNA, 321 bp, Homo sapiens
cacccacccatgtgaattgtatgtattagattgctcctattttaagtcagctcatcccatatatacctttcaaatgtggtgaaactgtgcagtagaaattggttttttgtcttaacctaggtaagtttttatggttttttggttttgatttattcagcttttgaaagaggaatactaggtaagtttttaaatagtatttcattttgttataataaatgataaaatagattattggcattagtcatgtagctttctgatttgggcaagactggcttgaataagtatgaatatttttggtctgctaatcatttttctaataga

SEQ ID NO: 61566 - DNA, 433 bp, Homo sapiens
gaggaaaggcaaacttacgagtataaaatggaatagaacattccaaatacggcaggaagcaaaaggccggtggtcacagtagatcacaggctgaccacagatgtgcatgctatgtttctgctagaaaggaatgttaatagcaattaaaggctattatttggggcaaatgagggtaaggaggccccagagctaggcccaggggactctggaattgctttgtgattccagagctatgaaacagctgccaggacaagttgccagggcagaagcaagcaggaggaaatgtcctgggaagggctgggccctttaagtggtggctgggccaaagcaatgaggccttcaaaagggaacggtcccaaagaagatggaggaaaggagtagagaaaggaagctggaagttcaagttatactcctgtttataatgtaatgtagg

SEQ ID NO: 61567 - DNA, 167 bp, Homo sapiens
cctgggtgacagagtgagattccatctcaaaaaaaaaaaaaaaaaaaaaaaaaaaaaaaaaaatatatatatatatatatccccacgtgctactactgcagccagctttaatgacaaatgatacctactggcttcaaggttgacccacagaaccaatacaaaatctg

SEQ ID NO: 61568 - DNA, 263 bp, Homo sapiens
tatgtggtttaaaaatggtcataaaaaggacactaaataacctgattaagctagagtatagaccaaattgccacttactttgaattgtttttaccaaaggtatcactttgaataaagataactttcatttagacatctatctttatgtgttcctgccatcatttcagtgagatcagaggaaagttaaattagaacaatgaaaaagcttaagaaatgaacaatcatcatgcttttgtgtatgcttaaagtgagtacatgtaaaa

SEQ ID NO: 61569 - DNA, 3571 bp, Homo sapiens
  misc_feature (101)..(101): n is a, c, g, or t
acagctgggagagcgcaggaaggcgccgggaaggaaagccagcccaccagcgtctgggtgggctgcgccgcgcggctggcggaccttcccgggttggagangtgcgcacgtccgcacctcaccctgcggctgacatctcctgcccaggagatgggcgctgaagcttgagcgcctgagtccctggagccacacctgcgaacaccctttgcttctattgagctgtgcccagccgcccagtgacagaattccaggacaaagagatcttcaaaaatcaaaaatgaggttcacatttacaagccggtgcttggcactgtttcttcttctaaatcacccaaccccaattcttcctgccttttcaaatcaaacctatccaacaatagagcccaagccatttctttacgtcgtaggacgaaagaagatgatggatgcacagtacaaatgctatgaccgaatgcagcagttacccgcataccaaggagaaggtccatattgcaatcgcacctgggatggatggctgtgctgggatgacacaccggctggagtattgtcctatcagttctgcccagattattttccggattttgatccatcagaaaaggttacaaaatactgtgatgaaaaaggtgtttggtttaaacatcctgaaaacaatcgaacctggtccaactatactatgtgcaatgctttcactcctgagaaactgaagaatgcatatgttctgtactatttggctattgtgggtcattctttgtcaattttcaccctagtgatttccctggggattttcgtgtttttcaggagccttggctgccaaagggtaaccctgcacaagaacatgtttcttacttacattctgaattctatgattatcatcatccacctggttgaagtagtacccaatggagagctcgtgcgaagggacccggtgagctgcaagattttgcattttttccaccagtacatgatggcctgcaactatttctggatgctctgtgaagggatctatcttcatacactcattgtcgtggctgtgtttactgagaagcaacgcttgcggtggtattatctcttgggctgggggttcccgctggtgccaaccactatccatgctattaccagggccgtgtacttcaatgacaactgctggctgagtgtggaaacccatttgctttacataatccatggacctgtcatggcggcacttgtggtcaatttcttctttttgctcaacattgtccgggtgcttgtgaccaaaatgagggaaacccatgaggcggaatcccacatgtacctgaaggctgtgaaggccaccatgatccttgtgcccctgctgggaatccagtttgtcgtctttccctggagaccttccaacaagatgcttgggaagatatatgattacgtgatgcactctctgattcatttccagggcttctttgttgcgaccatctactgcttctgcaacaatgaggtccaaaccaccgtgaagcgccaatgggcccaattcaaaattcagtggaaccagcgttgggggaggcgcccctccaaccgctctgctcgcgctgcagccgctgctgcggaggctggcgacatcccaatttacatctgccatcaggagctgaggaatgaaccagccaacaaccaaggcgaggagagtgctgagatcatccctttgaatatcatagagcaagagtcatctgcttgaatgtgaagcaaacacagtatcgtgatcactgagccatcatttcctgggagaaagaccatgcatttaaagtattctccatcctcccaggaaccgaacatatcatttgtgaagaattattcagtgaatttgtccattgtaaatctgaagaaagttattcttggtactgttgctttgggagacagtctaggaatggagtctcccactgcaacttgtgaactccatcattcatccaggactgagatgcaaatgtcacagtaatgcaagcaaagtatcaaagaaaaacaatgaaattgacctagttcagatacagggtgctccttgtcaatactgagccatttatacctttgaaatattaaaatcactgtcaatatttttatttttaactctggattttgaattagattatttctgtatttggctatggatctgatttttaatttttttaaatttcagtcaattctgatgttactgagatgttttaccatccttacaatgtaaaccacatgaactacgtgacctctgcaagacaaagcggctttctaatagagagattagtaaatatgtgaagaaaaagacctgcatttggcaggaagatgtatgctttgaatgcaaaagaaatttagagtcaatttgctgaaaacattacatgctcagcttggttttggacaagcctgtccattgggcaggacctagctgttgtaaagaattggtcttaatgttgaatgtattttggttgctgatgtttataaactgagaggtcacaaagaatctatcactaaaaatttttacaaaactgccaaaaatataattcttagtggaagacaatactccctttaaagagagtttgccactcccctaaactccaggatttataaagcaaattactccaaggtttataaagcagattacctcttgcccttgggtgctatctagcagtaaaagataaatttgttgaatattggtaattaaaagactccacataagtccattaactgctttccacccagcttcaaagcttaaaaagagctcaggcttttccaggaagatccaggagggctaattagaaatcaacttgtggttgaccgcttgtttcttgttattaccaaaacaggaggggaaaaaattaactgctccaaatttaaccataaatcaattcatgtttaacgtttctcattaaaatccagtattatattatcatatctctctttacttcccagtataagatttttgaaaatcctgaataaaccagtatcgttactggcacctgaaattaatttgtgaatttgcaacagtaatcagagttaccattatttaatttgtatgctaaatgaggaggtacattgaaaccctccaaatctccagtctcatctatgtcatattttgccactgcctttcagaagtgatttagttgtggaaagataataaattgatttgttatggttacatatttagcgcacccagagaaaattaattatatttctacagagaaaatgaatttgggatactaaagtagtttaagtctcctttactgaatgtaagggggggatcgaaaagaaggtatttttccaatcacagtgttatgtagtattgttctatttttgtttacaaacatggaaaacagagtatttctggcagctgtggtacaaatgtgataatatattgctaaaatattttagatgttattatgctaatatagtaggggttgaagaaaacaaaatagcttattatagaattgcacatagttctgcccaaattatgtgaaatgcttatgcttgtgtatatgtataaattaatacagagtacgttaaaagcaaaaagatgtatatttgcatatttttctaaagaaatatattattcatcttttcattc

SEQ ID NO: 61570 - DNA, 3608 bp, Homo sapiens
  misc_feature (241)..(241): n is a, c, g, or t
agttataagagacaggaataccagtgagaagtatgagagagtgggtgggagataatgtttagaatctcttttgctgcccgcaatttatgaaaatggcttgaaaatatttatggtcaaagaccgaaatatttcttcaaagaagattagctttgctccattaaaagtaatgagtagaaatattaaaaaaaaaaagttttaagtacctgagtatcttgccagcaactgaccaccactgctaaangtgaggagagacacagctttcatcattgggactgcagtttatttcaggacaaagagatcttcaaaaatcaaaaatgaggttcacatttacaagccggtgcttggcactgtttcttcttctaaatcacccaaccccaattcttcctgccttttcaaatcaaacctatccaacaatagagcccaagccatttctttacgtcgtaggacgaaagaagatgatggatgcacagtacaaatgctatgaccgaatgcagcagttacccgcataccaaggagaaggtccatattgcaatcgcacctgggatggatggctgtgctgggatgacacaccggctggagtattgtcctatcagttctgcccagattattttccggattttgatccatcagaaaaggttacaaaatactgtgatgaaaaaggtgtttggtttaaacatcctgaaaacaatcgaacctggtccaactatactatgtgcaatgctttcactcctgagaaactgaagaatgcatatgttctgtactatttggctattgtgggtcattctttgtcaattttcaccctagtgatttccctggggattttcgtgtttttcaggagccttggctgccaaagggtaaccctgcacaagaacatgtttcttacttacattctgaattctatgattatcatcatccacctggttgaagtagtacccaatggagagctcgtgcgaagggacccggtgagctgcaagattttgcattttttccaccagtacatgatggcctgcaactatttctggatgctctgtgaagggatctatcttcatacactcattgtcgtggctgtgtttactgagaagcaacgcttgcggtggtattatctcttgggctgggggttcccgctggtgccaaccactatccatgctattaccagggccgtgtacttcaatgacaactgctggctgagtgtggaaacccatttgctttacataatccatggacctgtcatggcggcacttgtggtcaatttcttctttttgctcaacattgtccgggtgcttgtgaccaaaatgagggaaacccatgaggcggaatcccacatgtacctgaaggctgtgaaggccaccatgatccttgtgcccctgctgggaatccagtttgtcgtctttccctggagaccttccaacaagatgcttgggaagatatatgattacgtgatgcactctctgattcatttccagggcttctttgttgcgaccatctactgcttctgcaacaatgaggtccaaaccaccgtgaagcgccaatgggcccaattcaaaattcagtggaaccagcgttgggggaggcgcccctccaaccgctctgctcgcgctgcagccgctgctgcggaggctggcgacatcccaatttacatctgccatcaggagctgaggaatgaaccagccaacaaccaaggcgaggagagtgctgagatcatccctttgaatatcatagagcaagagtcatctgcttgaatgtgaagcaaacacagtatcgtgatcactgagccatcatttcctgggagaaagaccatgcatttaaagtattctccatcctcccaggaaccgaacatatcatttgtgaagaattattcagtgaatttgtccattgtaaatctgaagaaagttattcttggtactgttgctttgggagacagtctaggaatggagtctcccactgcaacttgtgaactccatcattcatccaggactgagatgcaaatgtcacagtaatgcaagcaaagtatcaaagaaaaacaatgaaattgacctagttcagatacagggtgctccttgtcaatactgagccatttatacctttgaaatattaaaatcactgtcaatatttttatttttaactctggattttgaattagattatttctgtatttggctatggatctgatttttaatttttttaaatttcagtcaattctgatgttactgagatgttttaccatccttacaatgtaaaccacatgaactacgtgacctctgcaagacaaagcggctttctaatagagagattagtaaatatgtgaagaaaaagacctgcatttggcaggaagatgtatgctttgaatgcaaaagaaatttagagtcaatttgctgaaaacattacatgctcagcttggttttggacaagcctgtccattgggcaggacctagctgttgtaaagaattggtcttaatgttgaatgtattttggttgctgatgtttataaactgagaggtcacaaagaatctatcactaaaaatttttacaaaactgccaaaaatataattcttagtggaagacaatactccctttaaagagagtttgccactcccctaaactccaggatttataaagcaaattactccaaggtttataaagcagattacctcttgcccttgggtgctatctagcagtaaaagataaatttgttgaatattggtaattaaaagactccacataagtccattaactgctttccacccagcttcaaagcttaaaaagagctcaggcttttccaggaagatccaggagggctaattagaaatcaacttgtggttgaccgcttgtttcttgttattaccaaaacaggaggggaaaaaattaactgctccaaatttaaccataaatcaattcatgtttaacgtttctcattaaaatccagtattatattatcatatctctctttacttcccagtataagatttttgaaaatcctgaataaaccagtatcgttactggcacctgaaattaatttgtgaatttgcaacagtaatcagagttaccattatttaatttgtatgctaaatgaggaggtacattgaaaccctccaaatctccagtctcatctatgtcatattttgccactgcctttcagaagtgatttagttgtggaaagataataaattgatttgttatggttacatatttagcgcacccagagaaaattaattatatttctacagagaaaatgaatttgggatactaaagtagtttaagtctcctttactgaatgtaagggggggatcgaaaagaaggtatttttccaatcacagtgttatgtagtattgttctatttttgtttacaaacatggaaaacagagtatttctggcagctgtggtacaaatgtgataatatattgctaaaatattttagatgttattatgctaatatagtaggggttgaagaaaacaaaatagcttattatagaattgcacatagttctgcccaaattatgtgaaatgcttatgcttgtgtatatgtataaattaatacagagtacgttaaaagcaaaaagatgtatatttgcatatttttctaaagaaatatattattcatcttttcattc

SEQ ID NO: 61571 - DNA, 3690 bp, Homo sapiens
  misc_feature (101)..(101): n is a, c, g, or t
acagctgggagagcgcaggaaggcgccgggaaggaaagccagcccaccagcgtctgggtgggctgcgccgcgcggctggcggaccttcccgggttggagangtgcgcacgtccgcacctcaccctgcggctgacatctcctgcccaggagatgggcgctgaagcttgagcgcctgagtccctggagccacacctgcgaacaccctttgcttctattgagctgtgcccagccgcccagtgacagaattccagaataaatgattcccactgatccacccacttttgccaccccaggatgcaattttctggagagaagattagtggacaaagagatcttcaaaaatcaaaaatgaggttcacatttacaagccggtgcttggcactgtttcttcttctaaatcacccaaccccaattcttcctgccttttcaaatcaaacctatccaacaatagagcccaagccatttctttacgtcgtaggacgaaagaagatgatggatgcacagtacaaatgctatgaccgaatgcagcagttacccgcataccaaggagaaggtccatattgcaatcgcacctgggatggatggctgtgctgggatgacacaccggctggagtattgtcctatcagttctgcccagattattttccggattttgatccatcagaaaaggttacaaaatactgtgatgaaaaaggtgtttggtttaaacatcctgaaaacaatcgaacctggtccaactatactatgtgcaatgctttcactcctgagaaactgaagaatgcatatgttctgtactatttggctattgtgggtcattctttgtcaattttcaccctagtgatttccctggggattttcgtgtttttcagaaaattgacaactatttttcctttgaattggaaatataggaaggcattgagccttggctgccaaagggtaaccctgcacaagaacatgtttcttacttacattctgaattctatgattatcatcatccacctggttgaagtagtacccaatggagagctcgtgcgaagggacccggtgagctgcaagattttgcattttttccaccagtacatgatggcctgcaactatttctggatgctctgtgaagggatctatcttcatacactcattgtcgtggctgtgtttactgagaagcaacgcttgcggtggtattatctcttgggctgggggttcccgctggtgccaaccactatccatgctattaccagggccgtgtacttcaatgacaactgctggctgagtgtggaaacccatttgctttacataatccatggacctgtcatggcggcacttgtggtcaatttcttctttttgctcaacattgtccgggtgcttgtgaccaaaatgagggaaacccatgaggcggaatcccacatgtacctgaaggctgtgaaggccaccatgatccttgtgcccctgctgggaatccagtttgtcgtctttccctggagaccttccaacaagatgcttgggaagatatatgattacgtgatgcactctctgattcatttccagggcttctttgttgcgaccatctactgcttctgcaacaatgaggtccaaaccaccgtgaagcgccaatgggcccaattcaaaattcagtggaaccagcgttgggggaggcgcccctccaaccgctctgctcgcgctgcagccgctgctgcggaggctggcgacatcccaatttacatctgccatcaggagctgaggaatgaaccagccaacaaccaaggcgaggagagtgctgagatcatccctttgaatatcatagagcaagagtcatctgcttgaatgtgaagcaaacacagtatcgtgatcactgagccatcatttcctgggagaaagaccatgcatttaaagtattctccatcctcccaggaaccgaacatatcatttgtgaagaattattcagtgaatttgtccattgtaaatctgaagaaagttattcttggtactgttgctttgggagacagtctaggaatggagtctcccactgcaacttgtgaactccatcattcatccaggactgagatgcaaatgtcacagtaatgcaagcaaagtatcaaagaaaaacaatgaaattgacctagttcagatacagggtgctccttgtcaatactgagccatttatacctttgaaatattaaaatcactgtcaatatttttatttttaactctggattttgaattagattatttctgtatttggctatggatctgatttttaatttttttaaatttcagtcaattctgatgttactgagatgttttaccatccttacaatgtaaaccacatgaactacgtgacctctgcaagacaaagcggctttctaatagagagattagtaaatatgtgaagaaaaagacctgcatttggcaggaagatgtatgctttgaatgcaaaagaaatttagagtcaatttgctgaaaacattacatgctcagcttggttttggacaagcctgtccattgggcaggacctagctgttgtaaagaattggtcttaatgttgaatgtattttggttgctgatgtttataaactgagaggtcacaaagaatctatcactaaaaatttttacaaaactgccaaaaatataattcttagtggaagacaatactccctttaaagagagtttgccactcccctaaactccaggatttataaagcaaattactccaaggtttataaagcagattacctcttgcccttgggtgctatctagcagtaaaagataaatttgttgaatattggtaattaaaagactccacataagtccattaactgctttccacccagcttcaaagcttaaaaagagctcaggcttttccaggaagatccaggagggctaattagaaatcaacttgtggttgaccgcttgtttcttgttattaccaaaacaggaggggaaaaaattaactgctccaaatttaaccataaatcaattcatgtttaacgtttctcattaaaatccagtattatattatcatatctctctttacttcccagtataagatttttgaaaatcctgaataaaccagtatcgttactggcacctgaaattaatttgtgaatttgcaacagtaatcagagttaccattatttaatttgtatgctaaatgaggaggtacattgaaaccctccaaatctccagtctcatctatgtcatattttgccactgcctttcagaagtgatttagttgtggaaagataataaattgatttgttatggttacatatttagcgcacccagagaaaattaattatatttctacagagaaaatgaatttgggatactaaagtagtttaagtctcctttactgaatgtaagggggggatcgaaaagaaggtatttttccaatcacagtgttatgtagtattgttctatttttgtttacaaacatggaaaacagagtatttctggcagctgtggtacaaatgtgataatatattgctaaaatattttagatgttattatgctaatatagtaggggttgaagaaaacaaaatagcttattatagaattgcacatagttctgcccaaattatgtgaaatgcttatgcttgtgtatatgtataaattaatacagagtacgttaaaagcaaaaagatgtatatttgcatatttttctaaagaaatatattattcatcttttcattc

SEQ ID NO: 61572 - DNA, 389 bp, Homo sapiens
agtgatttttaaataacttgctaccacatcacttcacttcctggctctatcacttctacagtctttacagacaaaatacataggcaacatttggagaagttttttttttacaatctttatatgagtttgtagagaatgtctaaaacaatcataagtatgagattttattatacaatcattgcactttttccagatcacaacatttaaaaaattctcccaaagttaaaaaaaataaacaagtatcttgaggaacatagggaatgtaatataatattcctcaatgaaaacacagccagagaactatttggaggaaatgcattgaaacaaattacatgtatatttttaaacaactgattttccctttattagcttaaaatgttataatcatc

SEQ ID NO: 61573 - DNA, 248 bp, Homo sapiens
agcatagctctaggctataagccacagtgacccaattaattggtttttgagagtttgctgacctttggtagactaagagataaaatgaaaagtggcattccccacttttgatgattagctaaactatgtatacacagcaagttattaaagaaatgaattaagtattcacagcttgtatgggaggtgcattataacagagtgggacagagaaaagtggaagatgcccacagatgaactaccggagttgt

SEQ ID NO: 61574 - DNA, 223 bp, Homo sapiens
ttcaaataaaagaattcactaaggtaccaaaacagaaaatatacagagatcaatgactttcatatacattaacaaacaaaagttcagagataaaatggaagagaaatgctgtttttaacagtataattaagataaaatatgaaggtataaacttaacaagaaatgttgcaaaaccattatgtgaaaattacaacactcctgaagacgcagacacacctaacaa

SEQ ID NO: 61575 - DNA, 444 bp, Homo sapiens
acttatcctggcaaaccattcatcctcaattcatggatctgactgtaaggaagggtcaaattacgtacgagtcttccaaaaccagaaacctaaaggcagaaatgtggttactgttcctttagagaggatacttccaaagagaatctatacactatccaggagttctttattaatattctaagtataaatatctcagatgatccaataagcaatttgggatagtctgtaaaaatgttcaaagcctctggagacccttaaaaaaatactgacacctggctcccacccacagttattctgatccaatttaattgggtgagatctggggactgggattttaaaaactcccactcccaaactctaatgtacagcaaaatgtggaaactactgctaaagaaaatgatgtcttcaaatttgtccaccttcaagtctgggttggagagaaaa

SEQ ID NO: 61576 - DNA, 633 bp, Homo sapiens
gtagtaggggctggggataaagcaagaaagatgagaaatgaggtgtaggggtcttgcacagaccagggatgataatgggccaagaaccaaagagtatgaataattcagcctcatcttcctggggctaccccagcagagttgttgtctctgctctgaccatatcctacataggtctgtccccagcttctgcaaccttctgagactatgctaagaagccccttcagctaaggagccctttgtgctgagagctggcagtacctgggagcgtttggccccataagcagcccgcagccagtggtgatgaccaaggtgtgcaggtgtgcaggtgtgcaaaagcctcgcaccaggactgcagaggaacttgggccccagggctccctgcggacccgcggcagctgacactgcacttgtatcaacctcctgacttggctccttcccagctggtgtcacctactctccgatttctcctgggggaacttccttaacatatcatttgcacctaagactctgtctctggtgtgcttctgaggaaagccacctaaaactatttccaggatgaaaaaaaactaaaattgctatcaccaacctcatgcatgcaaagaataaaatgtactttcctataactccaccaaa

SEQ ID NO: 61577 - DNA, 395 bp, Homo sapiens
gtcacatatgccatttatacagttagtgagttacagccaagtgacagttgtgatgggaggctgtgtctggggagttacatactggtgaggaaactagaaaacatggctgtcgggccggcactgtggctcacgcctgtaatcccagcactttgggaggccgaggcgggtggatcacgaggtcaggagatcgagaccatcctggctaacacggtgaaaccccgtatctactaaaaatacaaaaaattagcggggcgtggtggtgggcgcctgtagtctcagctactcaggaggctgaggcaggagaatggcatgaacccgggaggtggagcttgcagtgagccgagatagcaccactgcactccagtctgggcgacagagtgagactctgccacaaa

SEQ ID NO: 61578 - DNA, 826 bp, Homo sapiens
acacacccctgttctgcagggtcttcagcgtggccttcattcccgcctcgcctcggcctcttttcaattaagaagtgatgccacttgaggcagggtctgcatgatcacttcttgggtttcagtttgaaagctgccatccctgcgactgcccagggcctgtatgttgggaccgaagccaaacaccactgtcctccagggggctttcggcccggggcagggtccccagtgcccgccttcgaatcagactccgcgtttccgcctctccctgggcggacctgccgctagagggcgctcctcctccgcagccggcgccggcctccagcgccccagactcccgcgctgccgcccgagcctgaggtttctcacggcgttcgggattcgcgcttcggaaaccgggaacaaagaagcaagcagcacccttcagaaacagtgttctcgctctcctagcagctggcccgggcccggaggctggtgccaggagaaggcagaagagcccgggcagccggagtgggctacggggttcaggcagtgccaaggaagaagggcctcacaatgggcaattcagctgcctcccgggccgttgtccccgctgtcttcaaacaggggtcccctgtcccagctgccccaggaggaggggggaggcaggcagggccgaaaccctccagagcccagagggggacgcttggtggccgctgcagttacataaccataggatgcttttgtaccgtggaccttgttctagcaggatcctttcggaattgcacttttacatgttgggcgaatttgtgtccgtgctgaagtttattaaaggaaaatagatggaaac

SEQ ID NO: 61579 - DNA, 772 bp, Homo sapiens
tcctcacgagtatcagagaaggcataatctgtacacgtggcttcatttaaaatgaaaatatcaagcagtgtcattttcacaagtatccccacactgtctgaggctgaaaagaagagtgtagctatgcacactgcagtaagaagaaaatttcagctcaattggaggatgtaaagattgaaataccactgctcctagttctgatgcaaaattgaaaagagtgcactgggtcttcaaatggcatattgacaaggagaaagaggaaaggatgccccaggacagcctgggggtcaaggctgggctcaggcatgcctggacaagccatgcaagttgtctccggacttgaaccacgtatcagaggagctatttgaggaggcacatcagcatacctgcttctgtgggcccccaggctgtggtgctcagcccttgcactatgaaacattttttttttccagaagccaaagctttgagcatctcctcccatgtagagagtgtatatgtttacgtccatgtctttcgccatgtgaacgcatgcaaccaccacctcaaatatcataaatcctctctctccccctttctgtctgcctgtttatctacaatctgtctatttaaattctttttaaacaagaagggaatatctttatgcctgtttgtagggatattctacatccatctgttatttacatcattcgttttcctgaggtgtctccaacaaatcctggctggatgcactgtatgtgttattaataaaacagctgtaaaaatattaactgta

SEQ ID NO: 61580 - DNA, 578 bp, Homo sapiens
tcctcacgagtatcagagaaggcataatctgtacacgtggcttcatttaaaatgaaaatatcaagcagtgtcattttcacaagtatccccacactgtctgaggctgaaaagaagagtgtagctatgcacactgcagtaagaagaaaatttcagctcaattggaggatgtaaagattgaaataccactgctcctagttctgatgcaaaattgaaaagagtggctcagcccttgcactatgaaacattttttttttccagaagccaaagctttgagcatctcctcccatgtagagagtgtatatgtttacgtccatgtctttcgccatgtgaacgcatgcaaccaccacctcaaatatcataaatcctctctctccccctttctgtctgcctgtttatctacaatctgtctatttaaattctttttaaacaagaagggaatatctttatgcctgtttgtagggatattctacatccatctgttatttacatcattcgttttcctgaggtgtctccaacaaatcctggctggatgcactgtatgtgttattaataaaacagctgtaaaaatattaactgta

SEQ ID NO: 61581 - DNA, 623 bp, Homo sapiens
ctcatgaggcaggagaatcgcttgaacccaggaggcggaagttgcagtgagctgaaattgtgtcactgcactccagcctgggtgacagagcaagactccgtccaaaaaaaaaaaaaaaaaaaaagggaccatgttctagtgtaggggtaagtggattgttttggccccaaccccaagaggatcaagggagaccactgcagctgcccgagaaattcttgccctctgacaagaaacaccctatccagtctggggaatttgccagtccaacccctccccttggctcaagattctgggaaatcctaaatagtgtttaccattggccttttatcagctccagtataaatgcgtctggccagacttgctttacaactatgcataatggatagttgggccaggcttggtggctcatgcctagtgctttgggaggccgaggtgggaggatcacttcagcccaagagttggaggccagcctaggcaacatggtgagacaccatctctacaaaaaaaaattttattttctgttttttttttgagacggagtgtggcgctgtcacccaggctggagcaacagagccagactttgtctcaaataaataaataaataaataaaacctgcaaaaaaa

SEQ ID NO: 61582 - DNA, 176 bp, Homo sapiens
  misc_feature (1)..(1): n is a, c, g, or t
  misc_feature (3)..(3): n is a, c, g, or t
ncngacaggattttgagaaacaaagggatacttttagaagactatttctctaggggtgaccctatgcacagaggccctgaagcagatgacagcagtaggaagagagggcaaaggggaaagactccatgaccttcaagagatggcacactctgattattgaatacaaaggaaaatgc

SEQ ID NO: 61583 - DNA, 178 bp, Homo sapiens
catgtttttgtaaataaagtttcactggaatgcagccacacccattggtttacatattgtctgtgcctgctttcatagcagagttgagtagttgagacagagatcctatgatctgcaagtctaaaatatttgtctctttaagagaaagtttgccaacctctgccctaggccttacttt

SEQ ID NO: 61584 - DNA, 329 bp, Homo sapiens
tagttccttaatccatttggaagagtctgacttattttctcttgaaattgtatggtaaatatgccaccactgtgtacaaatgatgacagttttgtgtcttgctgcccaatccttatgctcttcacttcattcctttgtgtgtttaggtgtgttaccgtgctgattaaaaattacagtataatgttgaagaaattataactagcaattaaaatgtgaatttttgtgaatttaatcagtgtaacatatctcatttttatattagtttgcatttcctcaattactagtgaaattgagcttttttttctagatgttcttggccacacaacttt

SEQ ID NO: 61585 - DNA, 2127 bp, Homo sapiens
  misc_feature (436)..(438): n is a, c, g, or t
  misc_feature (440)..(440): n is a, c, g, or t
  misc_feature (1869)..(1869): n is a, c, g, or t
cacacaaaaaacggtggctctattcagcctgatagaaacgacttgtggtacaggccctaagtcaggtacgctgctgcccaagagcctgactggtagatggagatgtgaaagggacacagggctctccacgtaagcaggaggcagcaagaatgacagttccaggggttctacgtggaaggaagagggggccaggaggaagggacttcaggtcagattgagggggcatgtgccatccggaagaggagaatgtcgatgtaactgtgaaagtccaagtcctagctgcttttccactgccctggtgtacaacctcaggccctgcagactgcacatctgaggacccctgcctgccctgtctggcttctctgaatctaataagggagaagatgcgtttgaaaaagaacacggaagagggagagagaaaaaaagcaccaaggtnnntnttcagagagccctggtaattttaacttgcaactcacccaagaagagcctaatggtcgcaagagtatgtaggaaggccccaacccgacccggcccagcacgcagcacccaagggcggctggaagcgcaatgcgcgtgcccagtacagcgctattcagtctgcaggctttttgaggatttcaacttcaaagaacggtcggcttcggggcgaactttgcttcagttccaggcctcgggaggcagcgaggagacagactgggacaccgagcatgcagaaggggagtggtcttgaaatacgcggaaagggagaatgcacccctcctggccagccttgccgggcgaagtgagaagtactgaggcctgagaaggctccacgcgtgcgcaaagggccgctcgctgtgattactggggtggcgatggttgtgatgacgccgctgccccgcctgcgccgaaagggaaaccccaggggaggcggaggccagcggggatttctgaagccaagtggtccccttcatccacgacggacaggaagggcgaccccctgaggccacttccaggtcttgcgaccggaggagagttaccaaggagacgctcctcccgaggcctcgcgcgtcggaagcttctgtcccctggattccggttgacggacgcgtcccccgagcaggttctcggtagcagccgacacgccccaccccgggcacagcgaggtctgaggaccacgctaaggcgtcacgtccgccctgatccgcggcagctatggaacgggcggagccgcagcggagggcgctccgctttgacgtcacttcctgtgagcccggcggtgacaacggcaacatggccctgaacggagctggtgaggacctgggcggcaggggtttgtggctgtgaggtacgggaggcagcccactccggcaagacccccagtccctatgcctctcttccccagaagtcgacgacttctcctgggagcccccgactgaggcggagacgaaggtgctgcaggcgcgacgggagcggcaagatcgcatctcccggctcatgggcgactatctgctgcgcggttaccgcatgctgggcgagacgtgtgcggactgcgggacgatcctcctccaagacaaacagcggaaaatctactgcgtggcttgtcaggaactcgactcagacgtggataaagataatcccgctttgcgcgacgtggtcccacaaccgttgcctttttaagagaggcccggaccatccagagggggtggggcagaggcggagtctgaggagctggggaaggaacaaagcgaggcctgcgggcggcggctgggctccggcggggccgcggggtgcggggcctgcgggcggcggcccgggcggagcgttggagggaaggaggtggcatcgccgtccgcgccggccccggccatgaacgggctgccctcgganagaggcgccgggcggggcgggctgcgctttggccgggctcccaccgtgccgcgcggctcagcggctccttaatgcgagtcgcgtggctcttggccgggacgcgggagcgcgtttacagccggcgcagtccgcatccgcgacgagctgagctgggccgccgggccccggacgggccccgccctgtccctcgccgctcgcctacgcgtgacctgtgcggccgggtgtcctgtcagctcgatcggctgccggctgcctggg

SEQ ID NO: 61586 - DNA, 3086 bp, Homo sapiens
  misc_feature (436)..(438): n is a, c, g, or t
  misc_feature (440)..(440): n is a, c, g, or t
  misc_feature (2828)..(2828): n is a, c, g, or t
cacacaaaaaacggtggctctattcagcctgatagaaacgacttgtggtacaggccctaagtcaggtacgctgctgcccaagagcctgactggtagatggagatgtgaaagggacacagggctctccacgtaagcaggaggcagcaagaatgacagttccaggggttctacgtggaaggaagagggggccaggaggaagggacttcaggtcagattgagggggcatgtgccatccggaagaggagaatgtcgatgtaactgtgaaagtccaagtcctagctgcttttccactgccctggtgtacaacctcaggccctgcagactgcacatctgaggacccctgcctgccctgtctggcttctctgaatctaataagggagaagatgcgtttgaaaaagaacacggaagagggagagagaaaaaaagcaccaaggtnnntnttcagagagccctggtaattttaacttgcaactcacccaagaagagcctaatggtcgcaagagtatgtaggaaggccccaacccgacccggcccagcacgcagcacccaagggcggctggaagcgcaatgcgcgtgcccagtacagcgctattcagtctgcaggctttttgaggatttcaacttcaaagaacggtcggcttcggggcgaactttgcttcagttccaggcctcgggaggcagcgaggagacagactgggacaccgagcatgcagaaggggagtggtcttgaaatacgcggaaagggagaatgcacccctcctggccagccttgccgggcgaagtgagaagtactgaggcctgagaaggctccacgcgtgcgcaaagggccgctcgctgtgattactggggtggcgatggttgtgatgacgccgctgccccgcctgcgccgaaagggaaaccccaggggaggcggaggccagcggggatttctgaagccaagtggtccccttcatccacgacggacaggaagggcgaccccctgaggccacttccaggtcttgcgaccggaggagagttaccaaggagacgctcctcccgaggcctcgcgcgtcggaagcttctgtcccctggattccggttgacggacgcgtcccccgagcaggttctcggtagcagccgacacgccccaccccgggcacagcgaggtctgaggaccacgctaaggcgtcacgtccgccctgatccgcggcagctatggaacgggcggagccgcagcggagggcgctccgctttgacgtcacttcctgtgagcccggcggtgacaacggcaacatggccctgaacggagctgaagtcgacgacttctcctgggagcccccgactgaggcggagacgaaggtgctgcaggcgcgacgggagcggcaagatcgcatctcccggctcatgggcgactatctgctgcgcggttaccgcatgctgggcgagacgtgtgcggactgcgggacgatcctcctccaagacaaacagcggaaaatctactgcgtggcttgtcaggaactcgactcagacgtggataaagataatcccgctctgaatgcccaggctgccctctcccaagctcgggagcaccagctggcctcagcctcagagctccccctgggctctcgacctgcgccccagcccccagtacctcgtccggagcactgtgagggagctgcagcaggactcaaggcagcccaggggccacctgctcctgctgtgcctccaaatacagatgtcatggcctgcacacagacagccctcttgcagaagctgacctgggcctctgctgaactgggctctagcacctccctggagactagcatccagctgtgtggccttatccgcgcatgtgcggaggccctgcgcagcctgcagcagctacagcactaagagaagcccctgagaaaaaccctctagaaaaacagctgttcctctgtgtggtttgtttttttcctggttccaagtgtgcatgccagccccagctccactcacctttttccagcttttggcctcttcacctctccactctgctctccttgacgccctgagatgagttgagcttgtttcttctcagtttccccagtcaggatgagggagtaggtagaggactatgtgatgccccttttctaaggaagaagccatagccttttcaaaggtagcagccagaggggtggaccctagccttgtctctggcagcacctctgcagcctcttccgccatctggtgtccattccccacctggaagtgaggttttgtgttccgatccccttgatagattcccctccttcccctgagcatcctgaccctatcagcctatcccatctcatgcccaccccaggtactcagacaccgacaggagtttgtggtgaccccagcgtcaggtggcacgttaggcaccaagtgtggacttgccagtctcctgactccactgttagatcattttccttgggtgtgggagcggggctgggcgcggcggggagacggggtagcaaaaagaaccgtgaagaaaccacgcctgcccccttcagccattttcccccactccgccgcatttttccatctcccacttgagtgagtgatgtcccgtccttttctcagctttgcgcgacgtggtcccacaaccgttgcctttttaagagaggcccggaccatccagagggggtggggcagaggcggagtctgaggagctggggaaggaacaaagcgaggcctgcgggcggcggctgggctccggcggggccgcggggtgcggggcctgcgggcggcggcccgggcggagcgttggagggaaggaggtggcatcgccgtccgcgccggccccggccatgaacgggctgccctcgganagaggcgccgggcggggcgggctgcgctttggccgggctcccaccgtgccgcgcggctcagcggctccttaatgcgagtcgcgtggctcttggccgggacgcgggagcgcgtttacagccggcgcagtccgcatccgcgacgagctgagctgggccgccgggccccggacgggccccgccctgtccctcgccgctcgcctacgcgtgacctgtgcggccgggtgtcctgtcagctcgatcggctgccggctgcctggg

SEQ ID NO: 61587 - DNA, 2200 bp, Homo sapiens
  misc_feature (436)..(438): n is a, c, g, or t
  misc_feature (440)..(440): n is a, c, g, or t
cacacaaaaaacggtggctctattcagcctgatagaaacgacttgtggtacaggccctaagtcaggtacgctgctgcccaagagcctgactggtagatggagatgtgaaagggacacagggctctccacgtaagcaggaggcagcaagaatgacagttccaggggttctacgtggaaggaagagggggccaggaggaagggacttcaggtcagattgagggggcatgtgccatccggaagaggagaatgtcgatgtaactgtgaaagtccaagtcctagctgcttttccactgccctggtgtacaacctcaggccctgcagactgcacatctgaggacccctgcctgccctgtctggcttctctgaatctaataagggagaagatgcgtttgaaaaagaacacggaagagggagagagaaaaaaagcaccaaggtnnntnttcagagagccctggtaattttaacttgcaactcacccaagaagagcctaatggtcgcaagagtatgtaggaaggccccaacccgacccggcccagcacgcagcacccaagggcggctggaagcgcaatgcgcgtgcccagtacagcgctattcagtctgcaggctttttgaggatttcaacttcaaagaacggtcggcttcggggcgaactttgcttcagttccaggcctcgggaggcagcgaggagacagactgggacaccgagcatgcagaaggggagtggtcttgaaatacgcggaaagggagaatgcacccctcctggccagccttgccgggcgaagtgagaagtactgaggcctgagaaggctccacgcgtgcgcaaagggccgctcgctgtgattactggggtggcgatggttgtgatgacgccgctgccccgcctgcgccgaaagggaaaccccaggggaggcggaggccagcggggatttctgaagccaagtggtccccttcatccacgacggacaggaagggcgaccccctgaggccacttccaggtcttgcgaccggaggagagttaccaaggagacgctcctcccgaggcctcgcgcgtcggaagcttctgtcccctggattccggttgacggacgcgtcccccgagcaggttctcggtagcagccgacacgccccaccccgggcacagcgaggtctgaggaccacgctaaggcgtcacgtccgccctgatccgcggcagctatggaacgggcggagccgcagcggagggcgctccgctttgacgtcacttcctgtgagcccggcggtgacaacggcaacatggccctgaacggagctgaagtcgacgacttctcctgggagcccccgactgaggcggagacgaaggtgctgcaggcgcgacgggagcggcaagatcgcatctcccggctcatgggcgactatctgctgcgcggttaccgcatgctgggcgagacgtgtgcggactgcgggacgatcctcctccaagacaaacagcggaaaatctactgcgtggcttgtcaggaactcgactcagacgtggataaagataatcccgctctgaatgcccaggctgccctctcccaagctcgggagcaccagctggcctcagcctcagagctccccctgggctctcgacctgcgccccagcccccagtacctcgtccggagcactgtgagggagctgcagcaggactcaaggcagcccaggggccacctgctcctgctgtgcctccaaatacagatgtcatggcctgcacacagacagccctcttgcagaagctgacctgggcctctgctgaactgggctctagcacctccctggagactagcatccagctgtgtggccttatccgcgcatgtgcggaggccctgcgcagcctgcagcagctacagcactaagagaagcccctgagaaaaaccctctagaaaaaaaaccagatcaaccgaatcaacaaacacggtgggggcccatgccacggaaaacatctgacaacatgtctggcagcgggcccagtgtcagacaagggccatgcggcccaggaacaccgcagcacgcgggttaccacacaaagcgacgggcaccagtatgcaaaccacggctgggtcagggataaaaggcccggcactaaccgcccggcacgagcacacatgaacgcacagagcgacagcagacagaacacgactgacgtcacgcacaacacacaaggagcgacacgcccaggcaacg

SEQ ID NO: 61588 - DNA, 1825 bp, Homo sapiens
  misc_feature (8)..(8): n is a, c, g, or t
  misc_feature (12)..(12): n is a, c, g, or t
  misc_feature (19)..(19): n is a, c, g, or t
  misc_feature (1567)..(1567): n is a, c, g, or t
cctcgcgnagtnggccctngaacggagctgaagtcgacgacttctcctgggagcccccgactgaggcggagacgaaggtgctgcaggcgcgacgggagcggcaagatcgcatctcccggctcatgggcgactatctgctgcgcggttaccgcatgctgggcgagacgtgtgcggactgcgggacgatcctcctccaagacaaacagcggaaaatctactgcgtggcttgtcaggaactcgactcagacgtggataaagataatcccgctctgaatgcccaggctgccctctcccaagctcgggagcaccagctggcctcagcctcagagctccccctgggctctcgacctgcgccccagcccccagtacctcgtccggagcactgtgagggagctgcagcaggactcaaggcagcccaggggccacctgctcctgctgtgcctccaaatacagatgtcatggcctgcacacagacagccctcttgcagaagctgacctgggcctctgctgaactgggctctagcacctccctggagactagcatccagctgtgtggccttatccgcgcatgtgcggaggccctgcgcagcctgcagcagctacagcactaagagaagcccctgagaaaaaccctctagaaaaacagctgttcctctgtgtggtttgtttttttcctggttccaagtgtgcatgccagccccagctccactcacctttttccagcttttggcctcttcacctctccactctgctctccttgacgccctgagatgagttgagcttgtttcttctcagtttccccagtcaggatgagggagtaggtagaggactatgtgatgccccttttctaaggaagaagccatagccttttcaaaggtagcagccagaggggtggaccctagccttgtctctggcagcacctctgcagcctcttccgccatctggtgtccattccccacctggaagtgaggttttgtgttccgatccccttgatagattcccctccttcccctgagcatcctgaccctatcagcctatcccatctcatgcccaccccaggtactcagacaccgacaggagtttgtggtgaccccagcgtcaggtggcacgttaggcaccaagtgtggacttgccagtctcctgactccactgttagatcattttccttgggtgtgggagcggggctgggcgcggcggggagacggggtagcaaaaagaaccgtgaagaaaccacgcctgcccccttcagccattttcccccactccgccgcatttttccatctcccacttgagtgagtgatgtcccgtccttttctcagctttgcgcgacgtggtcccacaaccgttgcctttttaagagaggcccggaccatccagagggggtggggcagaggcggagtctgaggagctggggaaggaacaaagcgaggcctgcgggcggcggctgggctccggcggggccgcggggtgcggggcctgcgggcggcggcccgggcggagcgttggagggaaggaggtggcatcgccgtccgcgccggccccggccatgaacgggctgccctcgganagaggcgccgggcggggcgggctgcgctttggccgggctcccaccgtgccgcgcggctcagcggctccttaatgcgagtcgcgtggctcttggccgggacgcgggagcgcgtttacagccggcgcagtccgcatccgcgacgagctgagctgggccgccgggccccggacgggccccgccctgtccctcgccgctcgcctacgcgtgacctgtgcggccgggtgtcctgtcagctcgatcggctgccggctgcctggg

SEQ ID NO: 61589 - DNA, 2106 bp, Homo sapiens
  misc_feature (436)..(438): n is a, c, g, or t
  misc_feature (440)..(440): n is a, c, g, or t
cacacaaaaaacggtggctctattcagcctgatagaaacgacttgtggtacaggccctaagtcaggtacgctgctgcccaagagcctgactggtagatggagatgtgaaagggacacagggctctccacgtaagcaggaggcagcaagaatgacagttccaggggttctacgtggaaggaagagggggccaggaggaagggacttcaggtcagattgagggggcatgtgccatccggaagaggagaatgtcgatgtaactgtgaaagtccaagtcctagctgcttttccactgccctggtgtacaacctcaggccctgcagactgcacatctgaggacccctgcctgccctgtctggcttctctgaatctaataagggagaagatgcgtttgaaaaagaacacggaagagggagagagaaaaaaagcaccaaggtnnntnttcagagagccctggtaattttaacttgcaactcacccaagaagagcctaatggtcgcaagagtatgtaggaaggccccaacccgacccggcccagcacgcagcacccaagggcggctggaagcgcaatgcgcgtgcccagtacagcgctattcagtctgcaggctttttgaggatttcaacttcaaagaacggtcggcttcggggcgaactttgcttcagttccaggcctcgggaggcagcgaggagacagactgggacaccgagcatgcagaaggggagtggtcttgaaatacgcggaaagggagaatgcacccctcctggccagccttgccgggcgaagtgagaagtactgaggcctgagaaggctccacgcgtgcgcaaagggccgctcgctgtgattactggggtggcgatggttgtgatgacgccgctgccccgcctgcgccgaaagggaaaccccaggggaggcggaggccagcggggatttctgaagccaagtggtccccttcatccacgacggacaggaagggcgaccccctgaggccacttccaggtcttgcgaccggaggagagttaccaaggagacgctcctcccgaggcctcgcgcgtcggaagcttctgtcccctggattccggttgacggacgcgtcccccgagcaggttctcggtagcagccgacacgccccaccccgggcacagcgaggtctgaggaccacgctaaggcgtcacgtccgccctgatccgcggcagctatggaacgggcggagccgcagcggagggcgctccgctttgacgtcacttcctgtgagcccggcggtgacaacggcaacatggccctgaacggagctgaagtcgacgacttctcctgggagcccccgactgaggcggagacgaaggtgctgcaggcgcgacgggagcggcaagatcgcatctcccggctcatgggcgactatctgctgcgcggttaccgcatgctgggcgagacgtgtgcggactgcgggacgatcctcctccaagacaaacagcggaaaatctactgcgtggcttgtcaggaactcgactcagacgtggataaagataatcccgggggctgcggcagttggacatgtccttgttgtgccagctgtggggcctgtacgagtcaatccaggactacaaacacctgtgccaagacctgagcttctgccaggacctgtcatcctccctccattcggacagctcctacccaccggatgcgggcctgtctgacgacgaggagcctcccgatgccagcctgcctcctgacccgccaccccttactgtgccccagacgcacaatgcccgtgaccagtggctgcaggatgccttccacatcagcctctgaagggctggggggcagggggcatgcacccatgcaaaaggctcagaaactccccctccggcaagccctcagacttcggagcctgcgccttcccccctaccgctcacctcacaggagggccaggcatgtattcctcagaggcgacactgccaaactctttctcctgtctgggttggctggcactggggcgggcatctagcgtacagcctctgctcatggcactgcggcctccagttcttccacatgtgtgcacccccagcttggccagcctcagctcgcggggggcccgacgcatttcctacag

SEQ ID NO: 61590 - DNA, 2254 bp, Homo sapiens
  misc_feature (436)..(438): n is a, c, g, or t
  misc_feature (440)..(440): n is a, c, g, or t
cacacaaaaaacggtggctctattcagcctgatagaaacgacttgtggtacaggccctaagtcaggtacgctgctgcccaagagcctgactggtagatggagatgtgaaagggacacagggctctccacgtaagcaggaggcagcaagaatgacagttccaggggttctacgtggaaggaagagggggccaggaggaagggacttcaggtcagattgagggggcatgtgccatccggaagaggagaatgtcgatgtaactgtgaaagtccaagtcctagctgcttttccactgccctggtgtacaacctcaggccctgcagactgcacatctgaggacccctgcctgccctgtctggcttctctgaatctaataagggagaagatgcgtttgaaaaagaacacggaagagggagagagaaaaaaagcaccaaggtnnntnttcagagagccctggtaattttaacttgcaactcacccaagaagagcctaatggtcgcaagagtatgtaggaaggccccaacccgacccggcccagcacgcagcacccaagggcggctggaagcgcaatgcgcgtgcccagtacagcgctattcagtctgcaggctttttgaggatttcaacttcaaagaacggtcggcttcggggcgaactttgcttcagttccaggcctcgggaggcagcgaggagacagactgggacaccgagcatgcagaaggggagtggtcttgaaatacgcggaaagggagaatgcacccctcctggccagccttgccgggcgaagtgagaagtactgaggcctgagaaggctccacgcgtgcgcaaagggccgctcgctgtgattactggggtggcgatggttgtgatgacgccgctgccccgcctgcgccgaaagggaaaccccaggggaggcggaggccagcggggatttctgaagccaagtggtccccttcatccacgacggacaggaagggcgaccccctgaggccacttccaggtcttgcgaccggaggagagttaccaaggagacgctcctcccgaggcctcgcgcgtcggaagcttctgtcccctggattccggttgacggacgcgtcccccgagcaggttctcggtagcagccgacacgccccaccccgggcacagcgaggtctgaggaccacgctaaggcgtcacgtccgccctgatccgcggcagctatggaacgggcggagccgcagcggagggcgctccgctttgacgtcacttcctgtgagcccggcggtgacaacggcaacatggccctgaacggagctgaagtcgacgacttctcctgggagcccccgactgaggcggagacgaaggtgctgcaggcgcgacgggagcggcaagatcgcatctcccggctcatgggcgactatctgctgcgcggttaccgcatgctgggcgagacgtgtgcggactgcgggacgatcctcctccaagacaaacagcggaaaatctactgcgtggcttgtcaggaactcgactcagacgtggataaagataatcccgctctgaatgcccaggctgccctctcccaagctcgggagcaccagctggcctcagcctcagagctccccctgggctctcgacctgcgccccagcccccagtacctcgtccggagcactgtgagggagctgcagcaggactcaaggcagcccaggggccacctgctcctgctgtgcctccaaatacagatgtcatggcctgcacacagacagccctcttgcagaagctgacctgggcctctgctgaactgggctctagcacctccctggagactagcatccagctgtgtggccttatccgcgcatgtgcggaggccctgcgcagcctgcagcagctacagcactaagagaagcccctgagaaaaaccctctagaaaagaaaacaaaatgatcataaaataaagaaaaaaaagggggggggggcaaaaaaatccccggggggccaattttggttccccgttttttgttaaagggggcccactaggggggcgatattatagcggggagggcccggtttaaaccagccgtctgtcggtcggtgggacaaccgtggtcgtctggggcacccgtgtggggggcccccttctccgcgggggggcaccctttggggggccacctccccggggatttggggccccgggcaactatcacctcgccgttcaagggtgctcaccatgcgtctcttcgtgcctctgagagtttggcccggggttgacttgacccttttcg

SEQ ID NO: 61591 - DNA, 3179 bp, Homo sapiens
  misc_feature (436)..(438): n is a, c, g, or t
  misc_feature (440)..(440): n is a, c, g, or t
  misc_feature (2921)..(2921): n is a, c, g, or t
cacacaaaaaacggtggctctattcagcctgatagaaacgacttgtggtacaggccctaagtcaggtacgctgctgcccaagagcctgactggtagatggagatgtgaaagggacacagggctctccacgtaagcaggaggcagcaagaatgacagttccaggggttctacgtggaaggaagagggggccaggaggaagggacttcaggtcagattgagggggcatgtgccatccggaagaggagaatgtcgatgtaactgtgaaagtccaagtcctagctgcttttccactgccctggtgtacaacctcaggccctgcagactgcacatctgaggacccctgcctgccctgtctggcttctctgaatctaataagggagaagatgcgtttgaaaaagaacacggaagagggagagagaaaaaaagcaccaaggtnnntnttcagagagccctggtaattttaacttgcaactcacccaagaagagcctaatggtcgcaagagtatgtaggaaggccccaacccgacccggcccagcacgcagcacccaagggcggctggaagcgcaatgcgcgtgcccagtacagcgctattcagtctgcaggctttttgaggatttcaacttcaaagaacggtcggcttcggggcgaactttgcttcagttccaggcctcgggaggcagcgaggagacagactgggacaccgagcatgcagaaggggagtggtcttgaaatacgcggaaagggagaatgcacccctcctggccagccttgccgggcgaagtgagaagtactgaggcctgagaaggctccacgcgtgcgcaaagggccgctcgctgtgattactggggtggcgatggttgtgatgacgccgctgccccgcctgcgccgaaagggaaaccccaggggaggcggaggccagcggggatttctgaagccaagtggtccccttcatccacgacggacaggaagggcgaccccctgaggccacttccaggtcttgcgaccggaggagagttaccaaggagacgctcctcccgaggcctcgcgcgtcggaagcttctgtcccctggattccggttgacggacgcgtcccccgagcaggttctcggtagcagccgacacgccccaccccgggcacagcgaggtctgaggaccacgctaaggcgtcacgtccgccctgatccgcggcagctatggaacgggcggagccgcagcggagggcgctccgctttgacgtcacttcctgtgagcccggcggtgacaacggcaacatggccctgaacggagctggtgaggacctgggcggcaggggtttgtggctgtgaggtacgggaggcagcccactccggcaagacccccagtccctatgcctctcttccccagaagtcgacgacttctcctgggagcccccgactgaggcggagacgaaggtgctgcaggcgcgacgggagcggcaagatcgcatctcccggctcatgggcgactatctgctgcgcggttaccgcatgctgggcgagacgtgtgcggactgcgggacgatcctcctccaagacaaacagcggaaaatctactgcgtggcttgtcaggaactcgactcagacgtggataaagataatcccgctctgaatgcccaggctgccctctcccaagctcgggagcaccagctggcctcagcctcagagctccccctgggctctcgacctgcgccccagcccccagtacctcgtccggagcactgtgagggagctgcagcaggactcaaggcagcccaggggccacctgctcctgctgtgcctccaaatacagatgtcatggcctgcacacagacagccctcttgcagaagctgacctgggcctctgctgaactgggctctagcacctccctggagactagcatccagctgtgtggccttatccgcgcatgtgcggaggccctgcgcagcctgcagcagctacagcactaagagaagcccctgagaaaaaccctctagaaaaacagctgttcctctgtgtggtttgtttttttcctggttccaagtgtgcatgccagccccagctccactcacctttttccagcttttggcctcttcacctctccactctgctctccttgacgccctgagatgagttgagcttgtttcttctcagtttccccagtcaggatgagggagtaggtagaggactatgtgatgccccttttctaaggaagaagccatagccttttcaaaggtagcagccagaggggtggaccctagccttgtctctggcagcacctctgcagcctcttccgccatctggtgtccattccccacctggaagtgaggttttgtgttccgatccccttgatagattcccctccttcccctgagcatcctgaccctatcagcctatcccatctcatgcccaccccaggtactcagacaccgacaggagtttgtggtgaccccagcgtcaggtggcacgttaggcaccaagtgtggacttgccagtctcctgactccactgttagatcattttccttgggtgtgggagcggggctgggcgcggcggggagacggggtagcaaaaagaaccgtgaagaaaccacgcctgcccccttcagccattttcccccactccgccgcatttttccatctcccacttgagtgagtgatgtcccgtccttttctcagctttgcgcgacgtggtcccacaaccgttgcctttttaagagaggcccggaccatccagagggggtggggcagaggcggagtctgaggagctggggaaggaacaaagcgaggcctgcgggcggcggctgggctccggcggggccgcggggtgcggggcctgcgggcggcggcccgggcggagcgttggagggaaggaggtggcatcgccgtccgcgccggccccggccatgaacgggctgccctcgganagaggcgccgggcggggcgggctgcgctttggccgggctcccaccgtgccgcgcggctcagcggctccttaatgcgagtcgcgtggctcttggccgggacgcgggagcgcgtttacagccggcgcagtccgcatccgcgacgagctgagctgggccgccgggccccggacgggccccgccctgtccctcgccgctcgcctacgcgtgacctgtgcggccgggtgtcctgtcagctcgatcggctgccggctgcctggg

SEQ ID NO: 61592 - DNA, 2293 bp, Homo sapiens
  misc_feature (436)..(438): n is a, c, g, or t
  misc_feature (440)..(440): n is a, c, g, or t
cacacaaaaaacggtggctctattcagcctgatagaaacgacttgtggtacaggccctaagtcaggtacgctgctgcccaagagcctgactggtagatggagatgtgaaagggacacagggctctccacgtaagcaggaggcagcaagaatgacagttccaggggttctacgtggaaggaagagggggccaggaggaagggacttcaggtcagattgagggggcatgtgccatccggaagaggagaatgtcgatgtaactgtgaaagtccaagtcctagctgcttttccactgccctggtgtacaacctcaggccctgcagactgcacatctgaggacccctgcctgccctgtctggcttctctgaatctaataagggagaagatgcgtttgaaaaagaacacggaagagggagagagaaaaaaagcaccaaggtnnntnttcagagagccctggtaattttaacttgcaactcacccaagaagagcctaatggtcgcaagagtatgtaggaaggccccaacccgacccggcccagcacgcagcacccaagggcggctggaagcgcaatgcgcgtgcccagtacagcgctattcagtctgcaggctttttgaggatttcaacttcaaagaacggtcggcttcggggcgaactttgcttcagttccaggcctcgggaggcagcgaggagacagactgggacaccgagcatgcagaaggggagtggtcttgaaatacgcggaaagggagaatgcacccctcctggccagccttgccgggcgaagtgagaagtactgaggcctgagaaggctccacgcgtgcgcaaagggccgctcgctgtgattactggggtggcgatggttgtgatgacgccgctgccccgcctgcgccgaaagggaaaccccaggggaggcggaggccagcggggatttctgaagccaagtggtccccttcatccacgacggacaggaagggcgaccccctgaggccacttccaggtcttgcgaccggaggagagttaccaaggagacgctcctcccgaggcctcgcgcgtcggaagcttctgtcccctggattccggttgacggacgcgtcccccgagcaggttctcggtagcagccgacacgccccaccccgggcacagcgaggtctgaggaccacgctaaggcgtcacgtccgccctgatccgcggcagctatggaacgggcggagccgcagcggagggcgctccgctttgacgtcacttcctgtgagcccggcggtgacaacggcaacatggccctgaacggagctggtgaggacctgggcggcaggggtttgtggctgtgaggtacgggaggcagcccactccggcaagacccccagtccctatgcctctcttccccagaagtcgacgacttctcctgggagcccccgactgaggcggagacgaaggtgctgcaggcgcgacgggagcggcaagatcgcatctcccggctcatgggcgactatctgctgcgcggttaccgcatgctgggcgagacgtgtgcggactgcgggacgatcctcctccaagacaaacagcggaaaatctactgcgtggcttgtcaggaactcgactcagacgtggataaagataatcccgctctgaatgcccaggctgccctctcccaagctcgggagcaccagctggcctcagcctcagagctccccctgggctctcgacctgcgccccagcccccagtacctcgtccggagcactgtgagggagctgcagcaggactcaaggcagcccaggggccacctgctcctgctgtgcctccaaatacagatgtcatggcctgcacacagacagccctcttgcagaagctgacctgggcctctgctgaactgggctctagcacctccctggagactagcatccagctgtgtggccttatccgcgcatgtgcggaggccctgcgcagcctgcagcagctacagcactaagagaagcccctgagaaaaaccctctagaaaaaaaaccagatcaaccgaatcaacaaacacggtgggggcccatgccacggaaaacatctgacaacatgtctggcagcgggcccagtgtcagacaagggccatgcggcccaggaacaccgcagcacgcgggttaccacacaaagcgacgggcaccagtatgcaaaccacggctgggtcagggataaaaggcccggcactaaccgcccggcacgagcacacatgaacgcacagagcgacagcagacagaacacgactgacgtcacgcacaacacacaaggagcgacacgcccaggcaacg

SEQ ID NO: 61593 - DNA, 410 bp, Homo sapiens
agttaaccttattcagcttcttttcttcatttgtaaactgtttataccagtttctttccaaaattatgattctatgatctgttcaatgctcttttatatgttaagacattgttttctctcataatttccaaactatgggagaatttgtggttttttccccatatctgaggagaacgtccactgagttcttatctacagttacactagtgaagaacgctgggtctggaatcagaagcctcaggtcttagttctgtcatcaactatttgtgcgaccttggacaaaagacttgatcacccacagtcccagtttcccacaaggttactgtaaagcacacagttttaaaaaagacaaaatacacatgatagtatattaattgtactttctattaaaaggcaaggtgatgttatgc

SEQ ID NO: 61594 - DNA, 873 bp, Homo sapiens
tcctccacctgctggcccctggacacctctgtcaccatgtggttcctggttctgtgcctcgccctgtccctgggggggactggtgctgcgcccccgattcagtcccggattgtgggaggctgggagtgtgagcagcattcccagccctggcaggcggctctgtaccatttcagcactttccagtgtgggggcatcctggtgcaccgccagtgggtgctcacagctgctcattgcatcagcgacaattaccagctctggctgggtcgccacaacttgtttgacgacgaaaacacagcccagtttgttcatgtcagtgagagcttcccacaccctggcttcaacatgagcctcctggagaaccacacccgccaagcagacgaggactacagccacgacctcatgctgctccgcctgacagagcctgctgataccatcacagatgctgtgaaggtcgtggagttgcccaccgaggaacccgaagtggggagcacctgtttggcttccggctggggcagcatcgaaccagagaatttctcatttccagatgatctccagtgtgtggacctcaaaatcctgcctaatgatgagtgcaaaaaagcccacgtccagaaggtgacagacttcatgctgtgtgtcggacacctggaaggtggcaaagacacctgtgtgggtgattcagggggcccgctgatgtgtgatggtgtgctccaaggtgtcacatcatggggctacgtcccttgtggcacccccaataagccttctgtcgccgtcagagtgctgtcttatgtgaagtggatcgaggacaccatagcggagaactcctgaacgcccagccctgtcccctacccccagtaaaatcaaatgtgcatccaa

SEQ ID NO: 61595 - DNA, 1471 bp, Homo sapiens
tcctccacctgctggcccctggacacctctgtcaccatgtggttcctggttctgtgcctcgccctgtccctgggggggactggtgctgcgcccccgattcagtcccggattgtgggaggctgggagtgtgagcagcattcccagccctggcaggcggctctgtaccatttcagcactttccagtgtgggggcatcctggtgcaccgccagtgggtgctcacagctgctcattgcatcagcgacaattaccagctctggctgggtcgccacaacttgtttgacgacgaaaacacagcccagtttgttcatgtcagtgagagcttcccacaccctggcttcaacatgagcctcctggagaaccacacccgccaagcagacgaggactacagccacgacctcatgctgctccgcctgacagagcctgctgataccatcacagatgctgtgaaggtcgtggagttgcccaccgaggaacccgaagtggggagcacctgtttggcttccggctggggcagcatcgaaccagagaatttctcatttccagatgatctccagtgtgtggacctcaaaatcctgcctaatgatgagtgcaaaaaagcccacgtccagaaggtgacagacttcatgctgtgtgtcggacacctggaaggtggcaaagacacctgtgtgggtgattcagggggcccgctgatgtgtgatggtgtgctccaaggtgtcacatcatggggctacgtcccttgtggcacccccaataagccttctgtcgccgtcagagtgctgtcttatgtgaagtggatcgaggacaccatagcggagaactcctgaacgcccagccctgtcccctacccccagtaaaatcaaatgtgcatccaaaaaaaaaaaaaaaaaaaaaaaaaacaaccacggttggggaccccagccggcgacccacacggaaaaaaagatcttcaaagaccccaatacggtatgtggggcagcggagccacagagacgtaaaccctgcaaccggcgcccacccgccttatccacccaagaaaaggcaaggggggtcaaagacccaaacgaggcgggacctcccacccccaacaaagaaaacggcccggcggggacaccggatacgttgactgacacaacaccacaaaggagcctcgcagcgacacggcgacccctacccacacggcaccccacgggggcccagaaataacaaaaatcgcccgacgggggaaaaagcgaacaacactaaaaaaaaacacagacaagagacacaaatacaaaaagaggaaacgaaaagaacagaaaacaaaaaaaactaaaacaaaaaaggaaaacgaaaacaaacagaaagaaagcaatgataaacaaacaaaaaaagaaacaagataaaatagatacacaaaacagcaagacaggccagaaaacagacaacacaaaaacaaagaaacaacaacaacaacaaatctaaaaaacataa

SEQ ID NO: 61596 - DNA, 746 bp, Homo sapiens
tcctccacctgctggcccctggacacctctgtcaccatgtggttcctggttctgtgcctcgccctgtccctgggggggactggtgctgcgcccccgattcagtcccggattgtgggaggctgggagtgtgagcagcattcccagccctggcaggcggctctgtaccatttcagcactttccagtgtgggggcatcctggtgcaccgccagtgggtgctcacagctgctcattgcatcagcgacaattaccagctctggctgggtcgccacaacttgtttgacgacgaaaacacagcccagtttgttcatgtcagtgagagcttcccacaccctggcttcaacatgagcctcctggagaaccacacccgccaagcagacgaggactacagccacgacctcatgctgtctcatttccagatgatctccagtgtgtggacctcaaaatcctgcctaatgatgagtgcaaaaaagcccacgtccagaaggtgacagacttcatgctgtgtgtcggacacctggaaggtggcaaagacacctgtgtgggtgattcagggggcccgctgatgtgtgatggtgtgctccaaggtgtcacatcatggggctacgtcccttgtggcacccccaataagccttctgtcgccgtcagagtgctgtcttatgtgaagtggatcgaggacaccatagcggagaactcctgaacgcccagccctgtcccctacccccagtaaaatcaaatgtgcatccaa

SEQ ID NO: 61597 - DNA, 497 bp, Homo sapiens
cacagatgctgtgaaggtcgtggagttgcccaccgaggaacccgaagtggggagcacctgtttggcttccggctggggcagcatcgaaccagagaattgtatgtgggggcagactgtgtagcccaaggcggggatggggactcctgcgtccaagggagaaagggccagggaagcaggtgaggtcgggctgcagccctttttctcccgggttcgtagtctcatttccagatgatctccagtgtgtggacctcaaaatcctgcctaatgatgagtgcaaaaaagcccacgtccagaaggtgacagacttcatgctgtgtgtcggacacctggaaggtggcaaagacacctgtgtggtgaggcagccctgcccccagggtctggaagggctgagggaggggactcagcctctgaactggcttctgagagctaaccaggcatctgcttcactgcttcccagctagctgtagccactcgccccatcagtgccccagctcccc

SEQ ID NO: 61598 - DNA, 867 bp, Homo sapiens
tgatgtacggctcgggatacgggatctgtcacatgtcgttctggttctgtgctcgcctgtcccttggggggacttggtgctgcgcccccgattcagtcccggattgtgggaggctgggagtgtgagcagcattcccagccctggcaggcggctctgtaccatttcagcactttccagtgtgggggcatcctggtgcaccgccagtgggtgctcacagctgctcattgcatcagcgacaattaccagctctggctgggtcgccacaacttgtttgacgacgaaaacacagcccagtttgttcatgtcagtgagagcttcccacaccctggcttcaacatgagcctcctggagaaccacacccgccaagcagacgaggactacagccacgacctcatgctgctccgcctgacagagcctgctgataccatcacagatgctgtgaaggtcgtggagttgcccaccgaggaacccgaagtggggagcacctgtttggcttccggctggggcagcatcgaaccagagaatttctcatttccagatgatctccagtgtgtggacctcaaaatcctgcctaatgatgagtgcaaaaaagcccacgtccagaaggtgacagacttcatgctgtgtgtcggacacctggaaggtggcaaagacacctgtgtgggtgattcagggggcccgctgatgtgtgatggtgtgctccaaggtgtcacatcatggggctacgtcccttgtggcacccccaataagccttctgtcgccgtcagagtgctgtcttatgtgaagtggatcgaggacaccatagcggagaactcctgaacgcccagccctgtcccctacccccagtaaaatcaaatgtgcatccaa

SEQ ID NO: 61599 - DNA, 402 bp, Homo sapiens
tcctcttcccttcctatcattccatcccttcaaggctgtctggctcccaggccctaacaggtcttcactcataatctccacttcatggtgtgttaaggagattattttttttccccatcaataaaaaccttttaatcatttttctggggatgggtggcttcaaaaaatgtggtacaagaatgacagtctagggcccagaccaatggttcccaaagtgaggtcctgggaccagcagcattagtatcacacgggaacttataagaaatgcaaattctcaggcccatcctcactagtaagaaagaatcagaaattctaggctgggcacggaggctcacgcctgcaatcccagcactttgggaggccgaggcgggtggatcacctgaggtcaggagtttgagacca

SEQ ID NO: 61600 - DNA, 356 bp, Homo sapiens
attcccagaggaaattagttcatttatccatcagaaataagcaaatattgtcaaaattcataaacaacccaaatgtccgtgaatagtagaataggtaagtaaatcatggtatatcatatgatggaataccatacagaaatgaaaatgaacaaactactgctgtatcacaacatgggtgaatttttttttccataaattcgaccaagtggtaagcatagataaattttatacacataaggccaggcgtggtgtcacgcctgtaatcccagcactttgagaggctgaggtgggaggatcagttgaggccaggagttcaagaccagcctggccaaaatggtgaaacctcatctctagta

SEQ ID NO: 61601 - DNA, 389 bp, Homo sapiens
cggcacgagggtggaagggagagaaagagaaagaagaaaatggcagaaatgcacagtgccagttccagatttagactttaagatggctgacttcactgtcttggagcctggtgccatcacttaaagaagtctgatcatgctgcaggagagagaccactccatttggaaagaggtcctgaagaacaacaaagacatggagagaggcccagccagcccccaactgtcccagccaggtcagccaagggcatgtgaatgaagggaagccagcttgcatcttgcagtctgtgttgaactaccccagtcaacaccatatggagcagagatgagccgtctcactgagccctgccaatattgaagaagcaggacaaataaattgttgtttaaagtca

SEQ ID NO: 61602 - DNA, 349 bp, Homo sapiens
ggtccacataatagggtttaaagggggcaaatgatgcaatgggatttgtgttttggcaaggtcactctgaccacaatgtataagactacaagagatggaactgggggtaaaaggaaggaaataatgagggccaaaaccaaggagcaaaggggagacagagagaaaagtgggatggattcaaagacattgcaacatagaactgaccgaactggcttgtgtgaggtaagggaggcaggatgactcacaggtttctggattatgtgaacaggtggaaggtgatgccattagccagaataaggctgtaggctaaggggagtaaactggttctggggtataacattgataggcc

SEQ ID NO: 61603 - DNA, 436 bp, Homo sapiens
gttctaagccaagatactgaatgtaatatgaaacactatgaagaaagattggttaatttatgataaggtgtgttacagtctatttgtctttttaaggtaattgaagcagtgtagagagaaattacagggttctgtagaagagtctaacccatttggtatgtgagcatgaggatacatttgggtggtgaggtctattaagataacatcattacattaattacaggttggaagtaatgttcacatgccagtgacttggccttcttttcttattctgtctaatcctgttttggttcatgttagcagtgtgttagagtgaagatggagcactagcccaaagtctagaagaatattggacaaccatcatctcccactctcctccatattacagtgttttgggggctttcttagattattaaaaaaattgtttggctctagt

SEQ ID NO: 61604 - DNA, 186 bp, Homo sapiens
gcagtggatctttctttttttccaaaggaaatttcatatagagtccattcataggaaacagataaaatgtgaacggctgcaactgagatgggggagagtggcttggagcccccagcctctttgctttctcttatccctataggatggccattaggtgaagcagtttagcttgttggttcagacctg

SEQ ID NO: 61605 - DNA, 109 bp, Homo sapiens
ttttataaacatgtattagtatttgcacttgtatagtgcttactatgggctagaaactttctagacgctttagagatgtgaactcatctaatatatgattattaacccc

SEQ ID NO: 61606 - DNA, 615 bp, Homo sapiens
attcggcaagggggatttaagtgagctctgaatgacaaaaagccaaccaagggaagacaagaaggaagaacattccaggaaaaggcaccagccaagccttagacactaaagaagaaactatgttctatgctcaaaaaagatgaacaagaatcactgtgactaaaaagcaagtggttgaggggaagagagacacaagctattgtaggggtttgcaggtcagtgtgaggagtttggattttattccaggtggactcctcttcctccacacagtctccttatgagatctcactccatttcagttttcattcctatcttgtggttttatgacaactcccactccaacttttctctacaatgcaggccagtcctatgcaacagcatcctgaactacatccatacttggatttccactgatggctcattaaaaagtccctaactgaagcccgtctcttttcctcaaacactattctttcttctttttattgacaccattatctacccagtcacttaagccagtagcccaagatccaatctagctttctgtcatctgcaacatctaattattaacactgatttttctaagtttaaggtaaagatatagaaagaaggaaagca

SEQ ID NO: 61607 - DNA, 395 bp, Homo sapiens
  misc_feature (214)..(214): n is a, c, g, or t
  misc_feature (349)..(349): n is a, c, g, or t
  misc_feature (363)..(363): n is a, c, g, or t
  misc_feature (378)..(378): n is a, c, g, or t
agcctgggcttcctgctgagacgggacccccccctctcttcttgatctcactcccaggaaagacactgaaggagcagaggtgtggacgccacatactggacggggtttcaccatctgctgggacgggacaccctctcttcttgatctcactcccagaaaagacactgaaggagcagaggtgtggacgcctcatactgctagagacggggtttcnccgtgttggccaggatggtctcaatctcctgaagtcgtgatccacccgccttggcctcccaaagtgctgggattacaggcgtgagccactgcacccggctgaaattgtatactttaaagggatgaattttatggnatgtgaattatgtntcattaaaaaaaacnaactgttaaagaaaaaa

SEQ ID NO: 61608 - DNA, 4599 bp, Homo sapiens
  misc_feature (1613)..(1613): n is a, c, g, or t
caataacccacgagatgatattgctacagaagcatatgaggatgagctagacatgggccgatctggatcctacctgaacagcagtatcaattcagcctggagtgagcacagcttggatccagaggacattcgggacgagctgaaaaaactctatgcccaactggaaatatataaaagaaagaagatgatcacaaacaacccccacctccagaaaaagcggtgctcgaagaagggcctaggtcgttccatcatgagacgcattacggagatcccagagacagtcagccggcagtgctctaaagaggacaaggagggcgccgaccatggcacagccaaaggcactgccctcatcaggaagaaccccccagagtcttcagggaacacagggaaatccaaggaggagaccctgaaaaaccgagtcttctcactcaagaaatcccacagcacttatgaccacgtgagagaccaaacggaagagtccagtagcctacccacagaaagccaagaggaggagacaacagaaaattccacactggaatccctgtcgggtaaaaaactaacacaaaaactaaaagaagacagcgaggctgagtccacggagtcggtgccgttggtgtgcaagtcagcaagcgctcacaacctcagctcagagaagaaaactgggcacccacgaacatcgatgttacagaagtctctcagtgtcatagcaagcgccaaggagaagactcttggattagctgggaaaacccaaacagcaggtgtggaagaacgcactaaatcccagaaacctttgccaaaagataaagagacaaacagaaatcactcaaattctgataacacagagactaaagatcctgccccccaaaactcaaatcctgcggaggagccaagaaagcctcagaaatctgggattatgaaacaacaaagggtcaaccccaccactgccaattctgacctgaacccaggcaccacccagatgaaggacaactttgacattggggaggtgtgtccttgggaggtttatgacctgacccctggtcctgtgccttcagaatcaaaagttcaaaagcacgtatctattgtggcttctgaaatggagaaaaaccccactttttccttaaaggagaaatctcaccacaagcctaaggcagctgaggtttgtcagcaatccaatcagaagcgcatagataaggctgaagtatgcctttgggagagccaaggccagtccattttggaagatgagaagcttttgatttccaagactccagttctcccagagagggcaaaagaggagaacggaggtcagcctcgtgcagccaatgtgtgtgctgggcagagcgaagaactgccccccaaagctgtagcatcaaaaacagagaatgaaaatctcaaccaaataggacaccaggaaaaaaagacatcttcttctgaggagaatgtgcgtggctcctataactcaagtaataacttccagcaacctttaacatcacgagcagaggtttgtccttgggagtttgagaccccagctcaaccaaatgctggaagaagtgtagctttacctgcctcttctgctctaagtgcaaataagatagcagggcctaggaaagaagagntctgggatagttttaaagtgtagcatctccaggaagaagaggaaaaggagggaaccccggattggatatgagacagaagatataagaatcaaatattcccaaggaggatttgtcaatcaaggaaaacatgacagatggtgaggtaaagtcaaaggcatgggtagaagaggaccaggggggcaagagcaacaacgtcataatggagaagtcagactttggtcaagaaagtccttcccttggtaacactaggaaaatctttccatttcagcatgtttaaggaaaatagcccacaatgtctgccctgatcaatatgtatccatgggactttgaagatcctaagccaggtaaaccaggagacacagaagacgtaccagatttgcaaagaaagaaaaggtataagacatatataactgaaattctaagtagctgaccgagaagaacttactttacctatttaaccttgatagcactgctaacttaatgcatcccaaaaatatcttttatattaatgattgctctcattttcttataaatgtatgtttcagtatatcgttgtgtctcatattcaagcattccagattgtataatttttgcaaataactttggtattatgtgacacaacacatttatgcaatctgcagctattcaattgttattgcaccttacagaatacctgctatctatcaactttagttgattcttgaagtacagtaagctttctctggcttgggaagccataactgttactataaaaacttttagttttggctgtggtttatatattgtgactttgaatttgactctattatttcacatcatggtttgttatactgtcttaatcagggttttttatacaagttgagttacttgttttgcacttcttgttaggactcagaagctttattaatattggagatcaagtggtcctacttagtcatatgtctcaataagttaaggacaacttatccgttgtttattcaaagtcagagatagataacgccttcattccaattaattgtcccttttaactctttcagtatttcctacttagcagcatttccaaaggaagaagctaagagtgagaaaaatataccgtgcattattattactattggaaagggaagactctagggatgacataagaattatagcagtactataaacccaggaagtttgcctttcaaaaaaaaacacaggtagctcctgatagcactttcaagggattatttttttaaagagaaaaattatggtagcatcaagatcattgtatggatatatttttattatgtgtactgaaaatacagtattttaaaataccttaaagtatttattctcataaactcttattcattgcttcagctacaggtagaacttgctgggctcaaatcccaaagaggttttataaccttatttattcaaaacctataaggtggtatggaatcttcattctcccaagcactggaaaatgtctaagtcctgcaaattgccattgtgagccacttgctcgacatgtaacatgtaaggtccatttgcaaagcaaagcagcccccaaagcatattttataaagcttattgcattccacactgatctcttggcatgggaatcctaagctgccgactaagccctaccgacatgatcatgcagtgagattccaaagctcagtctcatttcatttaaagaagaatcactcagaaatagaaccgagacttccctttttctccctgtaaacacccaagtatcaactgcttatttggccaggacactcccagcacaaataactattttttatgtcacaagcagcaaggaggacatgctagggtgataaaagatggagaaacaggatcagagggtggatatagggctgttcttagagagtattttcagtggaaggtaaaaacagaattctccatattcatcatcaaatttttctcagtgatttttttattcaggagtaagcaagcacttcactgtttcacaaagctgtgcgcaaatcttcctcacccatttgctgactttatgcattactcaggttggtggggtcggtttgagaagatatagaaattctatttttgtgtctttacaccatttatttcttttatctcttccttttcaatgaaggcctatatgcttggtgacctcctttaaggaatctttgtgaactgggttggaagttcctagacccacatatttgtttcatttatgtctgaaatctgttagcacttgattcctttcttgagaattatgcagtcaagcatcagtgactttctattgcacttcaggattgatcctgctagagatgtgagttaaaaagacttgccaaattatatcttagcgacattctatagttcatagattattctccaccagcataaatcagtgagagtgcctagagtctttctgagagtttcattgccattatcaacaagagaagttgaaatttacaagtcaggaggttatttttccagattgataaccatagaaagtgaataaacacttttaaggtcgcaaacatttgctaggttgtccttctcaatgcatgtgcaggctgcatcctgtccttgtttttaagccagggtttataaataagtagatttataccaatcttaatagaattgtatattttatgcaagaattaaatgctttacaacatgaagtataactcaacccattgtaaactttggtggcaatatggatttgaaactcgacagttctcttgtatttgcttcctaggtttctgcatgcaagttatgacaggtaggactgaaaaaacactgccttttgacttctagcatttagcaaccgagagtcgtagagtcaataaagctgtaagtgtcttcacttaatctgtggttctcctaaaactattatctgaaacctacagcatcccaccatgaaatatttggtaaatttatgttgtgacgtgttgcagcatgtaaataattataacttctctgcaataaaacatatttatatgaaaaaaaaaag

SEQ ID NO: 61609 - DNA, 379 bp, Homo sapiens
agcatctctgagtgaaaagcaattatataaacacaaaggaaccattattagagaaatcatatttatgttcccatattgtatgtggtcagaggaaagcaagacaagggcaagacttgggcaagtgacaagacgtattagcagtggcagcaacagtgctgggtaaacagttgtaaatctcaaacgctgagccgtgttaacattttacagaatgctttgatccttttcagtaagatacaaagcaagaataaattcacacagcctccttggaggtcagtgtgatttctctgtttctgtggaaaagcactaactagtcacatgctaattcacagtttgatgctcatcaaactggagcagatggttagaggtagggatgacatac

SEQ ID NO: 61610 - DNA, 1314 bp, Homo sapiens
agggccccgccctgccttctggggcaaagcggagagtggtcggttctgccccacagtaacgcgaggaaagaaatctcgcgaggctggagttctccgggagcgccggtcggaggcggtcggcggaggtgtctaccccgccggtgatggcgttgaacgccactggcttcccggccttccgtccgctgcctccgtccgattctgcgtctgcttgctgaggaggcggattaggggggcgcggagtctcttcccttgagtgcataggtcccggttggtagagggtttgagtccgcatcgccacagctgaaggctgcgagggactaagagcagaatatatctttagaaatgagttgcacaattgagaaggcacttgccgacgctaaagctcttgttgaaagattaagagatcatgacgatgcagcagaatctctgattgagcaaaccacagctctcaacaagcgagtagaagccatgaaacagtatcaggaagaaattcaagaacttaatgaagtcgcgagacatcggccacggtccacgttagttatgggaatccagcaagaaaacagacaaatcagagagttgcaacaagaaaacaaagaattacgtacatctctggaagaacatcagtcggccttggaacttataatgagcaagtaccgagaacaaatgtttagattgctaatggctagcaaaaaagatgatccgggtataataatgaagttaaaagagcagcactccaagattgacatggtacatcgtaacaagtccgaaggattcttccttgatgcatctcgacacatccttgaagcacctcaacatggactggagagaaggcacttggaagcaaatcagaatgtacactaaataaacagtcaacttttggggtgtggatggaaggggggtccattttaaaagtgcttttacattgaatttccctcccagattagatcagcaaataaatgaaatttattaaaagaatgttgtgtctttaatagccatgctgttcagtgtagaaactttaaatctctcattaattttctgtgtattgtatcatgtacagcctgttagatatttgcaggttttataggttattcagtccaacgctttatttatttgctcttgttagttgttgctgtgaaacagtcatttcctttctggacatcaaagatattttcttggcattaattttaaactgatttcataaggtcaaagtattaaatgttttaattcagattgtggatagtttgtagtcctttgattttgcaaatgaaattaaaatgcctttgtttagatgttaggattaagtatagtagtgct

SEQ ID NO: 61611 - DNA, 1001 bp, Homo sapiens
agggccccgccctgccttctggggcaaagcggagagtggtcggttctgccccacagtaacgcgaggaaagaaatctcgcgaggctggagttctccgggagcgccggtcggaggcggtcggcggaggtgtctaccccgccggtgatggcgttgaacgccactggcttcccggccttccgtccgctgcctccgtccgattctgcgtctgcttgctgaggaggcggattaggggggcgcggagtctcttcccttgagtgcataggtcccggttggtagagggtttgagtccgcatcgccacagctgaaggctgcgagggactaagagcagaatatatctttagaaatgagttgcacaattgagaaggcacttgccgacgctaaagctcttgttgaaagattaagagatcatgacgatgcagcagaatctctgattgagcaaaccacagctctcaacaagcgagtagaagccatgaaacagtatcaggaagaaattcaagaacttaatgaagtcgcgagacatcggccacggtccacgttagttatgggaatccagcaagaaaacagacaaatcagagagttgcaacaagaaaacaaagaattacgtacatctctggaagaacatcagtcggccttggaacttataatgagcaagtaccgagaacaaatgtttagattgctaatggctagcaaaaaagatgatccgggtataataatgaagttaaaagagcagcactccaaggtaatccattctataaatgtgacctgaaatggaacaagagagacgattgattattctgtgttcagattttttttgaaaaaaatcacaggtatctagtaatggcattttaacatgatgttgaatgtttcatctttttaattgacattttctcctttttcttatttttccatttcttgttatatatcattttctgtttgatttataaactctcactgtttcttagaaactttaatttgtacgttgaaaaataaattttattttgg

SEQ ID NO: 61612 - DNA, 824 bp, Homo sapiens
gttataatacagaactttgcccttaactagaagtttttgagcacatacttaaaaaatcagtagaaagtttgagagctcatttttacccaaatactaattttcatgttatttttgaacagatgcctttttggaaatcttaaaaaagcaaacatttcaaacagttggctaacacgcatgaactaacactcattcagtttttaaattacggatgatatccgtattaacattataatgactctatactacagattgacatggtacatcgtaacaagtccgaaggattcttccttgatgcatctcgacacatccttgaagcacctcaacatggactggagagaaggcacttggaagcaaatcagaatgtacactaaataaacagtcaacttttggggtgtggatggaaggggggtccattttaaaagtgcttttacattgaatttccctcccagattagatcagcaaataaatgaaatttattaaaagaatgttgtgtctttaatagccatgctgttcagtgtagaaactttaaatctctcattaattttctgtgtattgtatcatgtacagcctgttagatatttgcaggttttataggttattcagtccaacgctttatttatttgctcttgttagttgttgctgtgaaacagtcatttcctttctggacatcaaagatattttcttggcattaattttaaactgatttcataaggtcaaagtattaaatgttttaattcagattgtggatagtttgtagtcctttgattttgcaaatgaaattaaaatgcctttgtttagatgttaggattaagtatagtagtgct

SEQ ID NO: 61613 - DNA, 547 bp, Homo sapiens
  misc_feature (485)..(485): n is a, c, g, or t
taactcacttgtggcaggtctttattgaataaaggaggaataaacctagacagggagttagaaatgaaagacatttcaagacagttcaagggttatgttggtgacacttcttgtcttccagacagttttgaaagcacagatcttgcctcttgtgcttgttaaaaaatctgtgatacttctctgaagattttataattaaataagtgaaccattaccatgaccttttataaaagtgctgccctatttgaagtattgggttttttctcatgatgagctttgttagacttggtactgaaaaaatcagtagtttttttccttctattttaaaggcaaagaaatgcttgcttcagcctcccaagtagttgggactacaggcatgcgccaccacgcccagctaatttttgtattttttagtagagaccggggtttcaccgtgttggccaggatggtctccatctcttgacctcatgatctgcccgcctcgngtcccaaagtgttgggattacaggcatgagcactgcgcctggcaaatgttttagtttttatg

SEQ ID NO: 61614 - DNA, 3020 bp, Homo sapiens
agggccccgccctgccttctggggcaaagcggagagtggtcggttctgccccacagtaacgcgaggaaagaaatctcgcgaggctggagttctccgggagcgccggtcggaggcggtcggcggaggtgtctaccccgccggtgatggcgttgaacgccactggcttcccggccttccgtccgctgcctccgtccgattctgcgtctgcttgctgaggaggcggattaggggggcgcggagtctcttcccttgagtgcataggtcccggttggtagagggtttgagtccgcatcgccacagctgaaggctgcgagggactaagagcagaatatatctttagaaatgagttgcacaattgagaaggcacttgccgacgctaaagctcttgttgaaagattaagagatcatgacgatgcagcagaatctctgattgagcaaaccacagctctcaacaagcgagtagaagccatgaaacagtatcaggaagaaattcaagaacttaatgaagtcgcgagacatcggccacggtccacgttagttatgggaatccagcaagaaaacagacaaatcagagagttgcaacaagaaaacaaagaattacgtacatctctggaagaacatcagtcggccttggaacttataatgagcaagtaccgagaacaaatgtttagattgctaatggctagcaaaaaagatgatccgggtataataatgaagttaaaagagcagcactccaagattgacatggtacatcgtaacaagtccgaaggattcttccttgatgcatctcgacacatccttgaagcacctcaacatggactggagagaaggcacttggaagcaaatcagaatgaactgcaagcacatgttgaccagataactgaaatggcagcagtaatgaggaaagccattgaaattgacgagcaacagggttgcaaggaacaagaacgaatatttcaacttgaacaagaaaacaaaggcttgagagagatccttcaaataactcgagaatcatttttgaacctaaggaaagatgatgcgtcggaaagtacttctttgtcagcattagtgaccaacagtgatttgagtctgaggaagagctgaagagtttctgagtctgtgagcttcttacatggctccaaatggtcaaataagtgaatgaatgaatggacagaaaattcaatcctttatttttttctctgtaaatatgtacagtgcacgggctatgagatagcaacaaaaaatgcatagttaatggtcatagactttattccaaaacataattggaaaatagaaactgagccattgccaaatggtaaagaaatgaaaagttttcacagtgactactgaatataccaagagcttttggcagtactgctggctttctgggtgattaattaggtaaacttgaatattcccagtaaatgtttgagaatgcataaaattataccaatttaaaaatataaatttttgccactgttttgtgaacggaggatttgtacgctaaatttcatccttatttggcgtcaaagttgatgcaaagtttatgtaccatgagacttctagtgattgcctactttcacatttatttaaatttttgtgaaagaaaatacagttttaaaggctataggaatgtgttatatgtaccttaaacagataatttaattttagcaatttatcataactgatacttagctaacaattgtccataacttgtttaagtgtaagaaataccatttcaggaatgaaaaagaaggaatactactttctaagaaagaagatcttataatagacatatttagtaggttaaactactcctttgaaagaataagttttggttcaaagtcaataatgaagacgagatttgtttttctcttctctggctgatttttaaggatattatgtagttcatttagttaacagaattgaaatgtttgatatggcaagataggtatggtaatttcaaagtgaattgggaattcctctggctcatagaacccttttttttttcctttaagtattcttgagatacaaaaaaaaaaagtaaataaaatttcaaaaaaaaagttccggatctgtttttaagctccatctggtcctcataacctgcaagatttttcttaaaacctttcagctgaaagtgggggtaaaggtggagtaatctgtggatttgtttctgttgtcttttaaaatgtcaaatatataatatgtaatttttttaaaaaccaccagatacagaaatgtgctttaacatcagttgaaacctaaattttcttatgttgtggtgattgtattaaaaagggataaaagaagagtgtcaaacatggttaaatatattgtactcatttatgttgaatacgtattaaaattaagacaaatggaaaattatactttgagtatataatttgttaaatattactttatatggtaattttatgtataatttcatatattggtaaaattcaaaactacacttgagaatttttttatcttaagtttggggtgaatggggtggatgagactgattgaatagaaaagggctaatggcccaaacattatatagatttctttttttcagtcagaggccttatttgatattttataaataaatgacagtttttatttttaaactttttattgtttttgggaaagtattccttaatttaatgacacattcattcagatacttcttatccctgctaataaaggaaatctatttcaagctacaccattgagattaagtctgaggcagttcattgaggcagctctactataaaagcttacttgataaataattatttttgtaaacaagttgggttaacttattcttcgtctttttgcttggatatgaatttaaggtcttcatgtttaaagacatttactttgttatttagtgacacatttccatcctatttttttttttttttttggttgttgttaaacagaaccttaagtttatgtttgaggtatgtactgcataggaacctattttattattaaagatgaatgattaaaattgg

SEQ ID NO: 61615 - DNA, 3485 bp, Homo sapiens
agggccccgccctgccttctggggcaaagcggagagtggtcggttctgccccacagtaacgcgaggaaagaaatctcgcgaggctggagttctccgggagcgccggtcggaggcggtcggcggaggtgtctaccccgccggtgatggcgttgaacgccactggcttcccggccttccgtccgctgcctccgtccgattctgcgtctgcttgctgaggaggcggattaggggggcgcggagtctcttcccttgagtgcataggtcccggttggtagagggtttgagtccgcatcgccacagctgaaggctgcgagggactaagagcagaatatatctttagaaatgagttgcacaattgagaaggcacttgccgacgctaaagctcttgttgaaagattaagagatcatgacgatgcagcagaatctctgattgagcaaaccacagctctcaacaagcgagtagaagccatgaaacagtatcaggaagaaattcaagaacttaatgaagtcgcgagacatcggccacggtccacgttagttatgggaatccagcaagaaaacagacaaatcagagagttgcaacaagaaaacaaagaattacgtacatctctggaagaacatcagtcggccttggaacttataatgagcaagtaccgagaacaaatgtttagattgctaatggctagcaaaaaagatgatccgggtataataatgaagttaaaagagcagcactccaagattgacatggtacatcgtaacaagtccgaaggattcttccttgatgcatctcgacacatccttgaagcacctcaacatggactggagagaaggcacttggaagcaaatcagaatgaactgcaagcacatgttgaccagataactgaaatggcagcagtaatgaggaaagccattgaaattgacgagcaacagggttgcaaggaacaagaacgaatatttcaacttgaacaagaaaacaaaggcttgagagagatccttcaaataactcgagaatcatttttgaacctaaggaaagatgatgcgtcggaaagtacttctttgtcagcattagtgaccaacagtgatttgagtctgaggaagagctgaagagtttctgagtctgtgagcttcttacatggctccaaatggtcaaataagtgaatgaatgaatggacagaaaattcaatcctttatttttttctctgtaaatatgtacagtgcacgggctatgagatagcaacaaaaaatgcatagttaatggtcatagactttattccaaaacataattggaaaatagaaactgagccattgccaaatggtaaagaaatgaaaagttttcacagtgactactgaatataccaagagcttttggcagtactgctggctttctgggtgattaattaggtaaacttgaatattcccagtaaatgtttgagaatgcataaaattataccaatttaaaaatataaatttttgccactgttttgtgaacggaggatttgtacgctaaatttcatccttatttggcgtcaaagttgatgcaaagtttatgtaccatgagacttctagtgattgcctactttcacatttatttaaatttttgtgaaagaaaatacagttttaaaggctataggaatgtgttatatgtaccttaaacagataatttaattttagcaatttatcataactgatacttagctaacaattgtccataacttgtttaagtgtaagaaataccatttcaggaatgaaaaagaaggaatactactttctaagaaagaagatcttataatagacatatttagtaggttaaactactcctttgaaagaataagttttggttcaaagtcaataatgaagacgagatttgtttttctcttctctggctgatttttaaggatattatgtagttcatttagttaacagaattgaaatgtttgatatggcaagataggtatggtaatttcaaagtgaattgggaattcctctggctcatagaacccttttttttttcctttaagtattcttgagatacaaaaaaaaaaagtaaataaaatttcaaaaaaaaagttccggatctgtttttaagctccatctggtcctcataacctgcaagatttttcttaaaacctttcagctgaaagtgggggtaaaggtggagtaatctgtggatttgtttctgttgtcttttaaaatgtcaaatatataatatgtaatttttttaaaaaccaccagatacagaaatgtgctttaacatcagttgaaacctaaattttcttatgttgtggtgattgtattaaaaagggataaaagaagagtgtcaaacatggttaaatatattgtactcatttatgttgaatacgtattaaaattaagacaaatggaaaattatactttgagtatataatttgttaaatattactttatatggtaattttatgtataatttcatatattggtaaaattcaaaactacacttgagaatttttttatcttaagtttggggtgaatggggtggatgagactgattgaatagaaaagggctaatggcccaaacattatatagatttctttttttcagtcagaggccttatttgatattttataaataaatgacagtttttatttttaaactttttattgtttttgggaaagtattccttaatttaatgacacattcattcagatacttcttatccctgctaataaaggaaatctatttcaagctacaccattgagattaagtctgaggcagttcattgaggcagctctactataaaagcttacttgataaataattatttttgtaaacaagttgggttaacttattcttcgtctttttgcttggatatgaatttaaggtcttcatgtttaaagacatttactttgttatttagtgacacatttccatcctatttttttttttttttttggttgttgttaaacagaaccttaagtttatgtttgaggtatgtactgcataggaacctattttattattaaagatgaatgattaaaattggtatggtctccaatttaatttgaaaagtgcttacccttattcttatatatggtttaattttaaggttttttgtctcttcttagtgcaaaactacttagcagtgacctctatctgtattccttaggaattagcagcttcttagtgtggatcctgcagaacttcttaccatttgtagtaggttgaatcatgtcccctagaaggtaagtctaagtcctaacttgatacacctgggaaggtgaccatatttggaaatagtctttacagatgtgattaggggatctcaggatataattaccctggattttgggtgggctccaaacccagtgactagtgtcgttacaataagagaggaggagatatgaaacacagatatagcagcatgaggacagaggcaatgagttacgcaaggactgctagccaccaccagaagctgcaagagaggcatggaatgggttcttcacgggct

SEQ ID NO: 61616 - DNA, 4397 bp, Homo sapiens
taactcacttgtggcaggtctttattgaataaaggaggaataaacctagacagggagttagaaatgaaagacatttcaagacagttcaagggttatgttggtgacacttcttgtcttccagacagttttgaaagcacagatcttgcctcttgtgcttgttaaaaaatctgtgatacttctctgaagattttataattaaataagtgaaccattaccatgaccttttataaaagtgctgccctatttgaagtattgggttttttctcatgatgagctttgttagacttggtactgaaaaaatcagtagtttttttccttctattttaaaggcaaagaaatgcttgcttcagctaggcatggtggctcatgcctgtaattgggaggctgaggtgggtggatcacctgacgtcaggaattggagaccagcctggccaacatggtgaaaccccatctctactaaaaatacaaaaagttagccaggcgtgatagcgggtgcctgtaatcccagctgctcgggaggctaaagcaagagaattgtttgaacctgggagtgggaggttgcagtgagccgaggtcgtgccattgcactccagcctggcccaacaagagcgagactctgtcctaaaaaaaaagaaatgccttgccttcctgtgtagttttttaacttaggtcagtgccataggactgaccaaatcataaattgaggatgctgttggtattcaaagtttttactcattacccttactcagtttgcagctgcaatgatctgtacttaacctgcttttacatattatgcttccttgacaatgggaggaattttaatggttaacttgcagaatatgacagatacttgtcttaatatcattcttcctaccataatctaattcaaaactatccagtagaactttctgaaatgattggaatgttttttatctgtgctgtccagtgtggaagccagtagccacatgtggctgttgagcacttgcagtgtcactaatgcgtttgagggactgaattgttaatttttaaaaatgtattgattttaattaagtttaacattgttttggacagcacagattagccttttagagtaccttcttgctgagtactagcagtgtataggtttccccatgaaaaggacctacatttttgttggttaagaggttattaaatgtgctttgccaaagatactaccttgtcatttcttccagcttattagttccgtgggtttcttggagtactgttaaatcctttttacaaatatatatatacacaactactgaagagactgtttatttggggagttattcacttttatatttaagtcttaggcttaatatgataaaatacctctcagttgctgtgaataatggtctatagaagctgttcattgagaaaatgattattctcgagtttctgttgattttaaaccttttttgtctgtctctttcactagactgtaagcttcttcagatcaggggacatgtcttgacagtctttgtattcctgttgtttagcatagtactggcacatcataggtgtgcaagataagaaaatgagattggaagaatttatgctacttcgtgcgcctaacaaatgtggatgtctgtattatactgatactatattttcaatagttagcaaagaaggccatttaatattttaatactgaaaagcagaattgtgctcattttattcaatacttaccatataccatacactagatagtaggtggatgtaaagatgcagttcctgctctcaaagaggattatgacctagaaaaggttacagattggattgagataactttataggcctgaacaatacagaaaagatttctaaatcattgaagacttcagggaggaaaagagattgaatgcgtcggcaatttttatcattcccgttactttgaacaatagtgtatgtaagtgcaaaaaaaaagaaaaagttgctgatcattgtggtgagaggaatgtaaaatatgagtatttttcttgctgctaggtttagttatattgtgctgcttattcttaattctagtcctaacaaatttgatttcaaaagcacatctgtggtcaaccaacttcattgttaatatttgttttattcatattaagtgacaatgtaagaatattcatgttaagtggtactgcagattttataaaaaggagaggatccaaaaataaaaaagtattttgctgatttccaactcccatccctctttttcaggaactgcaagcacatgttgaccagataactgaaatggcagcagtaatgaggaaagccattgaaattgacgagcaacagggttgcaaggaacaagaacgaatatttcaacttgaacaagaaaacaaaggcttgagagagatccttcaaataactcgagaatcatttttgaacctaaggaaagatgatgcgtcggaaagtacttctttgtcagcattagtgaccaacagtgatttgagtctgaggaagagctgaagagtttctgagtctgtgagcttcttacatggctccaaatggtcaaataagtgaatgaatgaatggacagaaaattcaatcctttatttttttctctgtaaatatgtacagtgcacgggctatgagatagcaacaaaaaatgcatagttaatggtcatagactttattccaaaacataattggaaaatagaaactgagccattgccaaatggtaaagaaatgaaaagttttcacagtgactactgaatataccaagagcttttggcagtactgctggctttctgggtgattaattaggtaaacttgaatattcccagtaaatgtttgagaatgcataaaattataccaatttaaaaatataaatttttgccactgttttgtgaacggaggatttgtacgctaaatttcatccttatttggcgtcaaagttgatgcaaagtttatgtaccatgagacttctagtgattgcctactttcacatttatttaaatttttgtgaaagaaaatacagttttaaaggctataggaatgtgttatatgtaccttaaacagataatttaattttagcaatttatcataactgatacttagctaacaattgtccataacttgtttaagtgtaagaaataccatttcaggaatgaaaaagaaggaatactactttctaagaaagaagatcttataatagacatatttagtaggttaaactactcctttgaaagaataagttttggttcaaagtcaataatgaagacgagatttgtttttctcttctctggctgatttttaaggatattatgtagttcatttagttaacagaattgaaatgtttgatatggcaagataggtatggtaatttcaaagtgaattgggaattcctctggctcatagaacccttttttttttcctttaagtattcttgagatacaaaaaaaaaaagtaaataaaatttcaaaaaaaaagttccggatctgtttttaagctccatctggtcctcataacctgcaagatttttcttaaaacctttcagctgaaagtgggggtaaaggtggagtaatctgtggatttgtttctgttgtcttttaaaatgtcaaatatataatatgtaatttttttaaaaaccaccagatacagaaatgtgctttaacatcagttgaaacctaaattttcttatgttgtggtgattgtattaaaaagggataaaagaagagtgtcaaacatggttaaatatattgtactcatttatgttgaatacgtattaaaattaagacaaatggaaaattatactttgagtatataatttgttaaatattactttatatggtaattttatgtataatttcatatattggtaaaattcaaaactacacttgagaatttttttatcttaagtttggggtgaatggggtggatgagactgattgaatagaaaagggctaatggcccaaacattatatagatttctttttttcagtcagaggccttatttgatattttataaataaatgacagtttttatttttaaactttttattgtttttgggaaagtattccttaatttaatgacacattcattcagatacttcttatccctgctaataaaggaaatctatttcaagctacaccattgagattaagtctgaggcagttcattgaggcagctctactataaaagcttacttgataaataattatttttgtaaacaagttgggttaacttattcttcgtctttttgcttggatatgaatttaaggtcttcatgtttaaagacatttactttgttatttagtgacacatttccatcctatttttttttttttttttggttgttgttaaacagaaccttaagtttatgtttgaggtatgtactgcataggaacctattttattattaaagatgaatgattaaaattgg

SEQ ID NO: 61617 - DNA, 359 bp, Homo sapiens
tatcaggaagaaattcaagaacttaatgaagtcgcgagacatcggccacggtccacgttagttatgggaatccagcaagaaaacagacaaatcagagagttgcaacaagaaaacaaaggtaagatacgttactttttgacattaatcccatttctagtctatattcctaaatcgtatttattgctctttatcctgtcccacatatgaacatctgcctggttgacatcctcttagattctcacccttaatatccagttagcactgctgttgttagctatgaaataacccagcttcattctctgcagtcccactgcattggcccccagattagatgctcagtctcttgcctgaaatgtcca

SEQ ID NO: 61618 - DNA, 2906 bp, Homo sapiens
agggccccgccctgccttctggggcaaagcggagagtggtcggttctgccccacagtaacgcgaggaaagaaatctcgcgaggctggagttctccgggagcgccggtcggaggcggtcggcggaggtgtctaccccgccggtgatggcgttgaacgccactggcttcccggccttccgtccgctgcctccgtccgattctgcgtctgcttgctgaggaggcggattaggggggcgcggagtctcttcccttgagtgcataggtcccggttggtagagggtttgagtccgcatcgccacagctgaaggctgcgagggactaagagcagaatatatctttagaaatgagttgcacaattgagaaggcacttgccgacgctaaagctcttgttgaaagattaagagatcatgacgatgcagcagaatctctgattgagcaaaccacagctctcaacaagcgagtagaagccatgaaacagtatcaggaagaaattcaagaacttaatgaagtcgcgagacatcggccacggtccacgttagttatgggaatccagcaagaaaacagacaaatcagagagttgcaacaagaaaacaaagaattacgtacatctctggaagaacatcagtcggccttggaacttataatgagcaagtaccgagaacaaatgtttagattgctaatggctagcaaaaaagatgatccgggtataataatgaagttaaaagagcagcactccaaggaactgcaagcacatgttgaccagataactgaaatggcagcagtaatgaggaaagccattgaaattgacgagcaacagggttgcaaggaacaagaacgaatatttcaacttgaacaagaaaacaaaggcttgagagagatccttcaaataactcgagaatcatttttgaacctaaggaaagatgatgcgtcggaaagtacttctttgtcagcattagtgaccaacagtgatttgagtctgaggaagagctgaagagtttctgagtctgtgagcttcttacatggctccaaatggtcaaataagtgaatgaatgaatggacagaaaattcaatcctttatttttttctctgtaaatatgtacagtgcacgggctatgagatagcaacaaaaaatgcatagttaatggtcatagactttattccaaaacataattggaaaatagaaactgagccattgccaaatggtaaagaaatgaaaagttttcacagtgactactgaatataccaagagcttttggcagtactgctggctttctgggtgattaattaggtaaacttgaatattcccagtaaatgtttgagaatgcataaaattataccaatttaaaaatataaatttttgccactgttttgtgaacggaggatttgtacgctaaatttcatccttatttggcgtcaaagttgatgcaaagtttatgtaccatgagacttctagtgattgcctactttcacatttatttaaatttttgtgaaagaaaatacagttttaaaggctataggaatgtgttatatgtaccttaaacagataatttaattttagcaatttatcataactgatacttagctaacaattgtccataacttgtttaagtgtaagaaataccatttcaggaatgaaaaagaaggaatactactttctaagaaagaagatcttataatagacatatttagtaggttaaactactcctttgaaagaataagttttggttcaaagtcaataatgaagacgagatttgtttttctcttctctggctgatttttaaggatattatgtagttcatttagttaacagaattgaaatgtttgatatggcaagataggtatggtaatttcaaagtgaattgggaattcctctggctcatagaacccttttttttttcctttaagtattcttgagatacaaaaaaaaaaagtaaataaaatttcaaaaaaaaagttccggatctgtttttaagctccatctggtcctcataacctgcaagatttttcttaaaacctttcagctgaaagtgggggtaaaggtggagtaatctgtggatttgtttctgttgtcttttaaaatgtcaaatatataatatgtaatttttttaaaaaccaccagatacagaaatgtgctttaacatcagttgaaacctaaattttcttatgttgtggtgattgtattaaaaagggataaaagaagagtgtcaaacatggttaaatatattgtactcatttatgttgaatacgtattaaaattaagacaaatggaaaattatactttgagtatataatttgttaaatattactttatatggtaattttatgtataatttcatatattggtaaaattcaaaactacacttgagaatttttttatcttaagtttggggtgaatggggtggatgagactgattgaatagaaaagggctaatggcccaaacattatatagatttctttttttcagtcagaggccttatttgatattttataaataaatgacagtttttatttttaaactttttattgtttttgggaaagtattccttaatttaatgacacattcattcagatacttcttatccctgctaataaaggaaatctatttcaagctacaccattgagattaagtctgaggcagttcattgaggcagctctactataaaagcttacttgataaataattatttttgtaaacaagttgggttaacttattcttcgtctttttgcttggatatgaatttaaggtcttcatgtttaaagacatttactttgttatttagtgacacatttccatcctatttttttttttttttttggttgttgttaaacagaaccttaagtttatgtttgaggtatgtactgcataggaacctattttattattaaagatgaatgattaaaattgg

SEQ ID NO: 61619 - DNA, 3373 bp, Homo sapiens
agggccccgccctgccttctggggcaaagcggagagtggtcggttctgccccacagtaacgcgaggaaagaaatctcgcgaggctggagttctccgggagcgccggtcggaggcggtcggcggaggtgtctaccccgccggtgatggcgttgaacgccactggcttcccggccttccgtccgctgcctccgtccgattctgcgtctgcttgctgaggaggcggattaggggggcgcggagtctcttcccttgagtgcataggtcccggttggtagagggtttgagtccgcatcgccacagctgaaggctgcgagggactaagagcagaatatatctttagaaatgagttgcacaattgagaaggcacttgccgacgctaaagctcttgttgaaagattaagagatcatgacgatgcagcagaatctctgattgagcaaaccacagctctcaacaagcgagtagaagccatgaaacagtatcaggaagaaattcaagaacttaatgaagtcgcgagacatcggccacggtccacgttagttatgggaatccagcaagaaaacagacaaatcagagagttgcaacaagaaaacaaagaattacgtacatctctggaagaacatcagtcggccttggaacttataatgagcaagtaccgagaacaaatgtttagattgctaatggctagcaaaaaagatgatccgggtataataatgaagttaaaagagcagcactccaagattgacatggtacatcgtaacaagtccgaaggattcttccttgatgcatctcgacacatccttgaagcacctcaacatggactggagagaaggcacttggaagcaaatcagaatgaactgcaagcacatgttgaccagataactgaaatggcagcagtaatgaggaaagccattgaaattgacgagcaacagggttgcaaggaacaagaacgaatatttcaacttgaacaagaaaacaaaggcttgagagagatccttcaaataactcgagaatcatttttgaacctaaggaaagatgatgcgtcggaaagtacttctttgtcagcattagtgaccaacagtgatttgagtctgaggaagagctgaagagtttctgagtctgtgagcttcttacatggctccaaatggtcaaataagtgaatgaatgaatggacagaaaattcaatcctttatttttttctctgtaaatatgtacagtgcacgggctatgagatagcaacaaaaaatgcatagttaatggtcatagactttattccaaaacataattggaaaatagaaactgagccattgccaaatggtaaagaaatgaaaagttttcacagtgactactgaatataccaagagcttttggcagtactgctggctttctgggtgattaattaggtaaacttgaatattcccagtaaatgtttgagaatgcataaaattataccaatttaaaaatataaatttttgccactgttttgtgaacggaggatttgtacgctaaatttcatccttatttggcgtcaaagttgatgcaaagtttatgtaccatgagacttctagtgattgcctactttcacatttatttaaatttttgtgaaagaaaatacagttttaaaggctataggaatgtgttatatgtaccttaaacagataatttaattttagcaatttatcataactgatacttagctaacaattgtccataacttgtttaagtgtaagaaataccatttcaggaatgaaaaagaaggaatactactttctaagaaagaagatcttataatagacatatttagtaggttaaactactcctttgaaagaataagttttggttcaaagtcaataatgaagacgagatttgtttttctcttctctggctgatttttaaggatattatgtagttcatttagttaacagaattgaaatgtttgatatggcaagataggtatggtaatttcaaagtgaattgggaattcctctggctcatagaacccttttttttttcctttaagtattcttgagatacaaaaaaaaaaagtaaataaaatttcaaaaaaaaagttccggatctgtttttaagctccatctggtcctcataacctgcaagatttttcttaaaacctttcagctgaaagtgggggtaaaggtggagtaatctgtggatttgtttctgttgtcttttaaaatgtcaaatatataatatgtaatttttttaaaaaccaccagatacagaaatgtgctttaacatcagttgaaacctaaattttcttatgttgtggtgattgtattaaaaagggataaaagaagagtgtcaaacatggttaaatatattgtactcatttatgttgaatacgtattaaaattaagacaaatggaaaattatactttgagtatataatttgttaaatattactttatatggtaattttatgtataatttcatatattggtaaaattcaaaactacacttgagaatttttttatcttaagtttggggtgaatggggtggatgagactgattgaatagaaaagggctaatggcccaaacattatatagatttctttttttcagtcagaggccttatttgatattttataaataaatgacagtttttatttttaaactttttattgtttttgggaaagtattccttaatttaatgacacattcattcagatacttcttatccctgctaataaaggaaatctatttcaagctacaccattgagattaagtctgaggcagttcattgaggcagctctactataaaagcttacttgataaataattatttttgtaaacaagttgggttaacttattcttcgtctttttgcttggatatgaatttaaggtcttcatgtttaaagacatttactttgttatttagtgacacatttccatcctatttttttttttttttttggttgttgttaaacagaaccttaagtttatgtttgaggtatgtactgcataggaacctattttattattaaagatgaatgattaaaattggaaaaaaaaaaaaacaaaaaaaaaaaaaaaaaaaaaaaaaaaaacaaaaaaacaaaaaaagggggggggcggtcaaaaaacacccccgaggaggggcacccaacatgatggaggtacgcacacccacatttcctgtgaaaaacaaaaggggcccaccaaaaggagaggcatcaatacaaaagaacgagagaggggcgagcagcattaaaaaacagagcgcaggtgcgcgggaaaaaacaggtcgcgtcgtgggcaatttccgtgggggaaacaacccccccatccgcggggggggggagcaaactggggcggcacacgcccccagaaaaaatacacggcgcgacggggaaaaac

SEQ ID NO: 61620 - DNA, 1436 bp, Homo sapiens
agacgggtgatctagaggatcccgtctagccgtgccagtgttctggagaaaacaaccacgaaggccccagggaaaatgcctaagagtactaagaagtgggtgacaaaaaatgcaaagagaccaaccactcaacccccagtgatgccaaccacgaaacactccagggcccaaagccccccagacctaacctcacagaccactgcagcactgaccactgaggcctcccgaagacctacctctgagtttaccagaaggccgaccacggaggccccccagagatggacctctcacaccactgccacgctgacccctcaggccccccgagaacggaccactaagaccatggcaatgctgaccactcaaggcccccaagaaatgacctctgagtccactatcaagagtatccctcaggcctccctggagccatctgctgagatcccagaagggtctccagagtcacccaaagacccggccccctctcccagtgttagcaccactggggaatcaggcctgttccgggttcgtctggccgatgggcccaaccgctgtgctggccggctggaagtgtggcatgccggacgctggggaacagtgtgtgatgacaactgggacctgcgggacgccactgtggcctgctgggaactgggctgtggaaaggtccggcctcgagtaggcaaaacccattacggccctgggactgggcccatctggctggatgacatgggctgtaagggaagcgaggcctcactgagcgactgcccctcgggggcttgggggaagcacaactgtgaccacgaggaagacgtggggctcacctgcactggtaccagggcatggcggcggtggtggggttgtcgggggtggccaggagaatggagtcagggtggggccaggtgacggcaccatggtcgactctaaagaactgggtatgaggggtcggggtggggagatcccagagttgctccagaagattccaaaaggggagggaagagcagcagcaaggacctctgagaaagaggatggggtcaaccattaccccaatttctccaaaggctacacagactatgacgattatcccccctggacctgggaccccacctcaagagaggacctggccaaggggactaccacagcgggggtacctggacacactctcccctggaggaccacccggcgcccgggtagctcctccccagcaataaggcgcctgccggacacaggcagcaaagatggttacaagcttccctggacgtgggacacaccatcaggaaggggcctggctgaggggacccctaccgcaggcaaactaggaccaactcttggggctggcaccaccaggagcccaggcagtcctccaactccgagagtccatggagacacaggttccccgaagaaaaaccgtggccccgagcgccggccaccgcggcccgctgcga

SEQ ID NO: 61621 - DNA, 1721 bp, Homo sapiens
gacgccggggccgtgtgtgacggcatgcccctgggctacgtccctcccacggcccccacggacagcaacaactccacgcccagggaggctgcctccaggcccccgtccaccatgacgagccaggctccagggacggcaggcgtttcacctcctccagcctcccctactgtcctttgggagcctggaccggaagccgggcccccaggcctggactccatctcagaccccttcagctggagctggattcctggactggggagagatcgggatgcctggctcccgggagagctggccaccaagccctctgcaagtgtgactgccagtgttctggagaaaacaaccacgaaggccccagggaaaatgcctaagagtactaagaagtgggtgacaaaaaatgcaaagagaccaaccactcaacccccagtgatgccaaccacgaaacactccagggcccaaagccccccagacctaacctcacagaccactgcagcactgaccactgaggcctcccgaagacctacctctgagtttaccagaaggccgaccacggaggccccccagagatggacctctcacaccactgccacgctgacccctcaggccccccgagaacggaccactaagaccatggcaatgctgaccactcaaggcccccaagaaatgacctctgagtccactatcaagagtatccctcaggcctccctggagccatctgctgagatcccagaagggtctccagagtcacccaaagacccggccccctctcccagtgttagcaccactggggaatcaggcctgttccgggttcgtctggccgatgggcccaaccgctgtgctggccggctggaagtgtggcatgccggacgctggggaacagtgtgtgatgacaactgggacctgcgggacgccactgtggcctgctgggaactgggctgtggaaaggtccggcctcgagtaggcaaaacccattacggccctgggactgggcccatctggctggatgacatgggctgtaagggaagcgaggcctcactgagcgactgcccctcgggggcttgggggaagcacaactgtgaccacgaggaagacgtggggctcacctgcactggtaccagggcatggcggcggtggtggggttgtcgggggtggccaggagaatggagtcagggtggggccaggtgacggcaccatggtcgactctaaagaactgggtatgaggggtcggggtggggagatcccagagttgctccagaagattccaaaaggggagggaagagcagcagcaaggacctctgagaaagaggatggggtcaaccattaccccaatttctccaaaggctacacagactatgacgattatcccccctggacctgggaccccacctcaagagaggacctggccaaggggactaccacagcgggggtacctggacacactctcccctggaggaccacccggcgcccgggtagctcctccccagcaataaggcgcctgccggacacaggcagcaaagatggttacaagcttccctggacgtgggacacaccatcaggaaggggcctggctgaggggacccctaccgcaggcaaactaggaccaactcttggggctggcaccaccaggagcccaggcagtcctccaactccgagagtccatggagacacaggttccccgaagaaaaaccgtggccccgagcgccggccaccgcggcccgctgcga

SEQ ID NO: 61622 - DNA, 465 bp, Homo sapiens
ggacacaccatcaggaaggggcctggctgaggggacccctaccgcaggcaaactaggaccaactcttggggctggcaccaccaggagcccaggcagtcctccaactccgagagtccatggagacacaggtgagacacgtggctggggtgaggagactgggacggtatttgtcctggggtaaagagacagattccagactccccactggaacccttaccccagaaagactcagcagaaatataccctaaaacaaagggttatcggctgagcatggtggctcatgcctgtaatcacagcactttgggaggccgagttgggaggattgcttaagctcgggagtttgagagcagcctgggcaacatggtgagccccccaagatatgaacattagctgggtgtggtggtacgcacgtgtggtcccagctgcttgggaggctgaggcaggaggatcccttgagcctgggtg

SEQ ID NO: 61623 - DNA, 1848 bp, Homo sapiens
cccagggtccccccagctgcgcctggtggctgggcccagcaagtgctcaggtcgactggaggtgtggcatgaccagcgctgggggaccgtgtgtgacgatagctgggacatgcgggattcagctgtggtctgccgggagctgggctgtggtggacctcagcagccagaccctgctgctggccgctttggctggggtgcgggccccatctggctagatgatgtgggctgtgtggggaccgaggcttcactgtccgactgccctgctgctccctggggaaagcacaactgcgctcacaatgaggatgttggggtcacctgcactgggcccccaggcctggactccatctcagaccccttcagctggagctggattcctggactggggagagatcgggatgcctggctcccgggagagctggccaccaagccctctgcaagtgtgactgccagtgttctggagaaaacaaccacgaaggccccagggaaaatgcctaagagtactaagaagtgggtgacaaaaaatgcaaagagaccaaccactcaacccccagtgatgccaaccacgaaacactccagggcccaaagccccccagacctaacctcacagaccactgcagcactgaccactgaggcctcccgaagacctacctctgagtttaccagaaggccgaccacggaggccccccagagatggacctctcacaccactgccacgctgacccctcaggccccccgagaacggaccactaagaccatggcaatgctgaccactcaaggcccccaagaaatgacctctgagtccactatcaagagtatccctcaggcctccctggagccatctgctgagatcccagaagggtctccagagtcacccaaagacccggccccctctcccagtgttagcaccactggggaatcaggcctgttccgggttcgtctggccgatgggcccaaccgctgtgctggccggctggaagtgtggcatgccggacgctggggaacagtgtgtgatgacaactgggacctgcgggacgccactgtggcctgctgggaactgggctgtggaaaggtccggcctcgagtaggcaaaacccattacggccctgggactgggcccatctggctggatgacatgggctgtaagggaagcgaggcctcactgagcgactgcccctcgggggcttgggggaagcacaactgtgaccacgaggaagacgtggggctcacctgcactggtaccagggcatggcggcggtggtggggttgtcgggggtggccaggagaatggagtcagggtggggccaggtgacggcaccatggtcgactctaaagaactgggtatgaggggtcggggtggggagatcccagagttgctccagaagattccaaaaggggagggaagagcagcagcaaggacctctgagaaagaggatggggtcaaccattaccccaatttctccaaaggctacacagactatgacgattatcccccctggacctgggaccccacctcaagagaggacctggccaaggggactaccacagcgggggtacctggacacactctcccctggaggaccacccggcgcccgggtagctcctccccagcaataaggcgcctgccggacacaggcagcaaagatggttacaagcttccctggacgtgggacacaccatcaggaaggggcctggctgaggggacccctaccgcaggcaaactaggaccaactcttggggctggcaccaccaggagcccaggcagtcctccaactccgagagtccatggagacacaggttccccgaagaaaaaccgtggccccgagcgccggccaccgcggcccgctgcga

SEQ ID NO: 61624 - DNA, 1207 bp, Homo sapiens
agacgggtgatctagaggatcccgtctagccgtgccagtgttctggagaaaacaaccacgaaggccccagggaaaatgcctaagagtactaagaagtgggtgacaaaaaatgcaaagagaccaaccactcaacccccagtgatgccaaccacgaaacactccagggcccaaagccccccagacctaacctcacagaccactgcagcactgaccactgaggcctcccgaagacctacctctgagtttaccagaaggccgaccacggaggccccccagagatggacctctcacaccactgccacgctgacccctcaggccccccgagaacggaccactaagaccatggcaatgctgaccactcaaggcccccaagaaatgacctctgagtccactatcaagagtatccctcaggcctccctggagccatctgctgagatcccagaagggtctccagagtcacccaaagacccggccccctctcccagtgttagcaccactggggaatcaggcctgttccgggttcgtctggccgatgggcccaaccgctgtgctggccggctggaagtgtggcatgccggacgctggggaacagtgtgtgatgacaactgggacctgcgggacgccactgtggcctgctgggaactgggctgtggaaaggtccggcctcgagtaggcaaaacccattacggccctgggactgggcccatctggctggatgacatgggctgtaagggaagcgaggcctcactgagcgactgcccctcgggggcttgggggaagcacaactgtgaccacgaggaagacgtggggctcacctgcactggctacacagactatgacgattatcccccctggacctgggaccccacctcaagagaggacctggccaaggggactaccacagcgggggtacctggacacactctcccctggaggaccacccggcgcccgggtagctcctccccagcaataaggcgcctgccggacacaggcagcaaagatggttacaagcttccctggacgtgggacacaccatcaggaaggggcctggctgaggggacccctaccgcaggcaaactaggaccaactcttggggctggcaccaccaggagcccaggcagtcctccaactccgagagtccatggagacacaggttccccgaagaaaaaccgtggccccgagcgccggccaccgcggcccgctgcga

SEQ ID NO: 61625 - DNA, 511 bp, Homo sapiens
aagctgctatatataactggtatcaatatgtttcaaggtgctacaggttgaatatcccttatccaaaatgttgggaccagaaatgttttggatttcagatttttttgggattttggaatatgtgcattagacttacaggttgagcgtctctaatccaaaacccaaaatgctctgatgagcatgtcttttgagcatcatattgatgttcaaaatctttcagattttggagtacttcagatttttgattttgggattaggaccacaatcttggctcttaattattccatatgatttttagttactttcttgtatttttacaagaatttctagaagtatcctcaggtgtcctttaccttcatgattcatggggaatgtaagttctatagagatactagcggccttttgtgagggactgtttgtgactttattctaagtcattttagagtatagttatgttggttgaaattttagaatatagttaatgttggttgaactccatcaaaacaaaaaa

SEQ ID NO: 61626 - DNA, 488 bp, Homo sapiens
ctcaaaaaaagaagttgagaactaccagtataaattaagaggagaagagggcatgggaccaaacactgaagcatataaatatttaagaaataatcttaaaagagtgaccaaataggtgaaaggaaatctagaatcatgtagtcaaggggtgacaatgttcaagaatatgggtattggcagttatgtcaaatatttccagaagctcaaaataaaaggaaaatgaacttaccttcaggtggttattgtgaccttgtcaagagcaatttaaaatgaactggttggaacagaaatcttcatgctgaggggtaaatgagaggtgagagagaagaccatcaaactttaaaataagaaaatccattttttaagctaatttcaaggttaataaccataatttattctgtgtttttcaaaataggttaattaactttcaccctttcttgtacccattctcctttcatttaccttggaaaccctgtttttttcttctt

SEQ ID NO: 61627 - DNA, 1938 bp, Homo sapiens
  misc_feature (1263)..(1263): n is a, c, g, or t
gaacgcggaaggggctggggttgcggcgcggcggcgaggaccagaccgggggcggggccggtagtgggagtgcggggcgcgcggtgacagcgcggggttggcggcgtgggacccagggggcgacagaggcagcagcagcccgaggcctgaggagaggagaccggcggcggcggcaatgctggagacccttcgcgagcggctgctgagcgtgcagcaggatttcacctccgggctgaagactttaagtgacaagtcaagagaagcaaaagtgaaaagcaaacccaggactgttccatttttgccaaagtactctgctggattagaattacttagcaggtatgaggatacatgggctgcacttcacagaagagccaaagactgtgcaagtgctggagagctggtggatagcgaggtggtcatgctttctgcgcactgggagaagaaaaagacaagcctcgtggagctgcaagagcagctccagcagctcccagctttaatcgcagacttagaatccatgacagcaaatctgactcatttagaggcgagttttgaggaggtagagaacaacctgctgcatctggaagacttatgtgggcagtgtgaattagaaagatgcaaacatatgcagtcccagcaactggagaattacaagaaaaataagaggaaggaacttgaaaccttcaaagctgaactagatgcagagcacgcccagaaggtcctggaaatggagcacacccagcaaatgaagctgaaggagcggcagaagttttttgaggaagccttccagcaggacatggagcagtacctgtccactggctacctgcagattgcagagcggcgagagcccataggcagcatgtcatccatggaagtgaacgtggacatgctggagcagatggacctgatggacatatcggaccaggaggccctggacgtcttcctgaactctggaggagaagagaacactgtgctgtcccccgccttaggtagggttgacaaacttgcattagctgaaccagggcagtatcgatgccactcccctccaaaggtgagacgtgagaaccatctgccagtcacttacgcataaacccccaagctcacagccagctcctggctccctaaccccacggttccacacggctgtgtggcagctgcaacagtggtgtggttccgtcatgaattcttctcaaagatttgacatgctccactccggtaactttggtgagttgagagctttcttgtttgttttccctcctttaccanccagaaatccatttgagtctgctccttgtggttaaggactggcgtttgcagggaggtgcggactctcctgcggggctcacgggaaactcttccctcttcgtgcgacaggcatttaggggcgtgcctgccatgggcaaagccatggtgtgtgttcagctcttggcctgtgttgtaaacttagttgcacttcagttcctttcatcccttcacaaaattttgtttcacattcatgcagcaaatatgggctgaggtgccagacctgtacctgggcttggtgcgtttcaaatttcagaccagttctttgggctgggtcaaggcaaagctcagtcgtcccagcagcacctcagccatctgtagaaggttctaccattaccacggtttcagcttcctctaaacttctcacccgcttctcctggcaatctgtcagaacggtgtcatcctggggaagagaaggagcttgggtgcatttgccctcatcctgagaaggccagaatactggagaccagcgtgaaccctcacccagagtcaggggaagatttagaaacagtgacacctgcatatagaattttgattccttgaagagcctatttagttccataaaattggagaactgctgaaggtcagtaattccgactttctcagcagtggtgtctctgaattactgcaaagggtaaa

SEQ ID NO: 61628 - DNA, 722 bp, Homo sapiens
tttgcttttatagaggcagtagattccaatgtatatctgcttaagccatcagcaaaaaactaataggcttactacaatttctttggaaaaacctgcttctggcttcagcctcacttcctttgttctacatcccagaagatgcacgtgagggcagctgcctggtaactggaggcttcacttgaccagcactgagcttctgttcactcattcaggtctcacatccatgtcatctccaggactcaccgaaaatagtcagagggatccctgtaggtggaactttattttctgtttttcctttgctgctttcctttgaaatgtttatttccatgcctggatacattgctgtatttgcatggtatgcagatgatatattattaaaaagcagaaattaaatttcaacttgacttgaacctacaagtagtacatttttatgagagcattattagttctttctattaccaacaagtaataattactaaattaatacctaaaataagtttaaaatgttgcatggaaatgtaggacttttttttttttttacaatatgtgtcttttcatgcatcaggtgaaattaatcaaactgacattttttatgaagcaatatttgtattaaaagataaatataaaataccaggaaaataatactagctatttgaataatgaggctggtacagctccataaaactaattcggcatcccttgctgctagtatgttcattttc

SEQ ID NO: 61629 - DNA, 1414 bp, Homo sapiens
gaacgcggaaggggctggggttgcggcgcggcggcgaggaccagaccgggggcggggccggtagtgggagtgcggggcgcgcggtgacagcgcggggttggcggcgtgggacccagggggcgacagaggcagcagcagcccgaggcctgaggagaggagaccggcggcggcggcaatgctggagacccttcgcgagcggctgctgagcgtgcagcaggatttcacctccgggctgaagactttaagtgacaagtcaagagaagcaaaagtgaaaagcaaacccaggactgttccatttttgccaaagtactctgctggattagaattacttagcaggtatgaggatacatgggctgcacttcacagaagagccaaagactgtgcaagtgctggagagctggtggatagcgaggtggtcatgctttctgcgcactgggagaagaaaaagacaagcctcgtggagctgcaagagcagctccagcagctcccagctttaatcgcagacttagaatccatgacagcaaatctgactcatttagaggcgagttttgaggaggtagagaacaacctgctgcatctggaagacttatgtgggcagtgtgaattagaaagatgcaaacatatgcagtcccagcaactggagaattacaagaaaaataagaggaaggaacttgaaaccttcaaagctgaactagatgcagagcacgcccagaaggtcctggaaatggagcacacccagcaaatgaagctgaaggagcggcagaagttttttgaggaagccttccagcaggacatggagcagtacctgtccactggctacctgcagattgcagagcggcgagagcccataggcagcatgtcatccatggaagtgaacgtggacatgctggagcagatggacctgatggacatatcggaccaggaggccctggacgtcttcctgaactctggaggagaagagaacactgtgctgtcccccgccttagggcctgaatccagtacctgtcagaatgagattaccctccaggttccaaatccctcagaattaagagccaagccaccttcttcttcctccacctgcaccgactcggccacccgggacatcagtgagggtggggagtcccccgttgttcagtccgatgaggaggaagttcaggtggacactgccctggccacatcacacactgacagagaggccactccggatggtggtgaggacagcgactcttaaattgggacatgggcgttgtctggccacactggaatccagttttggctgtatgcggaattccacctggaaagccaggttgttttatagaggttcttgatttttacataattgccaataatgtgtgagaaacttaaagaacagctaacaataaagtgtgaggacggtaaaaaaaaaaagcacaga

SEQ ID NO: 61630 - DNA, 1437 bp, Homo sapiens
gaacgcggaaggggctggggttgcggcgcggcggcgaggaccagaccgggggcggggccggtagtgggagtgcggggcgcgcggtgacagcgcggggttggcggcgtgggacccagggggcgacagaggcagcagcagcccgaggcctgaggagaggagaccggcggcggcggcaatgctggagacccttcgcgagcggctgctgagcgtgcagcaggatttcacctccgggctgaagactttaagtgacaagtcaagagaagcaaaagtgaaaagcaaacccaggactgttccatttttgccaaagtactctgctggattagaattacttagcaggtatgaggatacatgggctgcacttcacagaagagccaaagactgtgcaagtgctggagagctggtggatagcgaggtggtcatgctttctgcgcactgggagaagaaaaagacaagcctcgtggagctgcaagagcagctccagcagctcccagctttaatcgcagacttagaatccatgacagcaaatctgactcatttagaggcgagttttgaggaggtagagaacaacctgctgcatctggaagacttatgtgggcagtgtgaattagaaagatgcaaacatatgcagtcccagcaactggagaattacaagaaaaataagaggaaggaacttgaaaccttcaaagctgaactagatgcagagcacgcccagaaggtcctggaaatggagcacacccagcaaatgaagctgaaggagcggcagaagttttttgaggaagccttccagcaggacatggagcagtacctgtccactggctacctgcagattgcagagcggcgagagcccataggcagcatgtcatccatggaagtgaacgtggacatgctggagcagatggacctgatggacatatcggaccaggaggccctggacgtcttcctgaactctggaggagaagagaacactgtgctgtcccccgccttagggcctgaatccagtacctgtcagaatgagattaccctccaggttccaaatccctcagaattaagagccaagccaccttcttcttcctccacctgcaccgactcggccacccgggacatcagtgagggtggggagtcccccgttgttcagtccgatgaggaggaagttcaggtggacactgccctggccacatcacacactgacagagaggccactccggatggtggtgaggacagcgactcttaaattgggacatgggcgttgtctggccacactggaatccagttttggctgtatgcggaattccacctggaaagccaggttgttttatagaggttcttgatttttacataattgccaataatgtgtgagaaacttaaagaacagctaacaataaagtcgggatgcggccagttttttgtttttgggaaaactataaaccgctcgcccca

SEQ ID NO: 61631 - DNA, 1363 bp, Homo sapiens
gaacgcggaaggggctggggttgcggcgcggcggcgaggaccagaccgggggcggggccggtagtgggagtgcggggcgcgcggtgacagcgcggggttggcggcgtgggacccagggggcgacagaggcagcagcagcccgaggcctgaggagaggagaccggcggcggcggcaatgctggagacccttcgcgagcggctgctgagcgtgcagcaggatttcacctccgggctgaagactttaagtgacaagtcaagagaagcaaaagtgaaaagcaaacccaggtatgaggatacatgggctgcacttcacagaagagccaaagactgtgcaagtgctggagagctggtggatagcgaggtggtcatgctttctgcgcactgggagaagaaaaagacaagcctcgtggagctgcaagagcagctccagcagctcccagctttaatcgcagacttagaatccatgacagcaaatctgactcatttagaggcgagttttgaggaggtagagaacaacctgctgcatctggaagacttatgtgggcagtgtgaattagaaagatgcaaacatatgcagtcccagcaactggagaattacaagaaaaataagaggaaggaacttgaaaccttcaaagctgaactagatgcagagcacgcccagaaggtcctggaaatggagcacacccagcaaatgaagctgaaggagcggcagaagttttttgaggaagccttccagcaggacatggagcagtacctgtccactggctacctgcagattgcagagcggcgagagcccataggcagcatgtcatccatggaagtgaacgtggacatgctggagcagatggacctgatggacatatcggaccaggaggccctggacgtcttcctgaactctggaggagaagagaacactgtgctgtcccccgccttagggcctgaatccagtacctgtcagaatgagattaccctccaggttccaaatccctcagaattaagagccaagccaccttcttcttcctccacctgcaccgactcggccacccgggacatcagtgagggtggggagtcccccgttgttcagtccgatgaggaggaagttcaggtggacactgccctggccacatcacacactgacagagaggccactccggatggtggtgaggacagcgactcttaaattgggacatgggcgttgtctggccacactggaatccagttttggctgtatgcggaattccacctggaaagccaggttgttttatagaggttcttgatttttacataattgccaataatgtgtgagaaacttaaagaacagctaacaataaagtgtgaggacggtaaaaaaaaaaagcacaga

SEQ ID NO: 61632 - DNA, 860 bp, Homo sapiens
agatagagtcctttctctccatgtgtagggttggcgtctctcacatgaggatcttgtgtcctgcttcaggagaaaatgagaagatccttcctaggttttatgcctgcctcaggggagaagggcaaggggaagctgaactagatgcagagcacgcccagaaggtcctggaaatggagcacacccagcaaatgaagctgaaggagcggcagaagttttttgaggaagccttccagcaggacatggagcagtacctgtccactggctacctgcagattgcagagcggcgagagcccataggcagcatgtcatccatggaagtgaacgtggacatgctggagcagatggacctgatggacatatcggaccaggaggccctggacgtcttcctgaactctggaggagaagagaacactgtgctgtcccccgccttagggcctgaatccagtacctgtcagaatgagattaccctccaggttccaaatccctcagaattaagagccaagccaccttcttcttcctccacctgcaccgactcggccacccgggacatcagtgagggtggggagtcccccgttgttcagtccgatgaggaggaagttcaggtggacactgccctggccacatcacacactgacagagaggccactccggatggtggtgaggacagcgactcttaaattgggacatgggcgttgtctggccacactggaatccagttttggctgtatgcggaattccacctggaaagccaggttgttttatagaggttcttgatttttacataattgccaataatgtgtgagaaacttaaagaacagctaacaataaagtgtgaggacggtaaaaaaaaaaagcacaga

SEQ ID NO: 61633 - DNA, 1530 bp, Homo sapiens
gaacgcggaaggggctggggttgcggcgcggcggcgaggaccagaccgggggcggggccggtagtgggagtgcggggcgcgcggtgacagcgcggggttggcggcgtgggacccagggggcgacagaggcagcagcagcccgaggcctgaggagaggagaccggcggcggcggcaatgctggagacccttcgcgagcggctgctgagcgtgcagcaggatttcacctccgggtcactttcagctgacaaaccactggactgtcagtgtgtgccattagcctgtcacctggtggagaaacaactcatctccaagtgatgtcagtctcccagtagacccggacctctagtgcctgatgttcactttcttcaggctgaagactttaagtgacaagtcaagagaagcaaaagtgaaaagcaaacccaggactgttccatttttgccaaagtactctgctggattagaattacttagcaggtatgaggatacatgggctgcacttcacagaagagccaaagactgtgcaagtgctggagagctggtggatagcgaggtggtcatgctttctgcgcactgggagaagaaaaagacaagcctcgtggagctgcaagagcagctccagcagctcccagctttaatcgcagacttagaatccatgacagcaaatctgactcatttagaggcgagttttgaggaggtagagaacaacctgctgcatctggaagacttatgtgggcagtgtgaattagaaagatgcaaacatatgcagtcccagcaactggagaattacaagaaaaataagagctgaactagatgcagagcacgcccagaaggtcctggaaatggagcacacccagcaaatgaagctgaaggagcggcagaagttttttgaggaagccttccagcaggacatggagcagtacctgtccactggctacctgcagattgcagagcggcgagagcccataggcagcatgtcatccatggaagtgaacgtggacatgctggagcagatggacctgatggacatatcggaccaggaggccctggacgtcttcctgaactctggaggagaagagaacactgtgctgtcccccgccttagggcctgaatccagtacctgtcagaatgagattaccctccaggttccaaatccctcagaattaagagccaagccaccttcttcttcctccacctgcaccgactcggccacccgggacatcagtgagggtggggagtcccccgttgttcagtccgatgaggaggaagttcaggtggacactgccctggccacatcacacactgacagagaggccactccggatggtggtgaggacagcgactcttaaattgggacatgggcgttgtctggccacactggaatccagttttggctgtatgcggaattccacctggaaagccaggttgttttatagaggttcttgatttttacataattgccaataatgtgtgagaaacttaaagaacagctaacaataaagtgtgaggacggtaaaaaaaaaaagcacaga

SEQ ID NO: 61634 - DNA, 1219 bp, Homo sapiens
gaacgcggaaggggctggggttgcggcgcggcggcgaggaccagaccgggggcggggccggtagtgggagtgcggggcgcgcggtgacagcgcggggttggcggcgtgggacccagggggcgacagaggcagcagcagcccgaggcctgaggagaggagaccggcggcggcggcaatgctggagacccttcgcgagcggctgctgagcgtgcagcaggatttcacctccgggctgaagactttaagtgacaagtcaagagaagcaaaagtgaaaagcaaacccaggactgttccatttttgccaaagtactctgctggattagaattacttagcaggtatgaggatacatgggctgcacttcacagaagagccaaagactgtgcaagtgctggagagctggtggatagcgaggtggtcatgctttctgcgcactgggagaagaaaaagacaagcctcgtggagctgcaagagcagctccagcagctcccagctttaatcgcagacttagaatccatgacagcaaatctgactcatttagaggcgagttttgaggaggtagagaacaacctgctgcatctggaagacttatgtgggcagtgtgaattagaaagatgcaaacatatgcagtcccagcaactggagaattacaagaaaaataagaggaaggaacttgaaaccttcaaagctgaactagatgcagagcacgcccagaaggtcctggaaatggagcacacccagcaaatgaagctgaaggagcggcagaagttttttgaggaagccttccagcaggacatggagcagtacctgtccactggctacctgcagattgcagagcggcgagagcccataggcagcatgtcatccatggaagtgaacgtggacatgctggagcagatggacctgatggacatatcggaccaggaggccctggacgtcttcctgaactctggaggagaagagaacactgtgctgtcccccgccttagacactgacagagaggccactccggatggtggtgaggacagcgactcttaaattgggacatgggcgttgtctggccacactggaatccagttttggctgtatgcggaattccacctggaaagccaggttgttttatagaggttcttgatttttacataattgccaataatgtgtgagaaacttaaagaacagctaacaataaagtgtgaggacggtaaaaaaaaaaagcacaga

SEQ ID NO: 61635 - DNA, 1242 bp, Homo sapiens
gaacgcggaaggggctggggttgcggcgcggcggcgaggaccagaccgggggcggggccggtagtgggagtgcggggcgcgcggtgacagcgcggggttggcggcgtgggacccagggggcgacagaggcagcagcagcccgaggcctgaggagaggagaccggcggcggcggcaatgctggagacccttcgcgagcggctgctgagcgtgcagcaggatttcacctccgggtcactttcagctgacaaaccactggactgtcagtgtgtgccattagcctgtcacctggtggagaaacaactcatctccaagtgatgtcagtctcccagtagacccggacctctagtgcctgatgttcactttcttcaggctgaagactttaagtgacaagtcaagagaagcaaaagtgaaaagcaaacccaggactgttccatttttgccaaagtactctgctggattagaattacttagcaggtatgaggatacatgggctgcacttcacagaagagccaaagactgtgcaagtgctggagagctggtggatagcgaggtggtcatgctttctgcgcactgggagaagaaaaagacaagcctcgtggagctgcaagagcagctccagcagctcccagctttaatcgcagacttagaatccatgacagcaaatctgactcatttagaggcgagttttgaggaggtagagaacaacctgctgcatctggaagacttatgtgggcagtgtgaattagaaagatgcaaacatatgcagtcccagcaactggagaattacaagaaaaataagagctgaactagatgcagagcacgcccagaaggtcctggaaatggagcacacccagcaaatgaagctgaaggagcggcagaagttttttgaggaagccttccagcaggacatggagcagtacctgtccactggctacctgcagattgcagagcggcgagagcccataggcagcatgtcatccatggaagtgaacgtggacatgctggagcagatggacctgatggacatatcggatggtggtgaggacagcgactcttaaattgggacatgggcgttgtctggccacactggaatccagttttggctgtatgcggaattccacctggaaagccaggttgttttatagaggttcttgatttttacataattgccaataatgtgtgagaaacttaaagaacagctaacaataaagtgtgaggacggtaaaaaaaaaaagcacaga

SEQ ID NO: 61636 - DNA, 994 bp, Homo sapiens
tttgcttttatagaggcagtagattccaatgtatatctgcttaagccatcagcaaaaaactaataggcttactacaatttctttggaaaaacctgcttctggcttcagcctcacttcctttgttctacatcccagaagatgcacgtgagggcagctgcctggtaactggaggcttcacttgaccagcactgagcttctgttcactcattcaggtctcacatccatgtcatctccaggactcaccgaaaatagtcagagggatccctctgaactagatgcagagcacgcccagaaggtcctggaaatggagcacacccagcaaatgaagctgaaggagcggcagaagttttttgaggaagccttccagcaggacatggagcagtacctgtccactggctacctgcagattgcagagcggcgagagcccataggcagcatgtcatccatggaagtgaacgtggacatgctggagcagatggacctgatggacatatcggaccaggaggccctggacgtcttcctgaactctggaggagaagagaacactgtgctgtcccccgccttagggcctgaatccagtacctgtcagaatgagattaccctccaggttccaaatccctcagaattaagagccaagccaccttcttcttcctccacctgcaccgactcggccacccgggacatcagtgagggtggggagtcccccgttgttcagtccgatgaggaggaagttcaggtggacactgccctggccacatcacacactgacagagaggccactccggatggtggtgaggacagcgactcttaaattgggacatgggcgttgtctggccacactggaatccagttttggctgtatgcggaattccacctggaaagccaggttgttttatagaggttcttgatttttacataattgccaataatgtgtgagaaacttaaagaacagctaacaataaagtgtgaggacggtaaaaaaaaaaagcacaga

SEQ ID NO: 61637 - DNA, 1449 bp, Homo sapiens
  misc_feature (1403)..(1403): n is a, c, g, or t
gaacgcggaaggggctggggttgcggcgcggcggcgaggaccagaccgggggcggggccggtagtgggagtgcggggcgcgcggtgacagcgcggggttggcggcgtgggacccagggggcgacagaggcagcagcagcccgaggcctgaggagaggagaccggcggcggcggcaatgctggagacccttcgcgagcggctgctgagcgtgcagcaggatttcacctccgggctgaagactttaagtgacaagtcaagagaagcaaaagtgaaaagcaaacccaggactgttccatttttgccaaagtactctgctggattagaattacttagcaggtatgaggatacatgggctgcacttcacagaagagccaaagactgtgcaagtgctggagagctggtggatagcgaggtggtcatgctttctgcgcactgggagaagaaaaagacaagcctcgtggagctgcaagagcagctccagcagctcccagctttaatcgcagacttagaatccatgacagcaaatctgactcatttagaggcgagttttgaggaggtagagaacaacctgctgcatctggaagacttatgtgggcagtgtgaattagaaagatgcaaacatatgcagtcccagcaactggagaattacaagaaaaataagaggaaggaacttgaaaccttcaaagctgaactagatgcagagcacgcccagaaggtcctggaaatggagcacacccagcaaatgaagctgaaggagcggcagaagttttttgaggaagccttccagcaggacatggagcagtacctgtccactggctacctgcagattgcagagcggcgagagcccataggcagcatgtcatccatggaagtgaacgtggacatgctggagcagatggacctgatggacatatcggaccaggaggccctggacgtcttcctgaactctggaggagaagagaacactgtgctgtcccccgccttagggcctgaatccagtacctgtcagaatgagattaccctccaggttccaaatccctcagaattaagagccaagccaccttcttcttcctccacctgcaccgactcggccacccgggacatcagtgagggtggggagtcccccgttgttcagtccgatgaggaggaagttcaggtggacactgccctggccacatcacacactgacagagaggccactccggatggtggtgaggacagcgactcttaaattgggacatgggcgttgtctggccacactggaatccagttttggctgtatgcggaattccacctggaaagccaggttgttttatagaggttcttgatttttacataattgccaataatgtgtgagaaacttaaagaacagctaacaataaagtagatttcgcgccgaaacnttctccttcctttataatttcggtgcgaaaacgagggatgaaacaa

SEQ ID NO: 61638 - DNA, 1309 bp, Homo sapiens
gaacgcggaaggggctggggttgcggcgcggcggcgaggaccagaccgggggcggggccggtagtgggagtgcggggcgcgcggtgacagcgcggggttggcggcgtgggacccagggggcgacagaggcagcagcagcccgaggcctgaggagaggagaccggcggcggcggcaatgctggagacccttcgcgagcggctgctgagcgtgcagcaggatttcacctccgggtatgaggatacatgggctgcacttcacagaagagccaaagactgtgcaagtgctggagagctggtggatagcgaggtggtcatgctttctgcgcactgggagaagaaaaagacaagcctcgtggagctgcaagagcagctccagcagctcccagctttaatcgcagacttagaatccatgacagcaaatctgactcatttagaggcgagttttgaggaggtagagaacaacctgctgcatctggaagacttatgtgggcagtgtgaattagaaagatgcaaacatatgcagtcccagcaactggagaattacaagaaaaataagaggaaggaacttgaaaccttcaaagctgaactagatgcagagcacgcccagaaggtcctggaaatggagcacacccagcaaatgaagctgaaggagcggcagaagttttttgaggaagccttccagcaggacatggagcagtacctgtccactggctacctgcagattgcagagcggcgagagcccataggcagcatgtcatccatggaagtgaacgtggacatgctggagcagatggacctgatggacatatcggaccaggaggccctggacgtcttcctgaactctggaggagaagagaacactgtgctgtcccccgccttagggcctgaatccagtacctgtcagaatgagattaccctccaggttccaaatccctcagaattaagagccaagccaccttcttcttcctccacctgcaccgactcggccacccgggacatcagtgagggtggggagtcccccgttgttcagtccgatgaggaggaagttcaggtggacactgccctggccacatcacacactgacagagaggccactccggatggtggtgaggacagcgactcttaaattgggacatgggcgttgtctggccacactggaatccagttttggctgtatgcggaattccacctggaaagccaggttgttttatagaggttcttgatttttacataattgccaataatgtgtgagaaacttaaagaacagctaacaataaagtgtgaggacggtaaaaaaaaaaagcacaga

SEQ ID NO: 61639 - DNA, 1459 bp, Homo sapiens
gaacgcggaaggggctggggttgcggcgcggcggcgaggaccagaccgggggcggggccggtagtgggagtgcggggcgcgcggtgacagcgcggggttggcggcgtgggacccagggggcgacagaggcagcagcagcccgaggcctgaggagaggagaccggcggcggcggcaatgctggagacccttcgcgagcggctgctgagcgtgcagcaggatttcacctccgggctgaagactttaagtgacaagtcaagagaagcaaaagtgaaaagcaaacccagttggctaaatcaagaacagttttaataagtgtttcttttgggcaggactgttccatttttgccaaagtactctgctggattagaattacttagcaggtatgaggatacatgggctgcacttcacagaagagccaaagactgtgcaagtgctggagagctggtggatagcgaggtggtcatgctttctgcgcactgggagaagaaaaagacaagcctcgtggagctgcaagagcagctccagcagctcccagctttaatcgcagacttagaatccatgacagcaaatctgactcatttagaggcgagttttgaggaggtagagaacaacctgctgcatctggaagacttatgtgggcagtgtgaattagaaagatgcaaacatatgcagtcccagcaactggagaattacaagaaaaataagaggaaggaacttgaaaccttcaaagctgaactagatgcagagcacgcccagaaggtcctggaaatggagcacacccagcaaatgaagctgaaggagcggcagaagttttttgaggaagccttccagcaggacatggagcagtacctgtccactggctacctgcagattgcagagcggcgagagcccataggcagcatgtcatccatggaagtgaacgtggacatgctggagcagatggacctgatggacatatcggaccaggaggccctggacgtcttcctgaactctggaggagaagagaacactgtgctgtcccccgccttagggcctgaatccagtacctgtcagaatgagattaccctccaggttccaaatccctcagaattaagagccaagccaccttcttcttcctccacctgcaccgactcggccacccgggacatcagtgagggtggggagtcccccgttgttcagtccgatgaggaggaagttcaggtggacactgccctggccacatcacacactgacagagaggccactccggatggtggtgaggacagcgactcttaaattgggacatgggcgttgtctggccacactggaatccagttttggctgtatgcggaattccacctggaaagccaggttgttttatagaggttcttgatttttacataattgccaataatgtgtgagaaacttaaagaacagctaacaataaagtgtgaggacggtaaaaaaaaaaagcacaga

SEQ ID NO: 61640 - DNA, 1380 bp, Homo sapiens
gaacgcggaaggggctggggttgcggcgcggcggcgaggaccagaccgggggcggggccggtagtgggagtgcggggcgcgcggtgacagcgcggggttggcggcgtgggacccagggggcgacagaggcagcagcagcccgaggcctgaggagaggagaccggcggcggcggcaatgctggagacccttcgcgagcggctgctgagcgtgcagcaggatttcacctccgggctgaagactttaagtgacaagtcaagagaagcaaaagtgaaaagcaaacccaggactgttccatttttgccaaagtactctgctggattagaattacttagcaggtatgaggatacatgggctgcacttcacagaagagccaaagactgtgcaagtgctggagagctggtggatagcgaggtggtcatgctttctgcgcactgggagaagaaaaagacaagcctcgtggagctgcaagagcagctccagcagctcccagctttaatcgcagacttagaatccatgacagcaaatctgactcatttagaggcgagttttgaggaggtagagaacaacctgctgcatctggaagacttatgtgggcagtgtgaattagaaagatgcaaacatatgcagtcccagcaactggagaattacaagaaaaataagaggaaggaacttgaaaccttcaaagctgaactagatgcagagcacgcccagaaggtcctggaaatggagcacacccagcaaatgaagctgaaggagcggcagaagttttttgaggaagccttccagcaggacatggagcagtacctgtccactggctacctgcagattgcagagcggcgagagcccataggcagcatgtcatccatggaagtgaacgtggacatgctggagcagatggacctgatggacatatcggaccaggaggccctggacgtcttcctgaactctggaggagaagagaacactgtgctgtcccccgccttagcctccaggttccaaatccctcagaattaagagccaagccaccttcttcttcctccacctgcaccgactcggccacccgggacatcagtgagggtggggagtcccccgttgttcagtccgatgaggaggaagttcaggtggacactgccctggccacatcacacactgacagagaggccactccggatggtggtgaggacagcgactcttaaattgggacatgggcgttgtctggccacactggaatccagttttggctgtatgcggaattccacctggaaagccaggttgttttatagaggttcttgatttttacataattgccaataatgtgtgagaaacttaaagaacagctaacaataaagtgtgaggacggtaaaaaaaaaaagcacaga

SEQ ID NO: 61641 - DNA, 1126 bp, Homo sapiens
gaacgcggaaggggctggggttgcggcgcggcggcgaggaccagaccgggggcggggccggtagtgggagtgcggggcgcgcggtgacagcgcggggttggcggcgtgggacccagggggcgacagaggcagcagcagcccgaggcctgaggagaggagaccggcggcggcggcaatgctggagacccttcgcgagcggctgctgagcgtgcagcaggatttcacctccgggctgaagactttaagtgacaagtcaagagaagcaaaagtgaaaagcaaacccaggactgttccatttttgccaaagtactctgctggattagaattacttagcaggtatgaggatacatgggctgcacttcacagaagagccaaagactgtgcaagtgctggagagctggtggatagcgaggtggtcatgctttctgcgcactgggagaagaaaaagacaagcctcgtggagctgcaagagcagctccagcagctcccagctttaatcgcagacttagaatccatgacagcaaatctgactcatttagaggcgagttttgaggaggtagagaacaacctgctgcatctggaagacttatgtgggcagtgtgaattagaaagatgcaaacatatgcagtcccagcaactggagaattacaagaaaaataagaggaaggaacttgaaaccttcaaagctgaactagatgcagagcacgcccagaaggtcctggaaatggagcacacccagcaaatgaagctgaaggagcggcagaagttttttgaggaagccttccagcaggacatggagcagtacctgtccactggctacctgcagattgcagagcggcgagagcccataggcagcatgtcatccatggaagtgaacgtggacatgctggagcagatggacctgatggacatatcggatggtggtgaggacagcgactcttaaattgggacatgggcgttgtctggccacactggaatccagttttggctgtatgcggaattccacctggaaagccaggttgttttatagaggttcttgatttttacataattgccaataatgtgtgagaaacttaaagaacagctaacaataaagtgtgaggacggtaaaaaaaaaaagcacaga

SEQ ID NO: 61642 - DNA, 619 bp, Homo sapiens
gaccggagggaagactggaagttaagcagccatcatgctccactgaggaagtgagggtgactggagccaagagatgtggagggagaaactggttccaggaaacaccctctattccctgtcgcttcatgctgcgagttacaggggttattcaaaagcacactggagaaagcaggaagagcgccacctacagcttgggtaggctccatttcgaggatggaatcaatccactgtggctccgaggcctgcctcctgcttgcgacagttaaatgccttcggtttttgagttatttaaagaacataccattttatgggcaggaggaagcactttaatctgcaaaatgatttttatcacaaactaaacatccttgtaactttttggtcctctgctttggtcaaagttgtctctccttggagctcagacagctgttggagctcagaagatctgcctccaccctgcactttgccctgctcgctggtactctggtgctctccaattcctggatccatgtgggatgtaagaactcaggatcaggacgcctgcacgcatcaaaatggggcattttctttctctttatcccaggacttgagagaaagcaaaaaacaaacaaacacaaacaaa

SEQ ID NO: 61643 - DNA, 213 bp, Homo sapiens
agccaaactcacaggagcctaggcacagagcgctgaacactggctctggcagcgggaaggaattagagcgcttctgcttttgcacctgctttgcagttaggaagcaagctctcttccttgccagacttccctttggggcaggacacttttcttatattcttgaggcaaggcaaacagtcataggacagttattaaacaattataaaatgtgtt

SEQ ID NO: 61644 - DNA, 238 bp, Homo sapiens
atctcacagattctttttcacagattcattcatgttgagtgaaagaagccagatgcaagagtccacaccacatgattctgtttctatacaacttaatttgaaaactaagcaatacttacagaagtgagaatagtagttgtctcagggtaggtgagtgcatgaaggaatcttatacgtttgctaaaaatgttttatatcttgatttgggctatggctgcagggaaggatacattgcaaa

SEQ ID NO: 61645 - DNA, 1340 bp, Homo sapiens
cccggagccggaccggggccaccgcgcccgctctgctccgacaccgcgccccctggacagccgccctctcctccaggcccgtggggctggccctgcaccgccgagcttcccgggatgagggcccccggtgtggtcacccggcgcgccccaggtcgctgagggaccccggccaggcgcggagatgggggtgcacgaatgtcctgcctggctgtggcttctcctgtccctgctgtcgctccctctgggcctcccagtcctgggcgccccaccacgcctcatctgtgacagccgagtcctggagaggtacctcttggaggccaaggaggccgagaatatcacgacgggctgtgctgaacactgcagcttgaatgagaatatcactgtcccagacaccaaagttaatttctatgcctggaagaggatggaggtcgggcagcaggccgtagaagtctggcagggcctggccctgctgtcggaagctgtcctgcggggccaggccctgttggtcaactcttcccagccgtgggagcccctgcagctgcatgtggataaagccgtcagtggccttcgcagcctcaccactctgcttcgggctctgcgagcccagaaggaagccatctcccctccagatgcggcctcagctgctccactccgaacaatcactgctgacactttccgcaaactcttccgagtctactccaatttcctccggggaaagctgaagctgtacacaggggaggcctgcaggacaggggacagatgaccaggtgtgtccacctgggcatatccaccacctccctcaccaacattgcttgtgccacaccctcccccgccactcctgaaccccgtcgaggggctctcagctcagcgccagcctgtcccatggacactccagtgccagcaatgacatctcaggggccagaggaactgtccagagagcaactctgagatctaaggatgtcacagggccaacttgagggcccagagcaggaagcattcagagagcagctttaaactcagggacagagccatgctgggaagacgcctgagctcactcggcaccctgcaaaatttgatgccaggacacgctttggaggcgatttacctgttttcgcacctaccatcagggacaggatgacctggagaacttaggtggcaagctgtgacttctccaggtctcacgggcatgggcactcccttggtggcaagagcccccttgacaccggggtggtgggaaccatgaagacaggatgggggctggcctctggctctcatggggtccaagttttgtgtattcttcaacctcattgacaagaactgaaaccaccaaaaaaaaaaat

SEQ ID NO: 61646 - DNA, 3232 bp, Homo sapiens
ccggtccggaattcccgggcgaggcggcagctgcgcggcggcaccggggcggctgcggcgcgctcggagccccgagggcacgcggcccgggcagctcggtgtgcgcccccgcgagagccggggccccaggcccgccggacaccatgaaccacctgaacgtgctggccaaagcgctctatgacaatgtggccgagtccccggatgagctctccttccgcaagggtgacatcatgacggtgctggagcaggacacgcagggcctggacggctggtggctctgctcgctgcatgggcgccagggcatcgtgcctgggaaccgcctcaagatcttggtgggcatgtatgataagaagccagcagggcctggctccggccctcccgccaccccggcccagcctcagcctggcctccatgccccagcgcctccggcctcccagtacacgcccatgctccccaacacctaccagccccagccagacagcgtctacctggtgcccactcccagcaaggctcagcaaggcctctaccaagtcccgggtcccagccctcagttccagtctcccccagccaagcagacatccaccttctcgaagcagacaccccatcacccgtttcccagcccggccacagacctgtaccaggtgcccccagggcctggaggccctgcccaggatatttaccaggtgccaccttctgccgggatggggcatgacatctaccaggtccccccgtccatggacacacgcagctgggagggcacgaagcccccggcaaaggtggtggtgcccacccgcgtggggcagggctatgtatacgaggccgcccagccggagcaggacgagtacgacatcccgcgacacctgctggccccggggccacaggacatctatgatgtgcccccggttcgggggctgcttcccagccagtatggccaggaggtgtatgacacaccccccatggctgtcaagggtcccaatggccgagacccgttgctggaggtgtatgacgtgccccccagtgtggagaagggcctgccaccgtccaaccaccacgcagtctacgacgttcctccatcggtgagcaaggatgtgcccgatggcccactgctgcgtgaggagacctacgatgtgccccccgccttcgccaaggccaagccctttgacccggcccgcaccccactggtactggctgcgccccctccagactccccgccggccgaggacgtgtatgacgtgccgcccccggctcctgacctctacgacgtgccccctggcttgcggcggcctggcccgggcaccctgtacgatgtgccccgtgaacgggtgcttcctcctgaggtggctgatggtggcgtggtcgacagtggtgtgtatgcggtgcctcccccagctgaacgtgaagccccggcagagggcaagcgcctgtcggcctccagcaccggcagcacacgcagcagccagtctgcgtcctccttggaggtggcagggccgggccgggaacccctggagctggaagttgctgtggaggccctggcacggctgcagcagggtgtgagcgccaccgttgcccaccttctggacctggcaggcagcgccggtgcgactgggagctggcgtagcccctctgagccacaggagccgctggtgcaggacctgcaggctgctgtggccgccgtccagagtgccgtccacgagctgttggagtttgcccgcagcgcggtgggcaatgctgcccacacatctgaccgtgccctgcatgccaagcttagccggcagctgcagaagatggaggacgtgcaccagacgctggtggcacatggtcaggccctcgacgctggccggggaggctctggagccacccttgaggacctggaccggctggtggcctgctcgcgggctgtgcccgaggacgccaagcagctggcctccttcctgcacggcaatgcctcactgctcttcagacggaccaaggccactgccccggggcctgaggggggtggcaccctgcaccccaaccccactgacaagaccagcagcatccagtcacgacccctgccctcaccccctaagttcacctcccaggactcgccagatgggcagtacgagaacagcgaggggggctggatggaggactatgactacgtccacctacaggggaaggaggagtttgagaagacccagaaggagctgctggaaaagggcagcatcacgcggcagggcaagagccagctggagttgcagcagctgaagcagtttgaacgactggaacaggaggtgtcacggcccatagaccacgacctggccaactggacgccagcccaacccctggccccggggcgaacaggcggcctggggccctcggaccggcagctgctgctcttctacctggagcagtgtgaggccaacctgaccacactgaccaacgccgtggacgccttctttaccgccgtggccaccaaccagccgcccaagatctttgtggcgcacagcaagttcgtcatcctcagcgcccacaagctggtgttcatcggggacacactgtcacggcaggccaaggctgctgacgtgcgcagccaggtgacccactacagcaacctgctgtgcgacctcctgcgcggcatcgtggccaccaccaaggccgctgccttgcagtacccatcgccttccgcggcccaggacatggtggagagggtcaaggagctgggccacagcacccagcagttccgccgcgtcctaggccagctggcagccgcctgagggtggtgaccccaggagggaggcaggggaggggtgcggcggtcccagctccctggctcccatgtcaagagtcgctgtgccacaggcttagggacaggaccccagctctgcgtcggtcctggtgccctggatgcccaggaatctgtatatatttatggccgggcagggtgtggggccatgcctcctcaggagccgaagcccaggggccggccagtggccttccccagcatgcaccacgggcccgggttgggtcaccagacggggctggagtgtgagggtcctgcagcctgcaggacctcgtgccaccccgagggctgagcctggtcccacgagggtgccgtgtcccctgacagggccagtgcagtttggtgtgtcctccgccttaccaggagaagaacctgaagaactatttttcgttattggttttccaatcatttgactaagagtctccatttaaataaagtttttaaaaggaa

SEQ ID NO: 61647 - DNA, 316 bp, Homo sapiens
ggaagccaccttctctgtgtgtccccgcatgtgccagcctgggggggctgtgtcccacatatgccagcatgcaccacgggcccgggttgggtcaccagacggggctggagtgtgagggtcctgcagcctgcaggacctcgtgccaccccgagggctgagcctggtcccacgagggtgccgtgtcccctgacagggccagtgcagtttggtgtgtcctccgccttaccaggagaagaacctgaagaactatttttcgttattggttttccaatcatttgactaagagtctccatttaaataaagtttttaaaaggaa

SEQ ID NO: 61648 - DNA, 3260 bp, Homo sapiens
atgcgcggcgcggctggagcggccggacagtccggcgtccgggaacgctcaggagccggaggagccggaaagcgccgggacccctcgcggggcctctgagcggcgcgggcggacccgagcccccagcccgctggcgccgctgcccgccaggccccgggggcggcggccaagatgtccgtgcctaacgtgctggccaaagcgctctatgacaatgtggccgagtccccggatgagctctccttccgcaagggtgacatcatgacggtgctggagcaggacacgcagggcctggacggctggtggctctgctcgctgcatgggcgccagggcatcgtgcctgggaaccgcctcaagatcttggtgggcatgtatgataagaagccagcagggcctggctccggccctcccgccaccccggcccagcctcagcctggcctccatgccccagcgcctccggcctcccagtacacgcccatgctccccaacacctaccagccccagccagacagcgtctacctggtgcccactcccagcaaggctcagcaaggcctctaccaagtcccgggtcccagccctcagttccagtctcccccagccaagcagacatccaccttctcgaagcagacaccccatcacccgtttcccagcccggccacagacctgtaccaggtgcccccagggcctggaggccctgcccaggatatttaccaggtgccaccttctgccgggatggggcatgacatctaccaggtccccccgtccatggacacacgcagctgggagggcacgaagcccccggcaaaggtggtggtgcccacccgcgtggggcagggctatgtatacgaggccgcccagccggagcaggacgagtacgacatcccgcgacacctgctggccccggggccacaggacatctatgatgtgcccccggttcgggggctgcttcccagccagtatggccaggaggtgtatgacacaccccccatggctgtcaagggtcccaatggccgagacccgttgctggaggtgtatgacgtgccccccagtgtggagaagggcctgccaccgtccaaccaccacgcagtctacgacgttcctccatcggtgagcaaggatgtgcccgatggcccactgctgcgtgaggagacctacgatgtgccccccgccttcgccaaggccaagccctttgacccggcccgcaccccactggtactggctgcgccccctccagactccccgccggccgaggacgtgtatgacgtgccgcccccggctcctgacctctacgacgtgccccctggcttgcggcggcctggcccgggcaccctgtacgatgtgccccgtgaacgggtgcttcctcctgaggtggctgatggtggcgtggtcgacagtggtgtgtatgcggtgcctcccccagctgaacgtgaagccccggcagagggcaagcgcctgtcggcctccagcaccggcagcacacgcagcagccagtctgcgtcctccttggaggtggcagggccgggccgggaacccctggagctggaagttgctgtggaggccctggcacggctgcagcagggtgtgagcgccaccgttgcccaccttctggacctggcaggcagcgccggtgcgactgggagctggcgtagcccctctgagccacaggagccgctggtgcaggacctgcaggctgctgtggccgccgtccagagtgccgtccacgagctgttggagtttgcccgcagcgcggtgggcaatgctgcccacacatctgaccgtgccctgcatgccaagcttagccggcagctgcagaagatggaggacgtgcaccagacgctggtggcacatggtcaggccctcgacgctggccggggaggctctggagccacccttgaggacctggaccggctggtggcctgctcgcgggctgtgcccgaggacgccaagcagctggcctccttcctgcacggcaatgcctcactgctcttcagacggaccaaggccactgccccggggcctgaggggggtggcaccctgcaccccaaccccactgacaagaccagcagcatccagtcacgacccctgccctcaccccctaagttcacctcccaggactcgccagatgggcagtacgagaacagcgaggggggctggatggaggactatgactacgtccacctacaggggaaggaggagtttgagaagacccagaaggagctgctggaaaagggcagcatcacgcggcagggcaagagccagctggagttgcagcagctgaagcagtttgaacgactggaacaggaggtgtcacggcccatagaccacgacctggccaactggacgccagcccaacccctggccccggggcgaacaggcggcctggggccctcggaccggcagctgctgctcttctacctggagcagtgtgaggccaacctgaccacactgaccaacgccgtggacgccttctttaccgccgtggccaccaaccagccgcccaagatctttgtggcgcacagcaagttcgtcatcctcagcgcccacaagctggtgttcatcggggacacactgtcacggcaggccaaggctgctgacgtgcgcagccaggtgacccactacagcaacctgctgtgcgacctcctgcgcggcatcgtggccaccaccaaggccgctgccttgcagtacccatcgccttccgcggcccaggacatggtggagagggtcaaggagctgggccacagcacccagcagttccgccgcgtcctaggccagctggcagccgcctgagggtggtgaccccaggagggaggcaggggaggggtgcggcggtcccagctccctggctcccatgtcaagagtcgctgtgccacaggcttagggacaggaccccagctctgcgtcggtcctggtgccctggatgcccaggaatctgtatatatttatggccgggcagggtgtggggccatgcctcctcaggagccgaagcccaggggccggccagtggccttccccagcatgcaccacgggcccgggttgggtcaccagacggggctggagtgtgagggtcctgcagcctgcaggacctcgtgccaccccgagggctgagcctggtcccacgagggtgccgtgtcccctgacagggccagtgcagtttggtgtgtcctccgccttaccaggagaagaacctgaagaactatttttcgttattggttttccaatcatttgactaagagtctccatttaaataaagtttttaaaaggaa

SEQ ID NO: 61649 - DNA, 2702 bp, Homo sapiens
ctgaacagggagcctggtggtggaggcagtggtgggcgcagtgtgcccgggggctggagaatcccaccagggaggccttgacctccccaaggcagggagaccttcagggaaggaggctgcctggcatggcccctacccgcttcaggctggtgctggtgaggggtcctgtggccctgggcaggccattgtgctgcctgcctcttcacccactgtgcgggccttggcttccctgggctctgggtcatggtggtggtgcccacccgcgtggggcagggctatgtatacgaggccgcccagccggagcaggacgagtacgacatcccgcgacacctgctggccccggggccacaggacatctatgatgtgcccccggttcgggggctgcttcccagccagtatggccaggaggtgtatgacacaccccccatggctgtcaagggtcccaatggccgagacccgttgctggaggtgtatgacgtgccccccagtgtggagaagggcctgccaccgtccaaccaccacgcagtctacgacgttcctccatcggtgagcaaggatgtgcccgatggcccactgctgcgtgaggagacctacgatgtgccccccgccttcgccaaggccaagccctttgacccggcccgcaccccactggtactggctgcgccccctccagactccccgccggccgaggacgtgtatgacgtgccgcccccggctcctgacctctacgacgtgccccctggcttgcggcggcctggcccgggcaccctgtacgatgtgccccgtgaacgggtgcttcctcctgaggtggctgatggtggcgtggtcgacagtggtgtgtatgcggtgcctcccccagctgaacgtgaagccccggcagagggcaagcgcctgtcggcctccagcaccggcagcacacgcagcagccagtctgcgtcctccttggaggtggcagggccgggccgggaacccctggagctggaagttgctgtggaggccctggcacggctgcagcagggtgtgagcgccaccgttgcccaccttctggacctggcaggcagcgccggtgcgactgggagctggcgtagcccctctgagccacaggagccgctggtgcaggacctgcaggctgctgtggccgccgtccagagtgccgtccacgagctgttggagtttgcccgcagcgcggtgggcaatgctgcccacacatctgaccgtgccctgcatgccaagcttagccggcagctgcagaagatggaggacgtgcaccagacgctggtggcacatggtcaggccctcgacgctggccggggaggctctggagccacccttgaggacctggaccggctggtggcctgctcgcgggctgtgcccgaggacgccaagcagctggcctccttcctgcacggcaatgcctcactgctcttcagacggaccaaggccactgccccggggcctgaggggggtggcaccctgcaccccaaccccactgacaagaccagcagcatccagtcacgacccctgccctcaccccctaagttcacctcccaggactcgccagatgggcagtacgagaacagcgaggggggctggatggaggactatgactacgtccacctacaggggaaggaggagtttgagaagacccagaaggagctgctggaaaagggcagcatcacgcggcagggcaagagccagctggagttgcagcagctgaagcagtttgaacgactggaacaggaggtgtcacggcccatagaccacgacctggccaactggacgccagcccaacccctggccccggggcgaacaggcggcctggggccctcggaccggcagctgctgctcttctacctggagcagtgtgaggccaacctgaccacactgaccaacgccgtggacgccttctttaccgccgtggccaccaaccagccgcccaagatctttgtggcgcacagcaagttcgtcatcctcagcgcccacaagctggtgttcatcggggacacactgtcacggcaggccaaggctgctgacgtgcgcagccaggtgacccactacagcaacctgctgtgcgacctcctgcgcggcatcgtggccaccaccaaggccgctgccttgcagtacccatcgccttccgcggcccaggacatggtggagagggtcaaggagctgggccacagcacccagcagttccgccgcgtcctaggccagctggcagccgcctgagggtggtgaccccaggagggaggcaggggaggggtgcggcggtcccagctccctggctcccatgtcaagagtcgctgtgccacaggcttagggacaggaccccagctctgcgtcggtcctggtgccctggatgcccaggaatctgtatatatttatggccgggcagggtgtggggccatgcctcctcaggagccgaagcccaggggccggccagtggccttccccagcatgcaccacgggcccgggttgggtcaccagacggggctggagtgtgagggtcctgcagcctgcaggacctcgtgccaccccgagggctgagcctggtcccacgagggtgccgtgtcccctgacagggccagtgcagtttggtgtgtcctccgccttaccaggagaagaacctgaagaactatttttcgttattggttttccaatcatttgactaagagtctccatttaaataaagtttttaaaaggaa

SEQ ID NO: 61650 - DNA, 3616 bp, Homo sapiens
atgcgcggcgcggctggagcggccggacagtccggcgtccgggaacgctcaggagccggaggagccggaaagcgccgggacccctcgcggggcctctgagcggcgcgggcggacccgagcccccagcccgctggcgccgctgcccgccaggccccgggggcggcggccaagatgtccgtgcctaacgtgctggccaaagcgctctatgacaatgtggccgagtccccggatgagctctccttccgcaagggtgacatcatgacggtgctggagcaggacacgcagggcctggacggctggtggctctgctcgctgcatgggcgccagggcatcgtgcctgggaaccgcctcaagatcttggtgggcatgtatgataagaagccagcagggcctggctccggccctcccgccaccccggcccagcctcagcctggcctccatgccccagcgcctccggcctcccagtacacgcccatgctccccaacacctaccagccccagccagacagcgtctacctggtgcccactcccagcaaggctcagcaaggcctctaccaagtcccgggtcccagccctcagttccagtctcccccagccaagcagacatccaccttctcgaagcagacaccccatcacccgtttcccagcccggccacagacctgtaccaggtgcccccagggcctggaggccctgcccaggatatttaccaggtgccaccttctgccgggatggggcatgacatctaccaggtccccccgtccatggacacacgcagctgggagggcacgaagcccccggcaaaggtggtggtgcccacccgcgtggggcagggctatgtatacgaggccgcccagccggagcaggacgagtacgacatcccgcgacacctgctggccccggggccacaggacatctatgatgtgcccccggttcgggggctgcttcccagccagtatggccaggaggtgtatgacacaccccccatggctgtcaagggtcccaatggccgagacccgttgctggaggtgtatgacgtgccccccagtgtggagaagggcctgccaccgtccaaccaccacgcagtctacgacgttcctccatcggtgagcaaggatgtgcccgatggcccactgctgcgtgaggagacctacgatgtgccccccgccttcgccaaggccaagccctttgacccggcccgcaccccactggtactggctgcgccccctccagactccccgccggccgaggacgtgtatgacgtgccgcccccggctcctgacctctacgacgtgccccctggcttgcggcggcctggcccgggcaccctgtacgatgtgccccgtgaacgggtgcttcctcctgaggtggctgatggtggcgtggtcgacagtggtgtgtatgcggtgcctcccccagctgaacgtgaagccccggcagagggcaagcgcctgtcggcctccagcaccggcagcacacgcagcagccagtctgcgtcctccttggaggtggcagggccgggccgggaacccctggagctggaagttgctgtggaggccctggcacggctgcagcagggtgtgagcgccaccgttgcccaccttctggacctggcaggcagcgccggtgcgactgggagctggcgtagcccctctgagccacaggagccgctggtgcaggacctgcaggctgctgtggccgccgtccagagtgccgtccacgagctgttggagtttgcccgcagcgcggtgggcaatgctgcccacacatctgaccgtgccctgcatgccaagcttagccggcagctgcagaagatggaggacgtgcaccagacgctggtggcacatggtcaggccctcgacgctggccggggaggctctggagccacccttgaggacctggaccggctggtggcctgctcgcgggctgtgcccgaggacgccaagcagctggcctccttcctgcacggcaatgcctcactgctcttcagacggaccaaggccactgccccggggcctgaggggggtggcaccctgcaccccaaccccactgacaagaccagcagcatccagtcacgacccctgccctcaccccctaagttcacctcccaggactcgccagatgggcagtacgagaacagcgaggggggctggatggaggactatgactacgtccacctacaggggaaggaggagtttgagaagacccagaaggagctgctggaaaagggcagcatcacgcggcagggcaagagccagctggagttgcagcagctgaagcagtttgaacgactggaacaggaggtgtcacggcccatagaccacgacctggccaactggacgccagcccaacccctggccccggggcgaacaggcggcctggggccctcggaccggcagctgctgctcttctacctggagcagtgtgaggccaacctgaccacactgaccaacgccgtggacgccttctttaccgccgtggccaccaaccagccgcccaagatctttgtggcgcacagcaagttcgtcatcctcagcgcccacaagctggtgttcatcggggacacactgtcacggcaggccaaggctgctgacgtgcgcagccaggtgacccactacagcaacctgctgtgcgacctcctgcgcggcatcgtggccaccaccaaggccgctgccttgcagtacccatcgccttccgcggcccaggacatggtggagagggtcaaggagctgggccacagcacccagcagttccgccgcgtcctaggccagctggcagccgcctgagggtggtgaccccaggagggaggcaggggaggggtgcggcggtcccagctccctggctcccatgtcaagagtcgctgtgccacaggcttagggacaggaccccagctctgcgtcggtcctggtgccctggatgcccaggaatctgtatatatttatggccgggcagggtgtggggccatgcctcctcaggagccgaagcccaggggccggccagtggccttccccagcatgcaccacgggcccgggttgggtcaccagacggggctggagtgtgagggtcctgcagcctgcaggacctcgtgccaccccgagggctgagcctggtcccacgagggtgccgtgtcccctgacagggccagtgcagtttggtgtgtcctccgccttaccaggagaagaacctgaagaactatttttcgttattggttttccaatcatttgactaagagtctccatttaaataaagtttttaaaaggaaaaaaaaaaaaaaacaaaaacaaacacaaaaaaaaacaaaaaaaaaaaaaagaggggggggcacaccaaaaaagacaaaccgcaggagggcgcccgagaattagcgacctgcaccatcatggtacaaaagcgggcgccccaatagagaaaggaaaaaaaaaaagaagacgagaggcccgggaaaccaagcgacgcaccggcgacaccgcgcaccaggagaattggaagagcaaccacccatgggggggggacaacgggagcacacacgcagagagatataagctacaaggaataacaacacacgtaatcgggtaacaccgacatcggcaggagaaagatcacaagtataacaattac

SEQ ID NO: 61651 - DNA, 1144 bp, Homo sapiens
acctacaggggaaggaggagtttgagaagacccagaaggtggacgtagtcatagtcctcctacaggggaaggaggagtttgagaagacccagaaggagctgctggaaaagggcagcatcacgcggcagggcaagagccagctggagttgcagcagctgaagcagtttgaacgactggaacaggaggtgtcacggcccatagaccacgacctggccaactggacgccagcccaacccctggccccggggcgaacaggcggcctggggccctcggaccggcagctgctgctcttctacctggagcagtgtgaggccaacctgaccacactgaccaacgccgtggacgccttctttaccgccgtggccaccaaccagccgcccaagatctttgtggcgcacagcaagttcgtcatcctcagcgcccacaagctggtgttcatcggggacacactgtcacggcaggccaaggctgctgacgtgcgcagccaggtgacccactacagcaacctgctgtgcgacctcctgcgcggcatcgtggccaccaccaaggccgctgccttgcagtacccatcgccttccgcggcccaggacatggtggagagggtcaaggagctgggccacagcacccagcagttccgccgcgtcctaggccagctggcagccgcctgagggtggtgaccccaggagggaggcaggggaggggtgcggcggtcccagctccctggctcccatgtcaagagtcgctgtgccacaggcttagggacaggaccccagctctgcgtcggtcctggtgccctggatgcccaggaatctgtatatatttatggccgggcagggtgtggggccatgcctcctcaggagccgaagcccaggggccggccagtggccttccccagcatgcaccacgggcccgggttgggtcaccagacggggctggagtgtgagggtcctgcagcctgcaggacctcgtgccaccccgagggctgagcctggtcccacgagggtgccgtgtcccctgacagggccagtgcagtttggtgtgtcctccgccttaccaggagaagaacctgaagaactatttttcgttattggttttccaatcatttgactaagagtctccatttaaataaagtttttaaaaggaa

SEQ ID NO: 61652 - DNA, 290 bp, Homo sapiens
ctgaacagggagcctggtggtggaggcagtggtgggcgcagtgtgcccgggggctggagaatcccaccagggaggccttgacctccccaaggcagggagaccttcagggaaggaggctgcctggcatggcccctacccgcttcaggctggtgctggtgaggggtcctgtggccctgggcaggccattgtgctgcctgcctcttcacccactgtgcgggccttggcttccctgggctctgggtcatggtaagagcacctgggaggggagggctggccctggacccacttcc

SEQ ID NO: 61653 - DNA, 3167 bp, Homo sapiens
cacctggtagtgtcaggagagggcatgcactgccctggtgaggctcctctggctgcccccaggcccacacccaaggatccctgcctcagaaacgtgctggccaaagcgctctatgacaatgtggccgagtccccggatgagctctccttccgcaagggtgacatcatgacggtgctggagcaggacacgcagggcctggacggctggtggctctgctcgctgcatgggcgccagggcatcgtgcctgggaaccgcctcaagatcttggtgggcatgtatgataagaagccagcagggcctggctccggccctcccgccaccccggcccagcctcagcctggcctccatgccccagcgcctccggcctcccagtacacgcccatgctccccaacacctaccagccccagccagacagcgtctacctggtgcccactcccagcaaggctcagcaaggcctctaccaagtcccgggtcccagccctcagttccagtctcccccagccaagcagacatccaccttctcgaagcagacaccccatcacccgtttcccagcccggccacagacctgtaccaggtgcccccagggcctggaggccctgcccaggatatttaccaggtgccaccttctgccgggatggggcatgacatctaccaggtccccccgtccatggacacacgcagctgggagggcacgaagcccccggcaaaggtggtggtgcccacccgcgtggggcagggctatgtatacgaggccgcccagccggagcaggacgagtacgacatcccgcgacacctgctggccccggggccacaggacatctatgatgtgcccccggttcgggggctgcttcccagccagtatggccaggaggtgtatgacacaccccccatggctgtcaagggtcccaatggccgagacccgttgctggaggtgtatgacgtgccccccagtgtggagaagggcctgccaccgtccaaccaccacgcagtctacgacgttcctccatcggtgagcaaggatgtgcccgatggcccactgctgcgtgaggagacctacgatgtgccccccgccttcgccaaggccaagccctttgacccggcccgcaccccactggtactggctgcgccccctccagactccccgccggccgaggacgtgtatgacgtgccgcccccggctcctgacctctacgacgtgccccctggcttgcggcggcctggcccgggcaccctgtacgatgtgccccgtgaacgggtgcttcctcctgaggtggctgatggtggcgtggtcgacagtggtgtgtatgcggtgcctcccccagctgaacgtgaagccccggcagagggcaagcgcctgtcggcctccagcaccggcagcacacgcagcagccagtctgcgtcctccttggaggtggcagggccgggccgggaacccctggagctggaagttgctgtggaggccctggcacggctgcagcagggtgtgagcgccaccgttgcccaccttctggacctggcaggcagcgccggtgcgactgggagctggcgtagcccctctgagccacaggagccgctggtgcaggacctgcaggctgctgtggccgccgtccagagtgccgtccacgagctgttggagtttgcccgcagcgcggtgggcaatgctgcccacacatctgaccgtgccctgcatgccaagcttagccggcagctgcagaagatggaggacgtgcaccagacgctggtggcacatggtcaggccctcgacgctggccggggaggctctggagccacccttgaggacctggaccggctggtggcctgctcgcgggctgtgcccgaggacgccaagcagctggcctccttcctgcacggcaatgcctcactgctcttcagacggaccaaggccactgccccggggcctgaggggggtggcaccctgcaccccaaccccactgacaagaccagcagcatccagtcacgacccctgccctcaccccctaagttcacctcccaggactcgccagatgggcagtacgagaacagcgaggggggctggatggaggactatgactacgtccacctacaggggaaggaggagtttgagaagacccagaaggagctgctggaaaagggcagcatcacgcggcagggcaagagccagctggagttgcagcagctgaagcagtttgaacgactggaacaggaggtgtcacggcccatagaccacgacctggccaactggacgccagcccaacccctggccccggggcgaacaggcggcctggggccctcggaccggcagctgctgctcttctacctggagcagtgtgaggccaacctgaccacactgaccaacgccgtggacgccttctttaccgccgtggccaccaaccagccgcccaagatctttgtggcgcacagcaagttcgtcatcctcagcgcccacaagctggtgttcatcggggacacactgtcacggcaggccaaggctgctgacgtgcgcagccaggtgacccactacagcaacctgctgtgcgacctcctgcgcggcatcgtggccaccaccaaggccgctgccttgcagtacccatcgccttccgcggcccaggacatggtggagagggtcaaggagctgggccacagcacccagcagttccgccgcgtcctaggccagctggcagccgcctgagggtggtgaccccaggagggaggcaggggaggggtgcggcggtcccagctccctggctcccatgtcaagagtcgctgtgccacaggcttagggacaggaccccagctctgcgtcggtcctggtgccctggatgcccaggaatctgtatatatttatggccgggcagggtgtggggccatgcctcctcaggagccgaagcccaggggccggccagtggccttccccagcatgcaccacgggcccgggttgggtcaccagacggggctggagtgtgagggtcctgcagcctgcaggacctcgtgccaccccgagggctgagcctggtcccacgagggtgccgtgtcccctgacagggccagtgcagtttggtgtgtcctccgccttaccaggagaagaacctgaagaactatttttcgttattggttttccaatcatttgactaagagtctccatttaaataaagtttttaaaaggaa

SEQ ID NO: 61654 - DNA, 1927 bp, Homo sapiens
ctaacaaaaaacattaaggctaagcaaaaaactcgatgataatacggaacgagggtcagactgtgtatgcggtgcctcccccagctgaacgtgaagccccggcagagggcaagcgcctgtcggcctccagcaccggcagcacacgcagcagccagtctgcgtcctccttggaggtggcagggccgggccgggaacccctggagctggaagttgctgtggaggccctggcacggctgcagcagggtgtgagcgccaccgttgcccaccttctggacctggcaggcagcgccggtgcgactgggagctggcgtagcccctctgagccacaggagccgctggtgcaggacctgcaggctgctgtggccgccgtccagagtgccgtccacgagctgttggagtttgcccgcagcgcggtgggcaatgctgcccacacatctgaccgtgccctgcatgccaagcttagccggcagctgcagaagatggaggacgtgcaccagacgctggtggcacatggtcaggccctcgacgctggccggggaggctctggagccacccttgaggacctggaccggctggtggcctgctcgcgggctgtgcccgaggacgccaagcagctggcctccttcctgcacggcaatgcctcactgctcttcagacggaccaaggccactgccccggggcctgaggggggtggcaccctgcaccccaaccccactgacaagaccagcagcatccagtcacgacccctgccctcaccccctaagttcacctcccaggactcgccagatgggcagtacgagaacagcgaggggggctggatggaggactatgactacgtccacctacaggggaaggaggagtttgagaagacccagaaggagctgctggaaaagggcagcatcacgcggcagggcaagagccagctggagttgcagcagctgaagcagtttgaacgactggaacaggaggtgtcacggcccatagaccacgacctggccaactggacgccagcccaacccctggccccggggcgaacaggcggcctggggccctcggaccggcagctgctgctcttctacctggagcagtgtgaggccaacctgaccacactgaccaacgccgtggacgccttctttaccgccgtggccaccaaccagccgcccaagatctttgtggcgcacagcaagttcgtcatcctcagcgcccacaagctggtgttcatcggggacacactgtcacggcaggccaaggctgctgacgtgcgcagccaggtgacccactacagcaacctgctgtgcgacctcctgcgcggcatcgtggccaccaccaaggccgctgccttgcagtacccatcgccttccgcggcccaggacatggtggagagggtcaaggagctgggccacagcacccagcagttccgccgcgtcctaggccagctggcagccgcctgagggtggtgaccccaggagggaggcaggggaggggtgcggcggtcccagctccctggctcccatgtcaagagtcgctgtgccacaggcttagggacaggaccccagctctgcgtcggtcctggtgccctggatgcccaggaatctgtatatatttatggccgggcagggtgtggggccatgcctcctcaggagccgaagcccaggggccggccagtggccttccccagcatgcaccacgggcccgggttgggtcaccagacggggctggagtgtgagggtcctgcagcctgcaggacctcgtgccaccccgagggctgagcctggtcccacgagggtgccgtgtcccctgacagggccagtgcagtttggtgtgtcctccgccttaccaggagaagaacctgaagaactatttttcgttattggttttccaatcatttgactaagagtctccatttaaataaagtttttaaaaggaa

SEQ ID NO: 61655 - DNA, 1520 bp, Homo sapiens
  misc_feature (1)..(2): n is a, c, g, or t
nnaaaacagcccggagcctgcagcccagccccacccagacccatggctggacctgccacccagagccccatgaagctgatggccctgcagctgctgctgtggcacagtgcactctggacagtgcaggaagccacccccctgggccctgccagctccctgccccagagcttcctgctcaagtgcttagagcaagtgaggaagatccagggcgatggcgcagcgctccaggagaagctgtgtgccacctacaagctgtgccaccccgaggagctggtgctgctcggacactctctgggcatcccctgggctcccctgagcagctgccccagccaggccctgcagctggcaggctgcttgagccaactccatagcggccttttcctctaccaggggctcctgcaggccctggaagggatctcccccgagttgggtcccaccttggacacactgcagctggacgtcgccgactttgccaccaccatctggcagcagatggaagaactgggaatggcccctgccctgcagcccacccagggtgccatgccggccttcgcctctgctttccagcgccgggcaggaggggtcctggttgcctcccatctgcagagcttcctggaggtgtcgtaccgcgttctacgccaccttgcccagccctgagccaagccctccccatcccatgtatttatctctatttaatatttatgtctatttaagcctcatatttaaagacagggaagagcagaacggagccccaggcctctgtgtccttccctgcatttctgagtttcattctcctgcctgtagcagtgagaaaaagctcctgtcctcccatcccctggactgggaggtagataggtaaataccaagtatttattactatgactgctccccagccctggctctgcaatgggcactgggatgagccgctgtgagcccctggtcctgagggtccccacctgggacccttgagagtatcaggtctcccacgtgggagacaagaaatccctgtttaatatttaaacagcagtgttccccatctgggtccttgcacccctcactctggcctcagccgactgcacagcggcccctgcatccccttggctgtgaggcccctggacaagcagaggtggccagagctgggaggcatggccctggggtcccacgaatttgctggggaatctcgtttttcttcttaagacttttgggacatggtttgactcccgaacatcaccgacgtgtctcctgtttttctgggtggcctcgggacacctgccctgcccccacgagggtcaggactgtgactctttttagggccaggcaggtgcctggacatttgccttgctggacggggactggggatgtgggagggagcagacaggaggaatcatgtcaggcctgtgtgtgaaaggaagctccactgtcaccctccacctcttcaccccccactcaccagtgtcccctccactgtcacattgtaactgaacttcaggataataaagtgtttgcctccaaaaacgtcc

SEQ ID NO: 61656 - DNA, 1841 bp, Homo sapiens
  misc_feature (1)..(2): n is a, c, g, or t
nnaaaacagcccggagcctgcagcccagccccacccagacccatggctggacctgccacccagagccccatgaagctgatgggtgagtgtcttggcccaggatgggagagccgcctgccctggcatgggagggaggctggtgtgacagaggggctggggatccccgttctgggaatggggattaaaggcacccagtgtccccgagagggcctcaggtggtagggaacagcatgtctcctgagcccgctctgtccccagccctgcagctgctgctgtggcacagtgcactctggacagtgcaggaagccacccccctgggccctgccagctccctgccccagagcttcctgctcaagtgcttagagcaagtgaggaagatccagggcgatggcgcagcgctccaggagaagctgtgtgccacctacaagctgtgccaccccgaggagctggtgctgctcggacactctctgggcatcccctgggctcccctgagcagctgccccagccaggccctgcagctggtgagtgtcaggaaaggataaggctaatgaggagggggaaggagaggaggaacacccatgggctcccccatgtctccaggttccaagctgggggcctgacgtatctcaggcagcaccccctaactcttccgctctgtctcacagggcaggctgcttgagccaactccatagcggccttttcctctaccaggggctcctgcaggccctggaagggatctcccccgagttgggtcccaccttggacacactgcagctggacgtcgccgactttgccaccaccatctggcagcagatggaagaactgggaatggcccctgccctgcagcccacccagggtgccatgccggccttcgcctctgctttccagcgccgggcaggaggggtcctggttgcctcccatctgcagagcttcctggaggtgtcgtaccgcgttctacgccaccttgcccagccctgagccaagccctccccatcccatgtatttatctctatttaatatttatgtctatttaagcctcatatttaaagacagggaagagcagaacggagccccaggcctctgtgtccttccctgcatttctgagtttcattctcctgcctgtagcagtgagaaaaagctcctgtcctcccatcccctggactgggaggtagataggtaaataccaagtatttattactatgactgctccccagccctggctctgcaatgggcactgggatgagccgctgtgagcccctggtcctgagggtccccacctgggacccttgagagtatcaggtctcccacgtgggagacaagaaatccctgtttaatatttaaacagcagtgttccccatctgggtccttgcacccctcactctggcctcagccgactgcacagcggcccctgcatccccttggctgtgaggcccctggacaagcagaggtggccagagctgggaggcatggccctggggtcccacgaatttgctggggaatctcgtttttcttcttaagacttttgggacatggtttgactcccgaacatcaccgacgtgtctcctgtttttctgggtggcctcgggacacctgccctgcccccacgagggtcaggactgtgactctttttagggccaggcaggtgcctggacatttgccttgctggacggggactggggatgtgggagggagcagacaggaggaatcatgtcaggcctgtgtgtgaaaggaagctccactgtcaccctccacctcttcaccccccactcaccagtgtcccctccactgtcacattgtaactgaacttcaggataataaagtgtttgcctccaaaaacgtcc

SEQ ID NO: 61657 - DNA, 332 bp, Homo sapiens
aaggtctctgggaaatggggcattcccatattcttcctatcgtgtgtggtgaaagctgtgatcaggtggtttgggcccttctgagttggtgcgttagttacaaactgaggaaatgctgggggctgacagcatggacagggcccatacacaggcccggcaggctgcttgagccaactccatagcggccttttcctctaccaggggctcctgcaggccctggaagggatctcccccgagttgggtcccaccttggacacactgcagctggacgtcgccgactttgccaccaccatctggcagcaggtgagccttgttgggcagggtggccaagg

SEQ ID NO: 61658 - DNA, 1412 bp, Homo sapiens
  misc_feature (1)..(2): n is a, c, g, or t
nnaaaacagcccggagcctgcagcccagccccacccagacccatggctggacctgccacccagagccccatgaagctgatggccctgcagctgctgctgtggcacagtgcactctggacagtgcaggaagccacccccctgggccctgccagctccctgccccagagcttcctgctcaagtgcttagagcaagtgaggaagatccagggcgatggcgcagcgctccaggagaagctggcaggctgcttgagccaactccatagcggccttttcctctaccaggggctcctgcaggccctggaagggatctcccccgagttgggtcccaccttggacacactgcagctggacgtcgccgactttgccaccaccatctggcagcagatggaagaactgggaatggcccctgccctgcagcccacccagggtgccatgccggccttcgcctctgctttccagcgccgggcaggaggggtcctggttgcctcccatctgcagagcttcctggaggtgtcgtaccgcgttctacgccaccttgcccagccctgagccaagccctccccatcccatgtatttatctctatttaatatttatgtctatttaagcctcatatttaaagacagggaagagcagaacggagccccaggcctctgtgtccttccctgcatttctgagtttcattctcctgcctgtagcagtgagaaaaagctcctgtcctcccatcccctggactgggaggtagataggtaaataccaagtatttattactatgactgctccccagccctggctctgcaatgggcactgggatgagccgctgtgagcccctggtcctgagggtccccacctgggacccttgagagtatcaggtctcccacgtgggagacaagaaatccctgtttaatatttaaacagcagtgttccccatctgggtccttgcacccctcactctggcctcagccgactgcacagcggcccctgcatccccttggctgtgaggcccctggacaagcagaggtggccagagctgggaggcatggccctggggtcccacgaatttgctggggaatctcgtttttcttcttaagacttttgggacatggtttgactcccgaacatcaccgacgtgtctcctgtttttctgggtggcctcgggacacctgccctgcccccacgagggtcaggactgtgactctttttagggccaggcaggtgcctggacatttgccttgctggacggggactggggatgtgggagggagcagacaggaggaatcatgtcaggcctgtgtgtgaaaggaagctccactgtcaccctccacctcttcaccccccactcaccagtgtcccctccactgtcacattgtaactgaacttcaggataataaagtgtttgcctccaaaaacgtcc

SEQ ID NO: 61659 - DNA, 305 bp, Homo sapiens
tcttctaaaatccataggaatccttgccttaggttacttgcacttgctgttatttctgcctaataaactccttctactaattattgcttgcctggatcatttggaacacaattcagctctcatcctccattaaattgtacctcactggcctagccatcactgtctgttatagtctctactattattcctcaatatttaccttttccatggttcctattgcaagataaaattcttttatgctcaaccttgacaagaatatatattctttctgtcttctttactacagtgccaagatcaatccctgg

SEQ ID NO: 61660 - DNA, 461 bp, Homo sapiens
gtgaaggatgccactctgggtgttcttctttgtgatcctcaccctcagcaacagctcccactgctccccacctccccctttgaccctcaggatgcggcggtatgcagatgccatcttcaccaacagctaccggaaggtgctgggccagctgtccgcccgcaagctgctccaggacatcatgagcaggcagcagggagagagcaaccaagagcgaggagcaagggcacggcttggtcgtcaggtagacagcatgtgggcagaacaaaagcaaatggaattggagagcatcctggtggccctgctgcagaagcacagcaggaactcccagggatgaagattcctcctgtgacccgggctacctgtagccaaaatgcaactggatccagttaatcctctcatttctgacccactttttcctttgaaaatacaataaaattcccccataccggtgtgcatttaaa

SEQ ID NO: 61661 - DNA, 333 bp, Homo sapiens
ccttggccaaactttgttacatggctacctctgagtgcaagaaggctgggaaatggttgtttttaaaccaggaagattgctaacttgaaattgggttctgagtgggcagatcatgaagtcaggagatcaagaccaccctggctaacacagtgaaaccccgtctgtactgaaaatacaaaaaaaattagctgggtgtgatggtgcacgcctgtagtcccagctacttgggaggctgaggcaggagaattgcttgaatccggaaggcggaggttgcagtgagctgagatcgcaccactgcactccagcctgggcgacagagggagactccatctc

SEQ ID NO: 61662 - DNA, 499 bp, Homo sapiens
ctctccaccccccatccagacttctccagcaaacctttaaaatatggtcatttcctcagaatagaatccactctagctggtttaggcaaaagggattaaatttttttttcacagagcattaaaaggtttacaaatcacttgagagataaacagtctctaggttgagcatccaggagaaatgtccaaagccacaagacacaactgggcacctctgagaccagttgtctctgccatgataggaagtaccatagtggctgctggccacttacccagcagctactaccatcacagctcatgcttctctccccacttccttcagttctaaattcagttctcatgaatacatctctttggtagaacctgaatcatattcagaacagtaatttcattgaagtctgaaaagtgttagttttagctttccaggctcagctgtttaggaagaaagttgagatgatcactgaattgctaaaactacaggatcagccataataagcacaac

SEQ ID NO: 61663 - DNA, 681 bp, Homo sapiens
atgctagtcgaggcctgggtttaatcggccgagcgagagctccgtcagtgcaacctgcagcagttcatccagcagaccggggctgcgctgccaccgcccccacggcctgacaggggccctcctggcactcagggccctctgcctccagccagagaggagtccctcctgggcgctccctctgagtcccatgctggtgcccagcctaggccccgaggtggcccccatgacgcagaactcctggaggtagcagcagctcctgccccagagtggtgtcctctggcagcccagccccaggctctgtgacagcctagtgagggctgcaagaccatcctgcccggaccacagaaggagagttggcggtcacagagggctcctctgccaggcagtgggaagccctgggtttggcctcaggagctgggggtgcagtgggggactgccctagtccttgccaggtcgccagcaccctggagaagcatggggcgtagccagctcggaacttgccaggccccaaaggccacgactgcctgttggggacaggagatgcatggacagtgtgctcaagctgtgggcatgtgcttgcctgcgggagaggtccttcactgtgtgtacacagcaagagcatgtgtgtgccacttcccctaccccaacgtgaaaacctcaataaactgcccgaagcagctt

SEQ ID NO: 61664 - DNA, 1704 bp, Homo sapiens
gctggtaccggccggaatttgggatggctggcgagcgcccgacaggcatgttgttgggactggcggccatggagctgaaggtgtgggtggatggcatccagcgtgtggtctgtggggtctcagagcagaccacctgccaggaagtggtcatcgcactagcccaagcaataggccagactggccgctttgtgcttgtgcagcggcttcgggagaaggagcggcagttgctgccacaagagtgtccagtgggcgcccaggccacctgcggacagtttgccagcgatgtccagtttgtcctgaggcgcacagggcccagcctagctgggaggccctcctcagacagctgtccacccccggaacgctgcctaattcgtgccagcctccctgtaaagccacgggctgcgctgggctgtgagccccgcaaaacactgacccccgagccagcccccagcctctcacgccctgggcctgcggcccctgtgacacccacaccaggctgctgcacagacctgcggggcctggagctcagggtgcagaggaatgctgaggagctgggccatgaggccttctgggagcaagagctgcgccgggagcaggcccgggagcgagagggacaggcacgcctgcaggcactaagtgcggccactgctgagcatgccgcccggctgcaggccctggacgctcaggcccgtgccctggaggctgagctgcagctggcagcggaggcccctgggcccccctcacctatggcatctgccactgagcgcctgcaccaggacctggctgttcaggagcggcagagtgcggaggtgcagggcagcctggctctggtgagccgggccctggaggcagcagagcgagccttgcaggctcaggctcaggagctggaggagctgaaccgagagctccgtcagtgcaacctgcagcagttcatccagcagaccggggctgcgctgccaccgcccccacggcctgacaggggccctcctggcactcaggtcggagtggttctggggggaggctgggaggtgaggacctggcccagccccactccaagctgacttcccaacccacagggccctctgcctccagccagagaggagtccctcctgggcgctccctctgagtcccatgctggtgcccagcctaggccccgagggtatgtctgtgccccacctccccctggggcaccgggccctcctgtggctgcagccacctcagcctgtgtcctcccgcagtggcccccatgacgcagaactcctggaggtagcagcagctcctgccccagagtggtgtcctctggcagcccagccccaggctctgtgacagcctagtgagggctgcaagaccatcctgcccggaccacagaaggagagttggcggtcacagagggctcctctgccaggcagtgggaagccctgggtttggcctcaggagctgggggtgcagtgggggactgccctagtccttgccaggtcgccagcaccctggagaagcatggggcgtagccagctcggaacttgccaggccccaaaggccacgactgcctgttggggacaggagatgcatggacagtgtgctcaagctgtgggcatgtgcttgcctgcgggagaggtccttcactgtgtgtacacagcaagagcatgtgtgtgccacttcccctaccccaacgtgaaaacctcaataaactgcccgaagcagctt

SEQ ID NO: 61665 - DNA, 2100 bp, Homo sapiens
cgccgggtccccggtacttgggagcgcggggcgcgcctcgagccggccggacgccgactccaactggggagagttttccgcgatgcccggacggagagcgggggcggcgccgcacctgcgcccgccctgcggaacggggacgccctggctcccgccaggctggggtcgcggcgcgggcttcggtgcccgcggcggggaccgggactttcggggcgagcgcagcgattaggcggcagcggcggggctccccgggctggcgggggctgctcagacccggagtctgctccatctgcagggtcgaggtctgggttgcgaccccgagcgcctctgcggcctgagcaggtcggggtggggcgtcccattgccggcggccgcggggcctggcgtgcgggcgcctccgcgccgcccggggagggggcagtgtcctccgagccaggacaggcatgttgttgggactggcggccatggagctgaaggtgtgggtggatggcatccagcgtgtggtctgtggggtctcagagcagaccacctgccaggaagtggtcatcgcactagcccaagcaataggccagactggccgctttgtgcttgtgcagcggcttcgggagaaggagcggcagttgctgccacaagagtgtccagtgggcgcccaggccacctgcggacagtttgccagcgatgtccagtttgtcctgaggcgcacagggcccagcctagctgggaggccctcctcagacagctgtccacccccggaacgctgcctaattcgtgccagcctccctgtaaagccacgggctgcgctgggctgtgagccccgcaaaacactgacccccgagccagcccccagcctctcacgccctgggcctgcggcccctgtgacacccacaccaggctgctgcacagacctgcggggcctggagctcagggtgcagaggaatgctgaggagctgggccatgaggccttctgggagcaagagctgcgccgggagcaggcccgggagcgagagggacaggcacgcctgcaggcactaagtgcggccactgctgagcatgccgcccggctgcaggccctggacgctcaggcccgtgccctggaggctgagctgcagctggcagcggaggcccctgggcccccctcacctatggcatctgccactgagcgcctgcaccaggacctggctgttcaggagcggcagagtgcggaggtgcagggcagcctggctctggtgagccgggccctggaggcagcagagcgagccttgcaggctcaggctcaggagctggaggagctgaaccgagagctccgtcagtgcaacctgcagcagttcatccagcagaccggggctgcgctgccaccgcccccacggcctgacaggggccctcctggcactcaggtcggagtggttctggggggaggctgggaggtgaggacctggcccagccccactccaagctgacttcccaacccacagggccctctgcctccagccagagaggagtccctcctgggcgctccctctgagtcccatgctggtgcccagcctaggccccgagggtatgtctgtgccccacctccccctggggcaccgggccctcctgtggctgcagccacctcagcctgtgtcctcccgcagtggcccccatgacgcagaactcctggaggtagcagcagctcctgccccagagtggtgtcctctggcagcccagccccaggctctgtgacagcctagtgagggctgcaagaccatcctgcccggaccacagaaggagagttggcggtcacagagggctcctctgccaggcagtgggaagccctgggtttggcctcaggagctgggggtgcagtgggggactgccctagtccttgccaggtcgccagcaccctggagaagcatggggcgtagccagctcggaacttgccaggccccaaaggccacgactgcctgttggggacaggagatgcatggacagtgtgctcaagctgtgggcatgtgcttgcctgcgggagaggtccttcactgtgtgtacacagcaagagcatgtgtgtgccacttcccctaccccaacgtgaaaacctcaataaactgcccgaagcagctt

SEQ ID NO: 61666 - DNA, 1686 bp, Homo sapiens
ggctggtacggtcggaatttgggacaggcatgttgttgggactggcggccatggagctgaaggtgtgggtggatggcatccagcgtgtggtctgtggggtctcagagcagaccacctgccaggaagtggtcatcgcactagcccaagcaataggccagactggccgctttgtgcttgtgcagcggcttcgggagaaggagcggcagttgctgccacaagagtgtccagtgggcgcccaggccacctgcggacagtttgccagcgatgtccagtttgtcctgaggcgcacagggcccagcctagctgggaggccctcctcagacagctgtccacccccggaacgctgcctaattcgtgccagcctccctgtaaagccacgggctgcgctgggctgtgagccccgcaaaacactgacccccgagccagcccccagcctctcacgccctgggcctgcggcccctgtgacacccacaccaggctgctgcacagacctgcggggcctggagctcagggtgcagaggaatgctgaggagctgggccatgaggccttctgggagcaagagctgcgccgggagcaggcccgggagcgagagggacaggcacgcctgcaggcactaagtgcggccactgctgagcatgccgcccggctgcaggccctggacgctcaggcccgtgccctggaggctgagctgcagctggcagcggaggcccctgggcccccctcacctatggcatctgccactgagcgcctgcaccaggacctggctgttcaggagcggcagagtgcggaggtgcagggcagcctggctctggtgagccgggccctggaggcagcagagcgagccttgcaggctcaggctcaggagctggaggagctgaaccgagagctccgtcagtgcaacctgcagcagttcatccagcagaccggggctgcgctgccaccgcccccacggcctgacaggggccctcctggcactcaggtcggagtggttctggggggaggctgggaggtgaggacctggcccagccccactccaagctgacttcccaacccacagggccctctgcctccagccagagaggagtccctcctgggcgctccctctgagtcccatgctggtgcccagcctaggccccgagggtatgtctgtgccccacctccccctggggcaccgggccctcctgtggctgcagccacctcagcctgtgtcctcccgcagtggcccccatgacgcagaactcctggaggtagcagcagctcctgccccagagtggtgtcctctggcagcccagccccaggctctgtgacagcctagtgagggctgcaagaccatcctgcccggaccacagaaggagagttggcggtcacagagggctcctctgccaggcagtgggaagccctgggtttggcctcaggagctgggggtgcagtgggggactgccctagtccttgccaggtcgccagcaccctggagaagcatggggcgtagccagctcggaacttgccaggccccaaaggccacgactgcctgttggggacaggagatgcatggacagtgtgctcaagctgtgggcatgtgcttgcctgcgggagaggtccttcactgtgtgtacacagcaagagcatgtgtgtgccacttcccctaccccaacgtgaaaacctcaataaactgcccgaagcagctt

SEQ ID NO: 61667 - DNA, 1508 bp, Homo sapiens
cggcgctgggggcggcaggttgcggcggcgccggagcgggtctccaggctggcgagcgcccaggacaggcatgttgttgggactggcggccatggagctgaaggtgtgggtggatggcatccagcgtgtggtctgtggggtctcagagcagaccacctgccaggaagtggtcatcgcactagcccaagcaataggccagactggccgctttgtgcttgtgcagcggcttcgggagaaggagcggcagttgctgccacaagagtgtccagtgggcgcccaggccacctgcggacagtttgccagcgatgtccagtttgtcctgaggcgcacagggcccagcctagctgggaggccctcctcagacagctgtccacccccggaacgctgcctaattcgtgccagcctccctgtaaagccacgggctgcgctgggctgtgagccccgcaaaacactgacccccgagccagcccccagcctctcacgccctgggcctgcggcccctgtgacacccacaccaggctgctgcacagacctgcggggcctggagctcagggtgcagaggaatgctgaggagctgggccatgaggccttctgggagcaagagctgcgccgggagcaggcccgggagcgagagggacaggcacgcctgcaggcactaagtgcggccactgctgagcatgccgcccggctgcaggccctggacgctcaggcccgtgccctggaggctgagctgcagctggcagcggaggcccctgggcccccctcacctatggcatctgccactgagcgcctgcaccaggacctggctgttcaggagcggcagagtgcggaggtgcagggcagcctggctctggtgagccgggccctggaggcagcagagcgagccttgcaggctcaggctcaggagctggaggagctgaaccgagagctccgtcagtgcaacctgcagcagttcatccagcagaccggggctgcgctgccaccgcccccacggcctgacaggggccctcctggcactcagtggcccccatgacgcagaactcctggaggtagcagcagctcctgccccagagtggtgtcctctggcagcccagccccaggctctgtgacagcctagtgagggctgcaagaccatcctgcccggaccacagaaggagagttggcggtcacagagggctcctctgccaggcagtgggaagccctgggtttggcctcaggagctgggggtgcagtgggggactgccctagtccttgccaggtcgccagcaccctggagaagcatggggcgtagccagctcggaacttgccaggccccaaaggccacgactgcctgttggggacaggagatgcatggacagtgtgctcaagctgtgggcatgtgcttgcctgcgggagaggtccttcactgtgtgtacacagcaagagcatgtgtgtgcacacattcacacataaaacatcaagcgtgaaaacactcaatgatgcactcttttttgttgtttagtcctttt

SEQ ID NO: 61668 - DNA, 1541 bp, Homo sapiens
gaattcggggggagggggcagtgtcctccgagccgacaggcatgttgttgggactggcggccatggagctgaaggtgtgggtggatggcatccagcgtgtggtctgtggggtctcagagcagaccacctgccaggaagtggtcatcgcactagcccaagcaataggccagactggccgctttgtgcttgtgcagcggcttcgggagaaggagcggcagttgctgccacaagagtgtccagtgggcgcccaggccacctgcggacagtttgccagcgatgtccagtttgtcctgaggcgcacagggcccagcctagctgggaggccctcctcagacagctgtccacccccggaacgctgcctaattcgtgccagcctccctgtaaagccacgggctgcgctgggctgtgagccccgcaaaacactgacccccgagccagcccccagcctctcacgccctgggcctgcggcccctgtgacacccacaccaggctgctgcacagacctgcggggcctggagctcagggtgcagaggaatgctgaggagctgggccatgaggccttctgggagcaagagctgcgccgggagcaggcccgggagcgagagggacaggcacgcctgcaggcactaagtgcggccactgctgagcatgccgcccggctgcaggccctggacgctcaggcccgtgccctggaggctgagctgcagctggcagcggaggcccctgggcccccctcacctatggcatctgccactgagcgcctgcaccaggacctggctgttcaggagcggcagagtgcggaggtgcagggcagcctggctctggtgagccgggccctggaggcagcagagcgagccttgcaggctcaggctcaggagctggaggagctgaaccgagagctccgtcagtgcaacctgcagcagttcatccagcagaccggggctgcgctgccaccgcccccacggcctgacaggggccctcctggcactcagggccctctgcctccagccagagaggagtccctcctgggcgctccctctgagtcccatgctggtgcccagcctaggccccgaggtggcccccatgacgcagaactcctggaggtagcagcagctcctgccccagagtggtgtcctctggcagcccagccccaggctctgtgacagcctagtgagggctgcaagaccatcctgcccggaccacagaaggagagttggcggtcacagagggctcctctgccaggcagtgggaagccctgggtttggcctcaggagctgggggtgcagtgggggactgccctagtccttgccaggtcgccagcaccctggagaagcatggggcgtagccagctcggaacttgccaggccccaaaggccacgactgcctgttggggacaggagatgcatggacagtgtgctcaagctgtgggcatgtgcttgcctgcgggagaggtccttcactgtgtgtacacagcaagagcatgtgtgtgccacttcccctaccccaacgtgaaaacctcaataaactgcccgaagcagctt

SEQ ID NO: 61669 - DNA, 1727 bp, Homo sapiens
cggcgctgggggcggcaggttgcggcggcgccggagcgggtctccaggctggcgagcgcccaggacaggcatgttgttgggactggcggccatggagctgaaggtgtgggtggatggcatccagcgtgtggtctgtggggtctcagagcagaccacctgccaggaagtggtcatcgcactagcccaagcaataggccagactggccgctttgtgcttgtgcagcggcttcgggagaaggagcggcagttgctgccacaagagtgtccagtgggcgcccaggccacctgcggacagtttgccagcgatgtccagtttgtcctgaggcgcacagggcccagcctagctgggaggccctcctcagacagctgtccacccccggaacgctgcctaattcgtgccagcctccctgtaaagccacgggctgcgctgggctgtgagccccgcaaaacactgacccccgagccagcccccagcctctcacgccctgggcctgcggcccctgtgacacccacaccaggctgctgcacagacctgcggggcctggagctcagggtgcagaggaatgctgaggagctgggccatgaggccttctgggagcaagagctgcgccgggagcaggcccgggagcgagagggacaggcacgcctgcaggcactaagtgcggccactgctgagcatgccgcccggctgcaggccctggacgctcaggcccgtgccctggaggctgagctgcagctggcagcggaggcccctgggcccccctcacctatggcatctgccactgagcgcctgcaccaggacctggctgttcaggagcggcagagtgcggaggtgcagggcagcctggctctggtgagccgggccctggaggcagcagagcgagccttgcaggctcaggctcaggagctggaggagctgaaccgagagctccgtcagtgcaacctgcagcagttcatccagcagaccggggctgcgctgccaccgcccccacggcctgacaggggccctcctggcactcaggtcggagtggttctggggggaggctgggaggtgaggacctggcccagccccactccaagctgacttcccaacccacagggccctctgcctccagccagagaggagtccctcctgggcgctccctctgagtcccatgctggtgcccagcctaggccccgagggtatgtctgtgccccacctccccctggggcaccgggccctcctgtggctgcagccacctcagcctgtgtcctcccgcagtggcccccatgacgcagaactcctggaggtagcagcagctcctgccccagagtggtgtcctctggcagcccagccccaggctctgtgacagcctagtgagggctgcaagaccatcctgcccggaccacagaaggagagttggcggtcacagagggctcctctgccaggcagtgggaagccctgggtttggcctcaggagctgggggtgcagtgggggactgccctagtccttgccaggtcgccagcaccctggagaagcatggggcgtagccagctcggaacttgccaggccccaaaggccacgactgcctgttggggacaggagatgcatggacagtgtgctcaagctgtgggcatgtgcttgcctgcgggagaggtccttcactgtgtgtacacagcaagagcatgtgtgtgccacttcccctaccccaacgtgaaaacctcaataaactgcccgaagcagctt

SEQ ID NO: 61670 - DNA, 2383 bp, Homo sapiens
cgccgggtccccggtacttgggagcgcggggcgcgcctcgagccggccggacgccgactccaactggggagagttttccgcgatgcccggacggagagcgggggcggcgccgcacctgcgcccgccctgcggaacggggacgccctggctcccgccaggctggggtcgcggcgcgggcttcggtgcccgcggcggggaccgggactttcggggcgagcgcagcgattaggcggcagcggcggggctccccgggctggcgggggctgctcagacccggagtctgctccatctgcagggtcgaggtctgggttgcgaccccgagcgcctctgcggcctgagcaggtcggggtggggcgtcccattgccggcggccgcggggcctggcgtgcgggcgcctccgcgccgcccggggagggggcagtgtcctccgagccaggtgaggcgagtaggaaatgctggatctggttaatgattcgccttgttccgggagtgcgagcgtggcaagaggaagctggtgaagtgggggaggatgcgtgctccggagggccgccaccccaggaatgtgtggctggcgggtggggctggcacaggagggtggggcccgtgcggaggggcggcagcccagccgtttctagggcaggccaagaggatgaggagaggaggaccagcctgcgataggagtaggcaggtcctgacccggtgcctgcgccctccccacagacaggcatgttgttgggactggcggccatggagctgaaggtgtgggtggatggcatccagcgtgtggtctgtggggtctcagagcagaccacctgccaggaagtggtcatcgcactagcccaagcaataggccagactggccgctttgtgcttgtgcagcggcttcgggagaaggagcggcagttgctgccacaagagtgtccagtgggcgcccaggccacctgcggacagtttgccagcgatgtccagtttgtcctgaggcgcacagggcccagcctagctgggaggccctcctcagacagctgtccacccccggaacgctgcctaattcgtgccagcctccctgtaaagccacgggctgcgctgggctgtgagccccgcaaaacactgacccccgagccagcccccagcctctcacgccctgggcctgcggcccctgtgacacccacaccaggctgctgcacagacctgcggggcctggagctcagggtgcagaggaatgctgaggagctgggccatgaggccttctgggagcaagagctgcgccgggagcaggcccgggagcgagagggacaggcacgcctgcaggcactaagtgcggccactgctgagcatgccgcccggctgcaggccctggacgctcaggcccgtgccctggaggctgagctgcagctggcagcggaggcccctgggcccccctcacctatggcatctgccactgagcgcctgcaccaggacctggctgttcaggagcggcagagtgcggaggtgcagggcagcctggctctggtgagccgggccctggaggcagcagagcgagccttgcaggctcaggctcaggagctggaggagctgaaccgagagctccgtcagtgcaacctgcagcagttcatccagcagaccggggctgcgctgccaccgcccccacggcctgacaggggccctcctggcactcaggtcggagtggttctggggggaggctgggaggtgaggacctggcccagccccactccaagctgacttcccaacccacagggccctctgcctccagccagagaggagtccctcctgggcgctccctctgagtcccatgctggtgcccagcctaggccccgagggtatgtctgtgccccacctccccctggggcaccgggccctcctgtggctgcagccacctcagcctgtgtcctcccgcagtggcccccatgacgcagaactcctggaggtagcagcagctcctgccccagagtggtgtcctctggcagcccagccccaggctctgtgacagcctagtgagggctgcaagaccatcctgcccggaccacagaaggagagttggcggtcacagagggctcctctgccaggcagtgggaagccctgggtttggcctcaggagctgggggtgcagtgggggactgccctagtccttgccaggtcgccagcaccctggagaagcatggggcgtagccagctcggaacttgccaggccccaaaggccacgactgcctgttggggacaggagatgcatggacagtgtgctcaagctgtgggcatgtgcttgcctgcgggagaggtccttcactgtgtgtacacagcaagagcatgtgtgtgccacttcccctaccccaacgtgaaaacctcaataaactgcccgaagcagctt

SEQ ID NO: 61671 - DNA, 1487 bp, Homo sapiens
cggcgctgggggcggcaggttgcggcggcgccggagcgggtctccaggctggcgagcgcccaggacaggcatgttgttgggactggcggccatggagctgaaggtgtgggtggatggcatccagcgtgtggtctgtggggtctcagagcagaccacctgccaggaagtggtcatcgcactagcccaagcaataggccagactggccgctttgtgcttgtgcagcggcttcgggagaaggagcggcagttgctgccacaagagtgtccagtgggcgcccaggccacctgcggacagtttgccagcgatgtccagtttgtcctgaggcgcacagggcccagcctagctgggaggccctcctcagacagctgtccacccccggaacgctgcctaattcgtgccagcctccctgtaaagccacgggctgcgctgggctgtgagccccgcaaaacactgacccccgagccagcccccagcctctcacgccctgggcctgcggcccctgtgacacccacaccaggctgctgcacagacctgcggggcctggagctcagggtgcagaggaatgctgaggagctgggccatgaggccttctgggagcaagagctgcgccgggagcaggcccgggagcgagagggacaggcacgcctgcaggcactaagtgcggccactgctgagcatgccgcccggctgcaggccctggacgctcaggcccgtgccctggaggctgagctgcagctggcagcggaggcccctgggcccccctcacctatggcatctgccactgagcgcctgcaccaggacctggctgttcaggagcggcagagtgcggaggtgcagggcagcctggctctggtgagccgggccctggaggcagcagagcgagccttgcaggctcaggctcaggagctggaggagctgaaccgagagctccgtcagtgcaacctgcagcagttcatccagcagaccggggctgcgctgccaccgcccccacggcctgacaggggccctcctggcactcagtggcccccatgacgcagaactcctggaggtagcagcagctcctgccccagagtggtgtcctctggcagcccagccccaggctctgtgacagcctagtgagggctgcaagaccatcctgcccggaccacagaaggagagttggcggtcacagagggctcctctgccaggcagtgggaagccctgggtttggcctcaggagctgggggtgcagtgggggactgccctagtccttgccaggtcgccagcaccctggagaagcatggggcgtagccagctcggaacttgccaggccccaaaggccacgactgcctgttggggacaggagatgcatggacagtgtgctcaagctgtgggcatgtgcttgcctgcgggagaggtccttcactgtgtgtacacagcaagagcatgtgtgtgccacttcccctaccccaacgtgaaaacctcaataaactgcccgaagcagctt

SEQ ID NO: 61672 - DNA, 1286 bp, Homo sapiens
agcgggtggggctgcagttggcaagatggcgccggtgggggtggagaagaagctgctgctaggtcccaacgggcccgcggtggcggccgccggcgacctgaccagtgaggaggaggaaggccagagcctatggtcctccattctgagcgaagtgtccacccgcgccaggtccaagctgccgtccggcaagaacatcctggtcttcggtgaagatggttctggtaaaacaaccctcatgactaaactacaaggagctgagcatggcaaaaaaggaagaggcctagaatatctctacctcagtgtccatgatgaggaccgagatgatcacacgcgctgcaacgtgtggattctggatggagacttgtaccacaaaggcctgctgaaatttgcagtttctgctgaatccttgccagagaccctcgtcatttttgttgcagacatgtctagaccttggactgtgatggaatctctgcagaaatgggctagtgttttacgtgagcacattgataaaatgaaaattccaccagaaaaaatgagggagctggaacggaagtttgtgaaagattttcaagactatatggaacctgaagaaggttgtcaaggttccccacagagaagaggccctctgacctcaggctccgatgaagaaaatgttgccctgcctctgggtgacaatgtgctgactcataacctggggatcccggtgttggtggtgtgcacaaagtgtgatgcggtgagtgtcctggagaaggagcacgattacagggatgagcatttggactttatccagtcacacctgcggaggttctgccttcagtatggagctgccttgatttacacatcagtgaaagaagagaaaaacctcgacttgttgtataagtatattgttcataaaacatacggtttccacttcaccacacctgccttagttgtggaaaaggatgccgtttttatacctgcaggctgggacaatgaaaagaaaatagctattttacatgaaaattttacaaccgtgaagccggaagatgcatatgaagactttattgtgaaacctcccgtgagaaagctggtccacgacaaagagttggcagcagaagatgagcaggtgttcctaatgaagcaacagtcactccttgccaagcaaccagccactcccacgagagcttctgaatctcctgcaagaggaccctctggctctccaaggacccagggtcggggagggccagccagtgtgcctagctcctccccaggcacgtcagtaaaaaagccggacccaaacatcaaaa

SEQ ID NO: 61673 - DNA, 532 bp, Homo sapiens
atggagcaggacctgcgatgttctgatggattatacccacagtgtattttggcacatctgccaaaagctacaaacaacccccaacaactacacactatatcttgtgagaagtgtcctacccaggagtcctgaatgtgatctgagtatgctctaaggcagccccaggaaaagcaattcagtccctctctctttgcctttagacctgcaggctgggacaatgaaaagaaaatagctattttacatgaaaattttacaaccgtgaagccggaagatgcatatgaagactttattgtgaaacctcccgtgagaaagctggtccacgacaaagagttggcagcagaagatgagcaggtgttcctaatgaagcaacagtcactccttgccaagcaaccagccactcccacgagagcttctgaatctcctgcaagaggaccctctggctctccaaggacccagggtcggggagggccagccagtgtgcctagctcctccccaggcacgtcagtaaaaaagccggacccaaacatcaaaa

SEQ ID NO: 61674 - DNA, 773 bp, Homo sapiens
ggtaccctccccgtacgcccataatgcagcaagtgaaggggtgttggccagcttcttcaacagtctgttgagtaaaaagacaggctctcctggaagtcctggtgctggtggggtgcagagcacagccaagaagtcaggtacagaagggccctggagacttgtgactcttgtggttgagtagtgcttcaaggatggagaggcagacacctgccctgcagaccctgcagtgtcctgaatagccaagcaaggaagcaggtcttcatttcctactgagcagtgtgccgtgctttcagtgggattgccttactaccatgcaggtttccttggcacattgagagtgggatttgtgtacatttgggttctcgggaactgggtgtgggtgagttgaggtatagcctaaattacatatgtggccctgttgtagaacctctccagtagaagtcatggtccatggagggtgtaccagtgactttttttttctttttccaaggtggagttttgctcttgttgcccaggctggagtgcaatgacgtgatctcactgcaacctccgcctcccaggttcaagcgattctcctgtctcagcctcccgagtagctgggattacaggcgcgtgccatcatgcccagctaattttttgtatttttagtagagatgtggtttcatcatgttggccaggctggtcttggaattcctgaccccaggtgatccctccatcttggcctcccaaagtgctgggattacaggtgtgagccaccgtctgcggctgacttt

SEQ ID NO: 61675 - DNA, 738 bp, Homo sapiens
ctcggctctaccttgtctgtccaggagctctcagggatttgggttgcctcctgcacagtcaaggagagtgtcactcaggctagtcatagatggcatacctacaggcttgggctgattttagatagttgttcagagcagtcaggcaggcgccagaggcacaagccctgtgagaggtgtgtttggaatcacttggtatccaaatcacatgtcatccctaggagcaaggagaccggttggatttggggctggtctggaatgaagaagcatctctcagcttccgaaggctgcatggctcacggcagtatctcaatcatgccctgcccgtttgcacatttggtcctgttggtagttacctctctggtgactggcaaagtcagcaaggatattggggtggagcaccctggctaagcaccctcttgattatagagctatggagtagaagacagatggagaatgagaggcctgtgagaacaatcagtcagttgccatctttcagagctgctcgagttcaaaagtgtgtcatacagggtattttaccattgctacctttaagggattcaggtgggaaccctaggctgtggcttcacataatggaacttgggtgccatcctaccctgtgatgttgagctggccagcactggtgtaggaacctcaaggactctgtgcttctctggtttggggcctaggataaacacaggccctgcttgccccttggttctaggacacatcttcccatgc

SEQ ID NO: 61676 - DNA, 509 bp, Homo sapiens
cggtgttggtggtgtgcacaaagtgtgatgcggtgagtgtcctggagaaggagcacgattacagggatgagcatttggactttatccagtcacacctgcggaggttctgccttcagtgtatcctttgggcgctgtgtggggcctgggtcacaggctttcttccaaatggggcatcttcaaagagataaagcacctcccaaacccagaatagtgttctgccaaagagaatttgtatatatctttttactaggtttatgttttactgtatcggagttttaggtttattaacttgtgtctacctttgatcactcatttatttgtttgtttgtttgtttgttttaagatggtgtttcaccactttggccaggctagtctcaaattcctgacctcaagtgatcacctacctcagcctccgaaagtgctgggattatagctgttagctactgcgctcggcgtattttttaattttttttctgagacagagtctgctctgtcacccaggctggagt

SEQ ID NO: 61677 - DNA, 4177 bp, Homo sapiens
ctctagaggatctctgctatcatcggcacccggcagaacattcggtcttcggtgaagatggttctggtaaaacaaccctcatgactaaactacaaggagctgagcatggcaaaaaaggaagaggcctagaatatctctacctcagtgtccatgatgaggaccgagatgatcacacgcgctgcaacgtgtggattctggatggagacttgtaccacaaaggcctgctgaaatttgcagtttctgctgaatccttgccagagaccctcgtcatttttgttgcagacatgtctagaccttggactgtgatggaatctctgcagaaatgggctagtgttttacgtgagcacattgataaaatgaaaattccaccagaaaaaatgagggagctggaacggaagtttgtgaaagattttcaagactatatggaacctgaagaaggttgtcaaggttccccacagagaagaggccctctgacctcaggctccgatgaagaaaatgttgccctgcctctgggtgacaatgtgctgactcataacctggggatcccggtgttggtggtgtgcacaaagtgtgatgcggtgagtgtcctggagaaggagcacgattacagggatgagcatttggactttatccagtcacacctgcggaggttctgccttcagtatggagctgccttgatttacacatcagtgaaagaagagaaaaacctcgacttgttgtataagtatattgttcataaaacatacggtttccacttcaccacacctgccttagttgtggaaaaggatgccgtttttatacctgcaggctgggacaatgaaaagaaaatagctattttacatgaaaattttacaaccgtgaagccggaagatgcatatgaagactttattgtgaaacctcccgtgagaaagctggtccacgacaaagagttggcagcagaagatgagcaggtgttcctaatgaagcaacagtcactccttgccaagcaaccagccactcccacgagagcttctgaatctcctgcaagaggaccctctggctctccaaggacccagggtcggggagggccagccagtgtgcctagctcctccccaggcacgtcagtaaaaaagccggacccaaacatcaaaaataatgcagcaagtgaaggggtgttggccagcttcttcaacagtctgttgagtaaaaagacaggctctcctggaagtcctggtgctggtggggtgcagagcacagccaagaagtcaggacaaaagactgtgttgtcaaatgttcaggaagaactggatagaatgactcgaaagccagactctatggtaacaaactcttcaacagaaaatgaagcctgaacctccttaaaaagtgcatatgtcgaatgaccaaataactatgtatattgatctgctaagaccaggatttttctgatatggcacatgctatcagttttttggggcaggggagatgaactttaaaaaaaaaaaaaaaacttcattggcttgtccgagtgtgaaatgcacatttaggaaggttacatgtcagaccctttgttaaggataacccttggactctggggcatgtggctcttttgtgggaggcaagcacatctgggcttcttgtggaggggaaggtagagtgaaagaaagagggcccactttctaacagggtggagcaaatgagaccaagaaatcattggtaagatgatggttagtctgaccagtttcatgttagtaaattcacttgttcttgggaagcagattaagtagcagaaagtccaggaaagaaagaccagaaggagtaatgagacaagtgatggtggggaagctgaatgttgagggaggtggaggaaggaggagatgagcagtgtcagtaaatactgtgcattcagtagaagttgaagaatcattgttagaagcatttccaaacaaaacactaagcaaaatgggaattaggcttattttgaatgcatctttaacttacgaaagatgtactaattgtgggggtgcctgagtcaggcggagctgacccaggggtgggaacgatggcagctgcccaggacccatgtgcttggcccaggctatgtcctcgtgagaggtactggggtccacggatatgtgttgtggggcagacagtcactgtgggatgtcttcaaagtcagcagttacagaattagtttactttgaattttgttgtctaaatagctcctgctttattttttaaattaaattttttgtttttactatcacaggctggcctaactaatacaaaataggtgatgaacctctggttttaccataatgcaatgtgccacggaaagtttgggggaggtttttaatgtaattgcactctggttaattggctcgtaccaagccctgccttatgacttgtggaaagcttcaaggagttccactgatgcaaaagggtcttttcctagcttcctggtctgatcagtgctatgagatggacagataagtgtgaatgttttatacagaaaatggaaatgatacatttctcttgttaggtgttttcataaaatgtagcattttttttcttatggaaataagagtttcaggtgtctccccacctagggcaaattcatgcacattgtcatgttataccaccattctggaaatgatttctgtggatttgaaattgcacttttaattttatatatgacagcatttaaatgcaaacactaccatgaatttaatgtataaaatgttgtcaaaccaagggaaaaaaccacagttcaccatgtggagtttactttttttatatgaatgtttgttgtactgtgtctaagcataacttccctaatgtcattacttttacataccagatttgactgaccactaatgtagtactggggataacttaatatcctatgttgtgtcaagactctttgaagactttcttgaattgctttcgtaaaggtctgaacactgttaaggagaaagctgagtatcaacttgcctttctgatagaaatgtttcttgtgccagttttattgttgagatatactatttttttccttttttaattcagttttttaaaaaaacaaatgtattgtggcttccagttaccaggttgtctaggtaatgacagtaaactgactgtagaatgataattgtggtatagtgaccaatagatgccaaacagcttgtggcctcactaaaggtggggtcgcttagtccccgggagtaaaatgagtgacctcagaaacaagaattcctggaaaggcacatgccgaagaggaatatggtataattttaaattttaatgcaaaattttaatttgtctttattttttatcatttgaactgataagcactttttgtgtcaatataaaatatactaaaactgatgaaatgctaagacatgtcttgtgaaggaaggtttcttggagaccacttttatttactcatgagaagtggaagctcctagtatcagaagaagctgatacatagtgtcatgtgctcagtggttgccaaagtctaccaactttggggagctgcagggttctttttgggaggtgggaggaagggagatgagttttgttattttggggttttcaagcattggaaccaaaggccaaataataaacagcctttagtttttaaagtaaaattcattttatttgcagagtacacttgtatggtagactgttaaagacaattttatgactatttatgcacattataatggttacatctgctttttgtctttaaaataaaaaaaaaaatcagagaaaagcccacctttgaatacgtggctgaagataacagccaagaattggtctttcctaaaaatgcaacagataatgctgctagattgttattttgtttgcacttttttttgattggcattttaaaatcggtatttaaactgaagacattgtcatgttttattaatttaacaaagttgaaagtgactgctctgtacatcatgaccttaacaatgttaatgctgtaagtgaaagttcactgtcgtctgtatactaaatttattggtgtttctaacttaaaagtaagactgcagattatcccccaccagccttagtccaggggtgtggctctgtccgggtgcagtatgcagtcatgtggaaccttgctttctagtcctgggaaaaaaagatgtctctaattactggcttcaataaacacgaatccagactgcttaca

SEQ ID NO: 61678 - DNA, 4094 bp, Homo sapiens
ccgttgggacctagcagcagcttcttctccacccccacccgcgccaggtccaagctgccgtccggcaagaacatcctggtcttcgatcacacgcgctgcaacgtgtggattctggatggagacttgtaccacaaaggcctgctgaaatttgcagtttctgctgaatccttgccagagaccctcgtcatttttgttgcagacatgtctagaccttggactgtgatggaatctctgcagaaatgggctagtgttttacgtgagcacattgataaaatgaaaattccaccagaaaaaatgagggagctggaacggaagtttgtgaaagattttcaagactatatggaacctgaagaaggttgtcaaggttccccacagagaagaggccctctgacctcaggctccgatgaagaaaatgttgccctgcctctgggtgacaatgtgctgactcataacctggggatcccggtgttggtggtgtgcacaaagtgtgatgcggtgagtgtcctggagaaggagcacgattacagggatgagcatttggactttatccagtcacacctgcggaggttctgccttcagtatggagctgccttgatttacacatcagtgaaagaagagaaaaacctcgacttgttgtataagtatattgttcataaaacatacggtttccacttcaccacacctgccttagttgtggaaaaggatgccgtttttatacctgcaggctgggacaatgaaaagaaaatagctattttacatgaaaattttacaaccgtgaagccggaagatgcatatgaagactttattgtgaaacctcccgtgagaaagctggtccacgacaaagagttggcagcagaagatgagcaggtgttcctaatgaagcaacagtcactccttgccaagcaaccagccactcccacgagagcttctgaatctcctgcaagaggaccctctggctctccaaggacccagggtcggggagggccagccagtgtgcctagctcctccccaggcacgtcagtaaaaaagccggacccaaacatcaaaaataatgcagcaagtgaaggggtgttggccagcttcttcaacagtctgttgagtaaaaagacaggctctcctggaagtcctggtgctggtggggtgcagagcacagccaagaagtcaggacaaaagactgtgttgtcaaatgttcaggaagaactggatagaatgactcgaaagccagactctatggtaacaaactcttcaacagaaaatgaagcctgaacctccttaaaaagtgcatatgtcgaatgaccaaataactatgtatattgatctgctaagaccaggatttttctgatatggcacatgctatcagttttttggggcaggggagatgaactttaaaaaaaaaaaaaaaacttcattggcttgtccgagtgtgaaatgcacatttaggaaggttacatgtcagaccctttgttaaggataacccttggactctggggcatgtggctcttttgtgggaggcaagcacatctgggcttcttgtggaggggaaggtagagtgaaagaaagagggcccactttctaacagggtggagcaaatgagaccaagaaatcattggtaagatgatggttagtctgaccagtttcatgttagtaaattcacttgttcttgggaagcagattaagtagcagaaagtccaggaaagaaagaccagaaggagtaatgagacaagtgatggtggggaagctgaatgttgagggaggtggaggaaggaggagatgagcagtgtcagtaaatactgtgcattcagtagaagttgaagaatcattgttagaagcatttccaaacaaaacactaagcaaaatgggaattaggcttattttgaatgcatctttaacttacgaaagatgtactaattgtgggggtgcctgagtcaggcggagctgacccaggggtgggaacgatggcagctgcccaggacccatgtgcttggcccaggctatgtcctcgtgagaggtactggggtccacggatatgtgttgtggggcagacagtcactgtgggatgtcttcaaagtcagcagttacagaattagtttactttgaattttgttgtctaaatagctcctgctttattttttaaattaaattttttgtttttactatcacaggctggcctaactaatacaaaataggtgatgaacctctggttttaccataatgcaatgtgccacggaaagtttgggggaggtttttaatgtaattgcactctggttaattggctcgtaccaagccctgccttatgacttgtggaaagcttcaaggagttccactgatgcaaaagggtcttttcctagcttcctggtctgatcagtgctatgagatggacagataagtgtgaatgttttatacagaaaatggaaatgatacatttctcttgttaggtgttttcataaaatgtagcattttttttcttatggaaataagagtttcaggtgtctccccacctagggcaaattcatgcacattgtcatgttataccaccattctggaaatgatttctgtggatttgaaattgcacttttaattttatatatgacagcatttaaatgcaaacactaccatgaatttaatgtataaaatgttgtcaaaccaagggaaaaaaccacagttcaccatgtggagtttactttttttatatgaatgtttgttgtactgtgtctaagcataacttccctaatgtcattacttttacataccagatttgactgaccactaatgtagtactggggataacttaatatcctatgttgtgtcaagactctttgaagactttcttgaattgctttcgtaaaggtctgaacactgttaaggagaaagctgagtatcaacttgcctttctgatagaaatgtttcttgtgccagttttattgttgagatatactatttttttccttttttaattcagttttttaaaaaaacaaatgtattgtggcttccagttaccaggttgtctaggtaatgacagtaaactgactgtagaatgataattgtggtatagtgaccaatagatgccaaacagcttgtggcctcactaaaggtggggtcgcttagtccccgggagtaaaatgagtgacctcagaaacaagaattcctggaaaggcacatgccgaagaggaatatggtataattttaaattttaatgcaaaattttaatttgtctttattttttatcatttgaactgataagcactttttgtgtcaatataaaatatactaaaactgatgaaatgctaagacatgtcttgtgaaggaaggtttcttggagaccacttttatttactcatgagaagtggaagctcctagtatcagaagaagctgatacatagtgtcatgtgctcagtggttgccaaagtctaccaactttggggagctgcagggttctttttgggaggtgggaggaagggagatgagttttgttattttggggttttcaagcattggaaccaaaggccaaataataaacagcctttagtttttaaagtaaaattcattttatttgcagagtacacttgtatggtagactgttaaagacaattttatgactatttatgcacattataatggttacatctgctttttgtctttaaaataaaaaaaaaaatcagagaaaagcccacctttgaatacgtggctgaagataacagccaagaattggtctttcctaaaaatgcaacagataatgctgctagattgttattttgtttgcacttttttttgattggcattttaaaatcggtatttaaactgaagacattgtcatgttttattaatttaacaaagttgaaagtgactgctctgtacatcatgaccttaacaatgttaatgctgtaagtgaaagttcactgtcgtctgtatactaaatttattggtgtttctaacttaaaagtaagactgcagattatcccccaccagccttagtccaggggtgtggctctgtccgggtgcagtatgcagtcatgtggaaccttgctttctagtcctgggaaaaaaagatgtctctaattactggcttcaataaacacgaatccagactgcttaca

SEQ ID NO: 61679 - DNA, 3683 bp, Homo sapiens
gtatgcctatgtaatactataagcgttttagtttttaaaattgtaatgctttctgttgctcatatattgatcaaaaactgatcaacctatgagtagtactttgaggttgtatgtgttcgattttgtctcctcctgcagtgaattgatttttcttgagcagattgattagatggagctgccttgatttacacatcagtgaaagaagagaaaaacctcgacttgttgtataagtatattgttcataaaacatacggtttccacttcaccacacctgccttagttgtggaaaaggatgccgtttttatacctgcaggctgggacaatgaaaagaaaatagctattttacatgaaaattttacaaccgtgaagccggaagatgcatatgaagactttattgtgaaacctcccgtgagaaagctggtccacgacaaagagttggcagcagaagatgagcaggtgttcctaatgaagcaacagtcactccttgccaagcaaccagccactcccacgagagcttctgaatctcctgcaagaggaccctctggctctccaaggacccagggtcggggagggccagccagtgtgcctagctcctccccaggcacgtcagtaaaaaagccggacccaaacatcaaaaataatgcagcaagtgaaggggtgttggccagcttcttcaacagtctgttgagtaaaaagacaggctctcctggaagtcctggtgctggtggggtgcagagcacagccaagaagtcaggacaaaagactgtgttgtcaaatgttcaggaagaactggatagaatgactcgaaagccagactctatggtaacaaactcttcaacagaaaatgaagcctgaacctccttaaaaagtgcatatgtcgaatgaccaaataactatgtatattgatctgctaagaccaggatttttctgatatggcacatgctatcagttttttggggcaggggagatgaactttaaaaaaaaaaaaaaaacttcattggcttgtccgagtgtgaaatgcacatttaggaaggttacatgtcagaccctttgttaaggataacccttggactctggggcatgtggctcttttgtgggaggcaagcacatctgggcttcttgtggaggggaaggtagagtgaaagaaagagggcccactttctaacagggtggagcaaatgagaccaagaaatcattggtaagatgatggttagtctgaccagtttcatgttagtaaattcacttgttcttgggaagcagattaagtagcagaaagtccaggaaagaaagaccagaaggagtaatgagacaagtgatggtggggaagctgaatgttgagggaggtggaggaaggaggagatgagcagtgtcagtaaatactgtgcattcagtagaagttgaagaatcattgttagaagcatttccaaacaaaacactaagcaaaatgggaattaggcttattttgaatgcatctttaacttacgaaagatgtactaattgtgggggtgcctgagtcaggcggagctgacccaggggtgggaacgatggcagctgcccaggacccatgtgcttggcccaggctatgtcctcgtgagaggtactggggtccacggatatgtgttgtggggcagacagtcactgtgggatgtcttcaaagtcagcagttacagaattagtttactttgaattttgttgtctaaatagctcctgctttattttttaaattaaattttttgtttttactatcacaggctggcctaactaatacaaaataggtgatgaacctctggttttaccataatgcaatgtgccacggaaagtttgggggaggtttttaatgtaattgcactctggttaattggctcgtaccaagccctgccttatgacttgtggaaagcttcaaggagttccactgatgcaaaagggtcttttcctagcttcctggtctgatcagtgctatgagatggacagataagtgtgaatgttttatacagaaaatggaaatgatacatttctcttgttaggtgttttcataaaatgtagcattttttttcttatggaaataagagtttcaggtgtctccccacctagggcaaattcatgcacattgtcatgttataccaccattctggaaatgatttctgtggatttgaaattgcacttttaattttatatatgacagcatttaaatgcaaacactaccatgaatttaatgtataaaatgttgtcaaaccaagggaaaaaaccacagttcaccatgtggagtttactttttttatatgaatgtttgttgtactgtgtctaagcataacttccctaatgtcattacttttacataccagatttgactgaccactaatgtagtactggggataacttaatatcctatgttgtgtcaagactctttgaagactttcttgaattgctttcgtaaaggtctgaacactgttaaggagaaagctgagtatcaacttgcctttctgatagaaatgtttcttgtgccagttttattgttgagatatactatttttttccttttttaattcagttttttaaaaaaacaaatgtattgtggcttccagttaccaggttgtctaggtaatgacagtaaactgactgtagaatgataattgtggtatagtgaccaatagatgccaaacagcttgtggcctcactaaaggtggggtcgcttagtccccgggagtaaaatgagtgacctcagaaacaagaattcctggaaaggcacatgccgaagaggaatatggtataattttaaattttaatgcaaaattttaatttgtctttattttttatcatttgaactgataagcactttttgtgtcaatataaaatatactaaaactgatgaaatgctaagacatgtcttgtgaaggaaggtttcttggagaccacttttatttactcatgagaagtggaagctcctagtatcagaagaagctgatacatagtgtcatgtgctcagtggttgccaaagtctaccaactttggggagctgcagggttctttttgggaggtgggaggaagggagatgagttttgttattttggggttttcaagcattggaaccaaaggccaaataataaacagcctttagtttttaaagtaaaattcattttatttgcagagtacacttgtatggtagactgttaaagacaattttatgactatttatgcacattataatggttacatctgctttttgtctttaaaataaaaaaaaaaatcagagaaaagcccacctttgaatacgtggctgaagataacagccaagaattggtctttcctaaaaatgcaacagataatgctgctagattgttattttgtttgcacttttttttgattggcattttaaaatcggtatttaaactgaagacattgtcatgttttattaatttaacaaagttgaaagtgactgctctgtacatcatgaccttaacaatgttaatgctgtaagtgaaagttcactgtcgtctgtatactaaatttattggtgtttctaacttaaaagtaagactgcagattatcccccaccagccttagtccaggggtgtggctctgtccgggtgcagtatgcagtcatgtggaaccttgctttctagtcctgggaaaaaaagatgtctctaattactggcttcaataaacacgaatccagactgcttaca

SEQ ID NO: 61680 - DNA, 3578 bp, Homo sapiens
atggagcaggacctgcgatgttctgatggattatacccacagtgtattttggcacatctgccaaaagctacaaacaacccccaacaactacacactatatcttgtgagaagtgtcctacccaggagtcctgaatgtgatctgagtatgctctaaggcagccccaggaaaagcaattcagtccctctctctttgcctttagacctgcaggctgggacaatgaaaagaaaatagctattttacatgaaaattttacaaccgtgaagccggaagatgcatatgaagactttattgtgaaacctcccgtgagaaagctggtccacgacaaagagttggcagcagaagatgagcaggtgttcctaatgaagcaacagtcactccttgccaagcaaccagccactcccacgagagcttctgaatctcctgcaagaggaccctctggctctccaaggacccagggtcggggagggccagccagtgtgcctagctcctccccaggcacgtcagtaaaaaagccggacccaaacatcaaaaataatgcagcaagtgaaggggtgttggccagcttcttcaacagtctgttgagtaaaaagacaggctctcctggaagtcctggtgctggtggggtgcagagcacagccaagaagtcaggacaaaagactgtgttgtcaaatgttcaggaagaactggatagaatgactcgaaagccagactctatggtaacaaactcttcaacagaaaatgaagcctgaacctccttaaaaagtgcatatgtcgaatgaccaaataactatgtatattgatctgctaagaccaggatttttctgatatggcacatgctatcagttttttggggcaggggagatgaactttaaaaaaaaaaaaaaaacttcattggcttgtccgagtgtgaaatgcacatttaggaaggttacatgtcagaccctttgttaaggataacccttggactctggggcatgtggctcttttgtgggaggcaagcacatctgggcttcttgtggaggggaaggtagagtgaaagaaagagggcccactttctaacagggtggagcaaatgagaccaagaaatcattggtaagatgatggttagtctgaccagtttcatgttagtaaattcacttgttcttgggaagcagattaagtagcagaaagtccaggaaagaaagaccagaaggagtaatgagacaagtgatggtggggaagctgaatgttgagggaggtggaggaaggaggagatgagcagtgtcagtaaatactgtgcattcagtagaagttgaagaatcattgttagaagcatttccaaacaaaacactaagcaaaatgggaattaggcttattttgaatgcatctttaacttacgaaagatgtactaattgtgggggtgcctgagtcaggcggagctgacccaggggtgggaacgatggcagctgcccaggacccatgtgcttggcccaggctatgtcctcgtgagaggtactggggtccacggatatgtgttgtggggcagacagtcactgtgggatgtcttcaaagtcagcagttacagaattagtttactttgaattttgttgtctaaatagctcctgctttattttttaaattaaattttttgtttttactatcacaggctggcctaactaatacaaaataggtgatgaacctctggttttaccataatgcaatgtgccacggaaagtttgggggaggtttttaatgtaattgcactctggttaattggctcgtaccaagccctgccttatgacttgtggaaagcttcaaggagttccactgatgcaaaagggtcttttcctagcttcctggtctgatcagtgctatgagatggacagataagtgtgaatgttttatacagaaaatggaaatgatacatttctcttgttaggtgttttcataaaatgtagcattttttttcttatggaaataagagtttcaggtgtctccccacctagggcaaattcatgcacattgtcatgttataccaccattctggaaatgatttctgtggatttgaaattgcacttttaattttatatatgacagcatttaaatgcaaacactaccatgaatttaatgtataaaatgttgtcaaaccaagggaaaaaaccacagttcaccatgtggagtttactttttttatatgaatgtttgttgtactgtgtctaagcataacttccctaatgtcattacttttacataccagatttgactgaccactaatgtagtactggggataacttaatatcctatgttgtgtcaagactctttgaagactttcttgaattgctttcgtaaaggtctgaacactgttaaggagaaagctgagtatcaacttgcctttctgatagaaatgtttcttgtgccagttttattgttgagatatactatttttttccttttttaattcagttttttaaaaaaacaaatgtattgtggcttccagttaccaggttgtctaggtaatgacagtaaactgactgtagaatgataattgtggtatagtgaccaatagatgccaaacagcttgtggcctcactaaaggtggggtcgcttagtccccgggagtaaaatgagtgacctcagaaacaagaattcctggaaaggcacatgccgaagaggaatatggtataattttaaattttaatgcaaaattttaatttgtctttattttttatcatttgaactgataagcactttttgtgtcaatataaaatatactaaaactgatgaaatgctaagacatgtcttgtgaaggaaggtttcttggagaccacttttatttactcatgagaagtggaagctcctagtatcagaagaagctgatacatagtgtcatgtgctcagtggttgccaaagtctaccaactttggggagctgcagggttctttttgggaggtgggaggaagggagatgagttttgttattttggggttttcaagcattggaaccaaaggccaaataataaacagcctttagtttttaaagtaaaattcattttatttgcagagtacacttgtatggtagactgttaaagacaattttatgactatttatgcacattataatggttacatctgctttttgtctttaaaataaaaaaaaaaatcagagaaaagcccacctttgaatacgtggctgaagataacagccaagaattggtctttcctaaaaatgcaacagataatgctgctagattgttattttgtttgcacttttttttgattggcattttaaaatcggtatttaaactgaagacattgtcatgttttattaatttaacaaagttgaaagtgactgctctgtacatcatgaccttaacaatgttaatgctgtaagtgaaagttcactgtcgtctgtatactaaatttattggtgtttctaacttaaaagtaagactgcagattatcccccaccagccttagtccaggggtgtggctctgtccgggtgcagtatgcagtcatgtggaaccttgctttctagtcctgggaaaaaaagatgtctctaattactggcttcaataaacacgaatccagactgcttaca

SEQ ID NO: 61681 - DNA, 3096 bp, Homo sapiens
cccactgcatgcagaaacttggaatgtccactgcctgacattcactttccagagaggacctataaaaggggtgttggccagcttcttcaacagtctgttgagtaaaaagacaggctctcctggaagtcctggtgctggtggggtgcagagcacagccaagaagtcaggacaaaagactgtgttgtcaaatgttcaggaagaactggatagaatgactcgaaagccagactctatggtaacaaactcttcaacagaaaatgaagcctgaacctccttaaaaagtgcatatgtcgaatgaccaaataactatgtatattgatctgctaagaccaggatttttctgatatggcacatgctatcagttttttggggcaggggagatgaactttaaaaaaaaaaaaaaaacttcattggcttgtccgagtgtgaaatgcacatttaggaaggttacatgtcagaccctttgttaaggataacccttggactctggggcatgtggctcttttgtgggaggcaagcacatctgggcttcttgtggaggggaaggtagagtgaaagaaagagggcccactttctaacagggtggagcaaatgagaccaagaaatcattggtaagatgatggttagtctgaccagtttcatgttagtaaattcacttgttcttgggaagcagattaagtagcagaaagtccaggaaagaaagaccagaaggagtaatgagacaagtgatggtggggaagctgaatgttgagggaggtggaggaaggaggagatgagcagtgtcagtaaatactgtgcattcagtagaagttgaagaatcattgttagaagcatttccaaacaaaacactaagcaaaatgggaattaggcttattttgaatgcatctttaacttacgaaagatgtactaattgtgggggtgcctgagtcaggcggagctgacccaggggtgggaacgatggcagctgcccaggacccatgtgcttggcccaggctatgtcctcgtgagaggtactggggtccacggatatgtgttgtggggcagacagtcactgtgggatgtcttcaaagtcagcagttacagaattagtttactttgaattttgttgtctaaatagctcctgctttattttttaaattaaattttttgtttttactatcacaggctggcctaactaatacaaaataggtgatgaacctctggttttaccataatgcaatgtgccacggaaagtttgggggaggtttttaatgtaattgcactctggttaattggctcgtaccaagccctgccttatgacttgtggaaagcttcaaggagttccactgatgcaaaagggtcttttcctagcttcctggtctgatcagtgctatgagatggacagataagtgtgaatgttttatacagaaaatggaaatgatacatttctcttgttaggtgttttcataaaatgtagcattttttttcttatggaaataagagtttcaggtgtctccccacctagggcaaattcatgcacattgtcatgttataccaccattctggaaatgatttctgtggatttgaaattgcacttttaattttatatatgacagcatttaaatgcaaacactaccatgaatttaatgtataaaatgttgtcaaaccaagggaaaaaaccacagttcaccatgtggagtttactttttttatatgaatgtttgttgtactgtgtctaagcataacttccctaatgtcattacttttacataccagatttgactgaccactaatgtagtactggggataacttaatatcctatgttgtgtcaagactctttgaagactttcttgaattgctttcgtaaaggtctgaacactgttaaggagaaagctgagtatcaacttgcctttctgatagaaatgtttcttgtgccagttttattgttgagatatactatttttttccttttttaattcagttttttaaaaaaacaaatgtattgtggcttccagttaccaggttgtctaggtaatgacagtaaactgactgtagaatgataattgtggtatagtgaccaatagatgccaaacagcttgtggcctcactaaaggtggggtcgcttagtccccgggagtaaaatgagtgacctcagaaacaagaattcctggaaaggcacatgccgaagaggaatatggtataattttaaattttaatgcaaaattttaatttgtctttattttttatcatttgaactgataagcactttttgtgtcaatataaaatatactaaaactgatgaaatgctaagacatgtcttgtgaaggaaggtttcttggagaccacttttatttactcatgagaagtggaagctcctagtatcagaagaagctgatacatagtgtcatgtgctcagtggttgccaaagtctaccaactttggggagctgcagggttctttttgggaggtgggaggaagggagatgagttttgttattttggggttttcaagcattggaaccaaaggccaaataataaacagcctttagtttttaaagtaaaattcattttatttgcagagtacacttgtatggtagactgttaaagacaattttatgactatttatgcacattataatggttacatctgctttttgtctttaaaataaaaaaaaaaatcagagaaaagcccacctttgaatacgtggctgaagataacagccaagaattggtctttcctaaaaatgcaacagataatgctgctagattgttattttgtttgcacttttttttgattggcattttaaaatcggtatttaaactgaagacattgtcatgttttattaatttaacaaagttgaaagtgactgctctgtacatcatgaccttaacaatgttaatgctgtaagtgaaagttcactgtcgtctgtatactaaatttattggtgtttctaacttaaaagtaagactgcagattatcccccaccagccttagtccaggggtgtggctctgtccgggtgcagtatgcagtcatgtggaaccttgctttctagtcctgggaaaaaaagatgtctctaattactggcttcaataaacacgaatccagactgcttaca

SEQ ID NO: 61682 - DNA, 3192 bp, Homo sapiens
tggcacaaaggcaccccccgccagagagcagtcaagtcactcccttggagttggaggaagcactggcctgtgacttttgggattaggatgtgccgagttggggtctcctcaccactgcagtagaaaagggctttcctcattcttattaaggttactgtcatcaagtgattatagaaggcgtataattttaaatgctcctttaaaaaaaattgtttcctcttctcacatcattactttgcttttttgctttttttttttttcaggacaaaagactgtgttgtcaaatgttcaggaagaactggatagaatgactcgaaagccagactctatggtaacaaactcttcaacagaaaatgaagcctgaacctccttaaaaagtgcatatgtcgaatgaccaaataactatgtatattgatctgctaagaccaggatttttctgatatggcacatgctatcagttttttggggcaggggagatgaactttaaaaaaaaaaaaaaaacttcattggcttgtccgagtgtgaaatgcacatttaggaaggttacatgtcagaccctttgttaaggataacccttggactctggggcatgtggctcttttgtgggaggcaagcacatctgggcttcttgtggaggggaaggtagagtgaaagaaagagggcccactttctaacagggtggagcaaatgagaccaagaaatcattggtaagatgatggttagtctgaccagtttcatgttagtaaattcacttgttcttgggaagcagattaagtagcagaaagtccaggaaagaaagaccagaaggagtaatgagacaagtgatggtggggaagctgaatgttgagggaggtggaggaaggaggagatgagcagtgtcagtaaatactgtgcattcagtagaagttgaagaatcattgttagaagcatttccaaacaaaacactaagcaaaatgggaattaggcttattttgaatgcatctttaacttacgaaagatgtactaattgtgggggtgcctgagtcaggcggagctgacccaggggtgggaacgatggcagctgcccaggacccatgtgcttggcccaggctatgtcctcgtgagaggtactggggtccacggatatgtgttgtggggcagacagtcactgtgggatgtcttcaaagtcagcagttacagaattagtttactttgaattttgttgtctaaatagctcctgctttattttttaaattaaattttttgtttttactatcacaggctggcctaactaatacaaaataggtgatgaacctctggttttaccataatgcaatgtgccacggaaagtttgggggaggtttttaatgtaattgcactctggttaattggctcgtaccaagccctgccttatgacttgtggaaagcttcaaggagttccactgatgcaaaagggtcttttcctagcttcctggtctgatcagtgctatgagatggacagataagtgtgaatgttttatacagaaaatggaaatgatacatttctcttgttaggtgttttcataaaatgtagcattttttttcttatggaaataagagtttcaggtgtctccccacctagggcaaattcatgcacattgtcatgttataccaccattctggaaatgatttctgtggatttgaaattgcacttttaattttatatatgacagcatttaaatgcaaacactaccatgaatttaatgtataaaatgttgtcaaaccaagggaaaaaaccacagttcaccatgtggagtttactttttttatatgaatgtttgttgtactgtgtctaagcataacttccctaatgtcattacttttacataccagatttgactgaccactaatgtagtactggggataacttaatatcctatgttgtgtcaagactctttgaagactttcttgaattgctttcgtaaaggtctgaacactgttaaggagaaagctgagtatcaacttgcctttctgatagaaatgtttcttgtgccagttttattgttgagatatactatttttttccttttttaattcagttttttaaaaaaacaaatgtattgtggcttccagttaccaggttgtctaggtaatgacagtaaactgactgtagaatgataattgtggtatagtgaccaatagatgccaaacagcttgtggcctcactaaaggtggggtcgcttagtccccgggagtaaaatgagtgacctcagaaacaagaattcctggaaaggcacatgccgaagaggaatatggtataattttaaattttaatgcaaaattttaatttgtctttattttttatcatttgaactgataagcactttttgtgtcaatataaaatatactaaaactgatgaaatgctaagacatgtcttgtgaaggaaggtttcttggagaccacttttatttactcatgagaagtggaagctcctagtatcagaagaagctgatacatagtgtcatgtgctcagtggttgccaaagtctaccaactttggggagctgcagggttctttttgggaggtgggaggaagggagatgagttttgttattttggggttttcaagcattggaaccaaaggccaaataataaacagcctttagtttttaaagtaaaattcattttatttgcagagtacacttgtatggtagactgttaaagacaattttatgactatttatgcacattataatggttacatctgctttttgtctttaaaataaaaaaaaaaatcagagaaaagcccacctttgaatacgtggctgaagataacagccaagaattggtctttcctaaaaatgcaacagataatgctgctagattgttattttgtttgcacttttttttgattggcattttaaaatcggtatttaaactgaagacattgtcatgttttattaatttaacaaagttgaaagtgactgctctgtacatcatgaccttaacaatgttaatgctgtaagtgaaagttcactgtcgtctgtatactaaatttattggtgtttctaacttaaaagtaagactgcagattatcccccaccagccttagtccaggggtgtggctctgtccgggtgcagtatgcagtcatgtggaaccttgctttctagtcctgggaaaaaaagatgtctctaattactggcttcaataaacacgaatccagactgcttaca

SEQ ID NO: 61683 - DNA, 2066 bp, Homo sapiens
ggaggtgttctagaggatcccgtctaatagtgtgtgggaagaagttattacagaattagtttactttgaattttgttgtctaaatagctcctgctttattttttaaattaaattttttgtttttactatcacaggctggcctaactaatacaaaataggtgatgaacctctggttttaccataatgcaatgtgccacggaaagtttgggggaggtttttaatgtaattgcactctggttaattggctcgtaccaagccctgccttatgacttgtggaaagcttcaaggagttccactgatgcaaaagggtcttttcctagcttcctggtctgatcagtgctatgagatggacagataagtgtgaatgttttatacagaaaatggaaatgatacatttctcttgttaggtgttttcataaaatgtagcattttttttcttatggaaataagagtttcaggtgtctccccacctagggcaaattcatgcacattgtcatgttataccaccattctggaaatgatttctgtggatttgaaattgcacttttaattttatatatgacagcatttaaatgcaaacactaccatgaatttaatgtataaaatgttgtcaaaccaagggaaaaaaccacagttcaccatgtggagtttactttttttatatgaatgtttgttgtactgtgtctaagcataacttccctaatgtcattacttttacataccagatttgactgaccactaatgtagtactggggataacttaatatcctatgttgtgtcaagactctttgaagactttcttgaattgctttcgtaaaggtctgaacactgttaaggagaaagctgagtatcaacttgcctttctgatagaaatgtttcttgtgccagttttattgttgagatatactatttttttccttttttaattcagttttttaaaaaaacaaatgtattgtggcttccagttaccaggttgtctaggtaatgacagtaaactgactgtagaatgataattgtggtatagtgaccaatagatgccaaacagcttgtggcctcactaaaggtggggtcgcttagtccccgggagtaaaatgagtgacctcagaaacaagaattcctggaaaggcacatgccgaagaggaatatggtataattttaaattttaatgcaaaattttaatttgtctttattttttatcatttgaactgataagcactttttgtgtcaatataaaatatactaaaactgatgaaatgctaagacatgtcttgtgaaggaaggtttcttggagaccacttttatttactcatgagaagtggaagctcctagtatcagaagaagctgatacatagtgtcatgtgctcagtggttgccaaagtctaccaactttggggagctgcagggttctttttgggaggtgggaggaagggagatgagttttgttattttggggttttcaagcattggaaccaaaggccaaataataaacagcctttagtttttaaagtaaaattcattttatttgcagagtacacttgtatggtagactgttaaagacaattttatgactatttatgcacattataatggttacatctgctttttgtctttaaaataaaaaaaaaaatcagagaaaagcccacctttgaatacgtggctgaagataacagccaagaattggtctttcctaaaaatgcaacagataatgctgctagattgttattttgtttgcacttttttttgattggcattttaaaatcggtatttaaactgaagacattgtcatgttttattaatttaacaaagttgaaagtgactgctctgtacatcatgaccttaacaatgttaatgctgtaagtgaaagttcactgtcgtctgtatactaaatttattggtgtttctaacttaaaagtaagactgcagattatcccccaccagccttagtccaggggtgtggctctgtccgggtgcagtatgcagtcatgtggaaccttgctttctagtcctgggaaaaaaagatgtctctaattactggcttcaataaacacgaatccagactgcttaca

SEQ ID NO: 61684 - DNA, 1957 bp, Homo sapiens
cgggtgactctacaggatcttccaggtagacctaactaatacaaaataggtgatgaacctctggttttaccataatgcaatgtgccacggaaagtttgggggaggtttttaatgtaattgcactctggttaattggctcgtaccaagccctgccttatgacttgtggaaagcttcaaggagttccactgatgcaaaagggtcttttcctagcttcctggtctgatcagtgctatgagatggacagataagtgtgaatgttttatacagaaaatggaaatgatacatttctcttgttaggtgttttcataaaatgtagcattttttttcttatggaaataagagtttcaggtgtctccccacctagggcaaattcatgcacattgtcatgttataccaccattctggaaatgatttctgtggatttgaaattgcacttttaattttatatatgacagcatttaaatgcaaacactaccatgaatttaatgtataaaatgttgtcaaaccaagggaaaaaaccacagttcaccatgtggagtttactttttttatatgaatgtttgttgtactgtgtctaagcataacttccctaatgtcattacttttacataccagatttgactgaccactaatgtagtactggggataacttaatatcctatgttgtgtcaagactctttgaagactttcttgaattgctttcgtaaaggtctgaacactgttaaggagaaagctgagtatcaacttgcctttctgatagaaatgtttcttgtgccagttttattgttgagatatactatttttttccttttttaattcagttttttaaaaaaacaaatgtattgtggcttccagttaccaggttgtctaggtaatgacagtaaactgactgtagaatgataattgtggtatagtgaccaatagatgccaaacagcttgtggcctcactaaaggtggggtcgcttagtccccgggagtaaaatgagtgacctcagaaacaagaattcctggaaaggcacatgccgaagaggaatatggtataattttaaattttaatgcaaaattttaatttgtctttattttttatcatttgaactgataagcactttttgtgtcaatataaaatatactaaaactgatgaaatgctaagacatgtcttgtgaaggaaggtttcttggagaccacttttatttactcatgagaagtggaagctcctagtatcagaagaagctgatacatagtgtcatgtgctcagtggttgccaaagtctaccaactttggggagctgcagggttctttttgggaggtgggaggaagggagatgagttttgttattttggggttttcaagcattggaaccaaaggccaaataataaacagcctttagtttttaaagtaaaattcattttatttgcagagtacacttgtatggtagactgttaaagacaattttatgactatttatgcacattataatggttacatctgctttttgtctttaaaataaaaaaaaaaatcagagaaaagcccacctttgaatacgtggctgaagataacagccaagaattggtctttcctaaaaatgcaacagataatgctgctagattgttattttgtttgcacttttttttgattggcattttaaaatcggtatttaaactgaagacattgtcatgttttattaatttaacaaagttgaaagtgactgctctgtacatcatgaccttaacaatgttaatgctgtaagtgaaagttcactgtcgtctgtatactaaatttattggtgtttctaacttaaaagtaagactgcagattatcccccaccagccttagtccaggggtgtggctctgtccgggtgcagtatgcagtcatgtggaaccttgctttctagtcctgggaaaaaaagatgtctctaattactggcttcaataaacacgaatccagactgcttaca

SEQ ID NO: 61685 - DNA, 2741 bp, Homo sapiens
agcgggtggggctgcagttggcaagatggcgccggtgggggtggagaagaagctgctgctaggtcccaacgggcccgcggtggcggccgccggcgacctgaccagtgaggaggaggaaggccagagcctatggtcctccattctgagcgaagtgtccacccgcgccaggtccaagctgccgtccggcaagaacatcctggtcttcggtgaagatggttctggtaaaacaaccctcatgactaaactacaaggagctgagcatggcaaaaaaggaagaggcctagaatatctctacctcagtgtccatgatgaggaccgagatgatcacacgcgctgcaacgtgtggattctggatggagacttgtaccacaaaggcctgctgaaatttgcagtttctgctgaatccttgccagagaccctcgtcatttttgttgcagacatgtctagaccttggactgtgatggaatctctgcagaaatgggctagtgttttacgtgagcacattgataaaatgaaaattccaccagaaaaaatgagggagctggaacggaagtttgtgaaagattttcaagactatatggaacctgaagaaggttgtcaaggttccccacagagaagaggccctctgacctcaggctccgatgaagaaaatgttgccctgcctctgggtgacaatgtgctgactcataacctggggatcccggtgttggtggtgtgcacaaagtgtgatgcggtgagtgtcctggagaaggagcacgattacagggatgagcatttggactttatccagtcacacctgcggaggttctgccttcagtatggagctgccttgatttacacatcagtgaaagaagagaaaaacctcgacttgttgtataagtatattgttcataaaacatacggtttccacttcaccacacctgccttagttgtggaaaaggatgccgtttttatacctgcaggctgggacaatgaaaagaaaatagctattttacatgaaaattttacaaccgtgaagccggaagatgcatatgaagactttattgtgaaacctcccgtgagaaagctggtccacgacaaagagttggcagcagaagatgagcaggtgttcctaatgaagcaacagtcactccttgccaagcaaccagccactcccacgagagcttctgaatctcctgcaagaggaccctctggctctccaaggacccagggtcggggagggccagccagtgtgcctagctcctccccaggcacgtcagtaaaaaagccggacccaaacatcaaaaataatgcagcaagtgaaggggtgttggccagcttcttcaacagtctgttgagtaaaaagacaggctctcctggaagtcctggtgctggtggggtgcagagcacagccaagaagtcaggacaaaagactgtgttgtcaaatgttcaggaagaactggatagaatgactcgaaagccagactctatggtaacaaactcttcaacagaaaatgaagcctgaacctccttaaaaagtgcatatgtcgaatgaccaaataactatgtatattgatctgctaagaccaggatttttctgatatggcacatgctatcagttttttggggcaggggagatgaactttaaaaaaaaaaaaaaaacttcattggcttgtccgagtgtgaaatgcacatttaggaaggttacatgtcagaccctttgttaaggataacccttggactctggggcatgtggctcttttgtgggaggcaagcacatctgggcttcttgtggaggggaaggtagagtgaaagaaagagggcccactttctaacagggtggagcaaatgagaccaagaaatcattggtaagatgatggttagtctgaccagtttcatgttagtaaattcacttgttcttgggaagcagattaagtagcagaaagtccaggaaagaaagaccagaaggagtaatgagacaagtgatggtggggaagctgaatgttgagggaggtggaggaaggaggagatgagcagtgtcagtaaatactgtgcattcagtagaagttgaagaatcattgttagaagcatttccaaacaaaacactaagcaaaatgggaattaggcttattttgaatgcatctttaacttacgaaagatgtactaattgtgggggtgcctgagtcaggcggagctgacccaggggtgggaacgatggcagctgcccaggacccatgtgcttggcccaggctatgtcctcgtgagaggtactggggtccacggatatgtgttgtggggcagacagtcactgtgggatgtcttcaaagtcagcagttacagaattagtttactttgaattttgttgtctaaatagctcctgctttattttttaaattaaattttttgtttttactatcacaggctggcctaactaatacaaaataggtgatgaacctctggttttaccataatgcaatgtgccacggaaagtttgggggaggtttttaatgtaattgcactctggttaattggctcgtaccaagccctgccttatgacttgtggaaagcttcaaggagttccactgatgcaaaagggtcttttcctagcttcctggtctgatcagtgctatgagatggacagataagtgtgaatgttttatacagaaaatggaaatgatacatttctcttgttaggtgttttctgggaaaaaaagatgtctctaattactggcttcaataaacacgaatccagactgcttaca

SEQ ID NO: 61686 - DNA, 2851 bp, Homo sapiens
agcgggtggggctgcagttggcaagatggcgccggtgggggtggagaagaagctgctgctaggtcccaacgggcccgcggtggcggccgccggcgacctgaccagtgaggaggaggaaggccagagcctatggtcctccattctgagcgaagtgtccacccgcgccaggtccaagctgccgtccggcaagaacatcctggtcttcggtgaagatggttctggtaaaacaaccctcatgactaaactacaaggagctgagcatggcaaaaaaggaagaggcctagaatatctctacctcagtgtccatgatgaggaccgagatgatcacacgcgctgcaacgtgtggattctggatggagacttgtaccacaaaggcctgctgaaatttgcagtttctgctgaatccttgccagagaccctcgtcatttttgttgcagacatgtctagaccttggactgtgatggaatctctgcagaaatgggctagtgttttacgtgagcacattgataaaatgaaaattccaccagaaaaaatgagggagctggaacggaagtttgtgaaagattttcaagactatatggaacctgaagaaggttgtcaaggttccccacagagaagaggccctctgacctcaggctccgatgaagaaaatgttgccctgcctctgggtgacaatgtgctgactcataacctggggatcccggtgttggtggtgtgcacaaagtgtgatgcggtgagtgtcctggagaaggagcacgattacagggatgagcatttggactttatccagtcacacctgcggaggttctgccttcagtatggagctgccttgatttacacatcagtgaaagaagagaaaaacctcgacttgttgtataagtatattgttcataaaacatacggtttccacttcaccacacctgccttagttgtggaaaaggatgccgtttttatacctgcaggctgggacaatgaaaagaaaatagctattttacatgaaaattttacaaccgtgaagccggaagatgcatatgaagactttattgtgaaacctcccgtgagaaagctggtccacgacaaagagttggcagcagaagatgagcaggtgttcctaatgaagcaacagtcactccttgccaagcaaccagccactcccacgagagcttctgaatctcctgcaagaggaccctctggctctccaaggacccagggtcggggagggccagccagtgtgcctagctcctccccaggcacgtcagtaaaaaagccggacccaaacatcaaaaataatgcagcaagtgaaggggtgttggccagcttcttcaacagtctgttgagtaaaaagacaggctctcctggaagtcctggtgctggtggggtgcagagcacagccaagaagtcaggacaaaagactgtgttgtcaaatgttcaggaagaactggatagaatgactcgaaagccagactctatggtaacaaactcttcaacagaaaatgaagcctgaacctccttaaaaagtgcatatgtcgaatgaccaaataactatgtatattgatctgctaagaccaggatttttctgatatggcacatgctatcagttttttggggcaggggagatgaactttaaaaaaaaaaaaaaaacttcattggcttgtccgagtgtgaaatgcacatttaggaaggttacatgtcagaccctttgttaaggataacccttggactctggggcatgtggctcttttgtgggaggcaagcacatctgggcttcttgtggaggggaaggtagagtgaaagaaagagggcccactttctaacagggtggagcaaatgagaccaagaaatcattggtaagatgatggttagtctgaccagtttcatgttagtaaattcacttgttcttgggaagcagattaagtagcagaaagtccaggaaagaaagaccagaaggagtaatgagacaagtgatggtggggaagctgaatgttgagggaggtggaggaaggaggagatgagcagtgtcagtaaatactgtgcattcagtagaagttgaagaatcattgttagaagcatttccaaacaaaacactaagcaaaatgggaattaggcttattttgaatgcatctttaacttacgaaagatgtactaattgtgggggtgcctgagtcaggcggagctgacccaggggtgggaacgatggcagctgcccaggacccatgtgcttggcccaggctatgtcctcgtgagaggtactggggtccacggatatgtgttgtggggcagacagtcactgtgggatgtcttcaaagtcagcagttacagaattagtttactttgaattttgttgtctaaatagctcctgctttattttttaaattaaattttttgtttttactatcacaggctggcctaactaatacaaaataggtgatgaacctctggttttaccataatgcaatgtgccacggaaagtttgggggaggtttttaatgtaattgcactctggttaattggctcgtaccaagccctgccttatgacttgtggaaagcttcaaggagttccactgatgcaaaagggtcttttcctagcttcctggcttaggtctacctggccaggtagacctaaccatggggctgtcccaatgcaccctacgtttcttcactgtaatgatcatcccacctggtctgcgtgccttcccagccggtcgtaagcatcatgaagacgaggactgtgatttgtttgcatttctatcccagtgtctagcacagagcaggcatgcagtaggcgctcggttttgtagatcaaattgggggcgctagacagggcccagaaacttgatgtaggtctacctgg

SEQ ID NO: 61687 - DNA, 1171 bp, Homo sapiens
atatactatctgtcgccttcgccgatgcagtcaccgacggcacaccgacatttgtgtggtggatctgcagttaccaggttgtctaggtaatgacagtaaactgactgtagaatgataattgtggtatagtgaccaatagatgccaaacagcttgtggcctcactaaaggtggggtcgcttagtccccgggagtaaaatgagtgacctcagaaacaagaattcctggaaaggcacatgccgaagaggaatatggtataattttaaattttaatgcaaaattttaatttgtctttattttttatcatttgaactgataagcactttttgtgtcaatataaaatatactaaaactgatgaaatgctaagacatgtcttgtgaaggaaggtttcttggagaccacttttatttactcatgagaagtggaagctcctagtatcagaagaagctgatacatagtgtcatgtgctcagtggttgccaaagtctaccaactttggggagctgcagggttctttttgggaggtgggaggaagggagatgagttttgttattttggggttttcaagcattggaaccaaaggccaaataataaacagcctttagtttttaaagtaaaattcattttatttgcagagtacacttgtatggtagactgttaaagacaattttatgactatttatgcacattataatggttacatctgctttttgtctttaaaataaaaaaaaaaatcagagaaaagcccacctttgaatacgtggctgaagataacagccaagaattggtctttcctaaaaatgcaacagataatgctgctagattgttattttgtttgcacttttttttgattggcattttaaaatcggtatttaaactgaagacattgtcatgttttattaatttaacaaagttgaaagtgactgctctgtacatcatgaccttaacaatgttaatgctgtaagtgaaagttcactgtcgtctgtatactaaatttattggtgtttctaacttaaaagtaagactgcagattatcccccaccagccttagtccaggggtgtggctctgtccgggtgcagtatgcagtcatgtggaaccttgctttctagtcctgggaaaaaaagatgtctctaattactggcttcaataaacacgaatccagactgcttaca

SEQ ID NO: 61688 - DNA, 1022 bp, Homo sapiens
  misc_feature (4)..(4): n is a, c, g, or t
  misc_feature (18)..(18): n is a, c, g, or t
  misc_feature (20)..(20): n is a, c, g, or t
tttnaacccctgcctgcncncgactctagaggatccccctttgctgaatacctgacctcagaaacaagaattcctggaaaggcacatgccgaagaggaatatggtataattttaaattttaatgcaaaattttaatttgtctttattttttatcatttgaactgataagcactttttgtgtcaatataaaatatactaaaactgatgaaatgctaagacatgtcttgtgaaggaaggtttcttggagaccacttttatttactcatgagaagtggaagctcctagtatcagaagaagctgatacatagtgtcatgtgctcagtggttgccaaagtctaccaactttggggagctgcagggttctttttgggaggtgggaggaagggagatgagttttgttattttggggttttcaagcattggaaccaaaggccaaataataaacagcctttagtttttaaagtaaaattcattttatttgcagagtacacttgtatggtagactgttaaagacaattttatgactatttatgcacattataatggttacatctgctttttgtctttaaaataaaaaaaaaaatcagagaaaagcccacctttgaatacgtggctgaagataacagccaagaattggtctttcctaaaaatgcaacagataatgctgctagattgttattttgtttgcacttttttttgattggcattttaaaatcggtatttaaactgaagacattgtcatgttttattaatttaacaaagttgaaagtgactgctctgtacatcatgaccttaacaatgttaatgctgtaagtgaaagttcactgtcgtctgtatactaaatttattggtgtttctaacttaaaagtaagactgcagattatcccccaccagccttagtccaggggtgtggctctgtccgggtgcagtatgcagtcatgtggaaccttgctttctagtcctgggaaaaaaagatgtctctaattactggcttcaataaacacgaatccagactgcttaca

SEQ ID NO: 61689 - DNA, 1649 bp, Homo sapiens
agcgggtggggctgcagttggcaagatggcgccggtgggggtggagaagaagctgctgctaggtcccaacgggcccgcggtggcggccgccggcgacctgaccagtgaggaggaggaaggccagagcctatggtcctccattctgagcgaagtgtccacccgcgccaggtccaagctgccgtccggcaagaacatcctggtcttcggtgaagatggttctggtaaaacaaccctcatgactaaactacaaggagctgagcatggcaaaaaaggaagaggcctagaatatctctacctcagtgtccatgatgaggaccgagatgatcacacgcgctgcaacgtgtggattctggatggagacttgtaccacaaaggcctgctgaaatttgcagtttctgctgaatccttgccagagaccctcgtcatttttgttgcagacatgtctagaccttggactgtgatggaatctctgcagaaatgggctagtgttttacgtgagcacattgataaaatgaaaattccaccagaaaaaatgagggagctggaacggaagtttgtgaaagattttcaagactatatggaacctgaagaaggttgtcaaggttccccacagagaagaggccctctgacctcaggctccgatgaagaaaatgttgccctgcctctgggtgacaatgtgctgactcataacctggggatcccggtgttggtggtgtgcacaaagtgtgatgcggtgagtgtcctggagaaggagcacgattacagggatgagcatttggactttatccagtcacacctgcggaggttctgccttcagtatggagctgccttgatttacacatcagtgaaagaagagaaaaacctcgacttgttgtataagtatattgttcataaaacatacggtttccacttcaccacacctgccttagttgtggaaaaggatgccgtttttatacctgcaggctgggacaatgaaaagaaaatagctattttacatgaaaattttacaaccgtgaagccggaagatgcatatgaagactttattgtgaaacctcccgtgagaaagctggtccacgacaaagagttggcagcagaagatgagcaggtgttcctaatgaagcaacagtcactccttgccaagcaaccagccactcccacgagagcttctgaatctcctgcaagaggaccctctggctctccaaggacccagggtcggggagggccagccagtgtgcctagctcctccccaggcacgtcagtaaaaaagccggacccaaacatcaaaaataatgcagcaagtgaaggggtgttggccagcttcttcaacagtctgttgagtaaaaagacaggctctcctggaagtcctggtgctggtggggtgcagagcacagccaagaagtcaggacaaaagactgtgttgtcaaatgttcaggaagaactggatagaatgactcgaaagccagactctatggtaacaaactcttcaacagaaaatgaagcctgaacctccttaaaaagtgcatatgtcgaatgaccaaataactatgtatattgatctgctaagaccaggatttttctgatatggcacatgctatcagttttttggagcgtgacatgatgctccccgctcccccggatcctctaaccag

SEQ ID NO: 61690 - DNA, 2039 bp, Homo sapiens
agcgggtggggctgcagttggcaagatggcgccggtgggggtggagaagaagctgctgctaggtcccaacgggcccgcggtggcggccgccggcgacctgaccagtgaggaggaggaaggccagagcctatggtcctccattctgagcgaagtgtccacccgcgccaggtccaagctgccgtccggcaagaacatcctggtcttcggtgaagatggttctggtaaaacaaccctcatgactaaactacaaggagctgagcatggcaaaaaaggaagaggcctagaatatctctacctcagtgtccatgatgaggaccgagatgatcacacgcgctgcaacgtgtggattctggatggagacttgtaccacaaaggcctgctgaaatttgcagtttctgctgaatccttgccagagaccctcgtcatttttgttgcagacatgtctagaccttggactgtgatggaatctctgcagaaatgggctagtgttttacgtgagcacattgataaaatgaaaattccaccagaaaaaatgagggagctggaacggaagtttgtgaaagattttcaagactatatggaacctgaagaaggttgtcaaggttccccacagagaagaggccctctgacctcaggctccgatgaagaaaatgttgccctgcctctgggtgacaatgtgctgactcataacctggggatcccggtgttggtggtgtgcacaaagtgtgatgcggtgagtgtcctggagaaggagcacgattacagggatgagcatttggactttatccagtcacacctgcggaggttctgccttcagtatggagctgccttgatttacacatcagtgaaagaagagaaaaacctcgacttgttgtataagtatattgttcataaaacatacggtttccacttcaccacacctgccttagttgtggaaaaggatgccgtttttatacctgcaggctgggacaatgaaaagaaaatagctattttacatgaaaattttacaaccgtgaagccggaagatgcatatgaagactttattgtgaaacctcccgtgagaaagctggtccacgacaaagagttggcagcagaagatgagcaggtgttcctaatgaagcaacagtcactccttgccaagcaaccagccactcccacgagagcttctgaatctcctgcaagaggaccctctggctctccaaggacccagggtcggggagggccagccagtgtgcctagctcctccccaggcacgtcagtaaaaaagccggacccaaacatcaaaaataatgcagcaagtgaaggggtgttggccagcttcttcaacagtctgttgagtaaaaagacaggctctcctggaagtcctggtgctggtggggtgcagagcacagccaagaagtcaggtacagaagggccctggagacttgtgactcttgtggttgagtagtgcttcaaggatggagaggcagacacctgccctgcagaccctgcagtgtcctgaatagccaagcaaggaagcaggtcttcatttcctactgagcagtgtgccgtgctttcagtgggattgccttactaccatgcaggtttccttggcacattgagagtgggatttgtgtacatttgggttctcgggaactgggtgtgggtgagttgaggtatagcctaaattacatatgtggccctgttgtagaacctctccagtagaagtcatggtccatggagggtgtaccagtgactttttttttctttttccaaggtggagttttgctcttgttgcccaggctggagtgcaatgacgtgatctcactgcaacctccgcctcccaggttcaagcgattctcctgtctcagcctcccgagtagctgggattacaggcgcgtgccatcatgcccagctaattttttgtatttttagtagagatgtggtttcatcatgttggccaggctggtcttggaattcctgaccccaggtgatccctccatcttggcctcccaaagtgctgggattacaggtgtgagccaccgtctgcggctgacttt

SEQ ID NO: 61691 - DNA, 2588 bp, Homo sapiens
agcgggtggggctgcagttggcaagatggcgccggtgggggtggagaagaagctgctgctaggtcccaacgggcccgcggtggcggccgccggcgacctgaccagtgaggaggaggaaggccagagcctatggtcctccattctgagcgaagtgtccacccgcgccaggtccaagctgccgtccggcaagaacatcctggtcttcggtgaagatggttctggtaaaacaaccctcatgactaaactacaaggagctgagcatggcaaaaaaggaagaggcctagaatatctctacctcagtgtccatgatgaggaccgagatgatcacacgcgctgcaacgtgtggattctggatggagacttgtaccacaaaggcctgctgaaatttgcagtttctgctgaatccttgccagagaccctcgtcatttttgttgcagacatgtctagaccttggactgtgatggaatctctgcagaaatgggctagtgttttacgtgagcacattgataaaatgaaaattccaccagaaaaaatgagggagctggaacggaagtttgtgaaagattttcaagactatatggaacctgaagaaggttgtcaaggttccccacagagaagaggccctctgacctcaggctccgatgaagaaaatgttgccctgcctctgggtgacaatgtgctgactcataacctggggatcccggtgttggtggtgtgcacaaagtgtgatgcggtgagtgtcctggagaaggagcacgattacagggatgagcatttggactttatccagtcacacctgcggaggttctgccttcagtatggagctgccttgatttacacatcagtgaaagaagagaaaaacctcgacttgttgtataagtatattgttcataaaacatacggtttccacttcaccacacctgccttagttgtggaaaaggatgccgtttttatgtgagttattttgagctgatgctttgaaactcttctttttaaagtacatttgctttttacattttaccccttcaaggaaggtgccttctgtctgtgtcttctacagccagctctctcactgcaccttctctctgttcctttccggattatgaggcatctgcctgagggaagtgggtggtgtggtcaggggtgctgcctttcttcctcgagagcaagttgccaaaacctaagccagccatttttggcactcactgtcaactctggtaaaatactggctggggagggaatatagggaattgtgcttgggggatcctgaatgtcttctattaaagcgcctgctttatctgtgtgttggcagggatgactgcaaacatcctctcggcatctctgtcagcatgggctttggctatattaagtgcttactgtgcttctggcatttcacattttgggagccaccgggattgattgtcctcgatagagacttggatacctgttttcctaagctggtgtctttctctcactggagaatcatagtgttgctggatgcataaatatgaagctgtggtctctgacaagacttgtgttagcagattgatgttcaggcttcagtatcctcctgacttaacaaacaattacattattcattcaggaaaccttattcagcacccactaggtgctcaggttctctgcaaaggacacagaaatgaatgatacgtgttccttgcatatggcactgtctagaggggacatacacagctgaagaagggaagggcagtgatggggttatggaggaagtatggcagggaaagcaggagggtgatgctggaagacaaatggtagatcccaggcggactggaaagaattgcaatagggggagccggggagtgcagtctgtgagaggctggaaatgtgaaagccaggagctctcagggatttgggttgcctcctgcacagtcaaggagagtgtcactcaggctagtcatagatggcatacctacaggcttgggctgattttagatagttgttcagagcagtcaggcaggcgccagaggcacaagccctgtgagaggtgtgtttggaatcacttggtatccaaatcacatgtcatccctaggagcaaggagaccggttggatttggggctggtctggaatgaagaagcatctctcagcttccgaaggctgcatggctcacggcagtatctcaatcatgccctgcccgtttgcacatttggtcctgttggtagttacctctctggtgactggcaaagtcagcaaggatattggggtggagcaccctggctaagcaccctcttgattatagagctatggagtagaagacagatggagaatgagaggcctgtgagaacaatcagtcagttgccatctttcagagctgctcgagttcaaaagtgtgtcatacagggtattttaccattgctacctttaagggattcaggtgggaaccctaggctgtggcttcacataatggaacttgggtgccatcctaccctgtgatgttgagctggccagcactggtgtaggaacctcaaggactctgtgcttctctggtttggggcctaggataaacacaggccctgcttgccccttggttctaggacacatcttcccatgc

SEQ ID NO: 61692 - DNA, 1939 bp, Homo sapiens
gtatgcctatgtaatactataagcgttttagtttttaaaattgtaatgctttctgttgctcatatattgatcaaaaactgatcaacctatgagtagtactttgaggttgtatgtgttcgattttgtctcctcctgcagtgaattgatttttcttgagcagattgattagatggagctgccttgatttacacatcagtgaaagaagagaaaaacctcgacttgttgtataagtatattgttcataaaacatacggtttccacttcaccacacctgccttagttgtggaaaaggatgccgtttttatgtgagttattttgagctgatgctttgaaactcttctttttaaagtacatttgctttttacattttaccccttcaaggaaggtgccttctgtctgtgtcttctacagccagctctctcactgcaccttctctctgttcctttccggattatgaggcatctgcctgagggaagtgggtggtgtggtcaggggtgctgcctttcttcctcgagagcaagttgccaaaacctaagccagccatttttggcactcactgtcaactctggtaaaatactggctggggagggaatatagggaattgtgcttgggggatcctgaatgtcttctattaaagcgcctgctttatctgtgtgttggcagggatgactgcaaacatcctctcggcatctctgtcagcatgggctttggctatattaagtgcttactgtgcttctggcatttcacattttgggagccaccgggattgattgtcctcgatagagacttggatacctgttttcctaagctggtgtctttctctcactggagaatcatagtgttgctggatgcataaatatgaagctgtggtctctgacaagacttgtgttagcagattgatgttcaggcttcagtatcctcctgacttaacaaacaattacattattcattcaggaaaccttattcagcacccactaggtgctcaggttctctgcaaaggacacagaaatgaatgatacgtgttccttgcatatggcactgtctagaggggacatacacagctgaagaagggaagggcagtgatggggttatggaggaagtatggcagggaaagcaggagggtgatgctggaagacaaatggtagatcccaggcggactggaaagaattgcaatagggggagccggggagtgcagtctgtgagaggctggaaatgtgaaagccaggagctctcagggatttgggttgcctcctgcacagtcaaggagagtgtcactcaggctagtcatagatggcatacctacaggcttgggctgattttagatagttgttcagagcagtcaggcaggcgccagaggcacaagccctgtgagaggtgtgtttggaatcacttggtatccaaatcacatgtcatccctaggagcaaggagaccggttggatttggggctggtctggaatgaagaagcatctctcagcttccgaaggctgcatggctcacggcagtatctcaatcatgccctgcccgtttgcacatttggtcctgttggtagttacctctctggtgactggcaaagtcagcaaggatattggggtggagcaccctggctaagcaccctcttgattatagagctatggagtagaagacagatggagaatgagaggcctgtgagaacaatcagtcagttgccatctttcagagctgctcgagttcaaaagtgtgtcatacagggtattttaccattgctacctttaagggattcaggtgggaaccctaggctgtggcttcacataatggaacttgggtgccatcctaccctgtgatgttgagctggccagcactggtgtaggaacctcaaggactctgtgcttctctggtttggggcctaggataaacacaggccctgcttgccccttggttctaggacacatcttcccatgc

SEQ ID NO: 61693 - DNA, 1368 bp, Homo sapiens
acacacctgaatgaataatgtaattgtttgttaagtcaggaggatcctgaatgtcttctattaaagcgcctgctttatctgtgtgttggcagggatgactgcaaacatcctctcggcatctctgtcagcatgggctttggctatattaagtgcttactgtgcttctggcatttcacattttgggagccaccgggattgattgtcctcgatagagacttggatacctgttttcctaagctggtgtctttctctcactggagaatcatagtgttgctggatgcataaatatgaagctgtggtctctgacaagacttgtgttagcagattgatgttcaggcttcagtatcctcctgacttaacaaacaattacattattcattcaggaaaccttattcagcacccactaggtgctcaggttctctgcaaaggacacagaaatgaatgatacgtgttccttgcatatggcactgtctagaggggacatacacagctgaagaagggaagggcagtgatggggttatggaggaagtatggcagggaaagcaggagggtgatgctggaagacaaatggtagatcccaggcggactggaaagaattgcaatagggggagccggggagtgcagtctgtgagaggctggaaatgtgaaagccaggagctctcagggatttgggttgcctcctgcacagtcaaggagagtgtcactcaggctagtcatagatggcatacctacaggcttgggctgattttagatagttgttcagagcagtcaggcaggcgccagaggcacaagccctgtgagaggtgtgtttggaatcacttggtatccaaatcacatgtcatccctaggagcaaggagaccggttggatttggggctggtctggaatgaagaagcatctctcagcttccgaaggctgcatggctcacggcagtatctcaatcatgccctgcccgtttgcacatttggtcctgttggtagttacctctctggtgactggcaaagtcagcaaggatattggggtggagcaccctggctaagcaccctcttgattatagagctatggagtagaagacagatggagaatgagaggcctgtgagaacaatcagtcagttgccatctttcagagctgctcgagttcaaaagtgtgtcatacagggtattttaccattgctacctttaagggattcaggtgggaaccctaggctgtggcttcacataatggaacttgggtgccatcctaccctgtgatgttgagctggccagcactggtgtaggaacctcaaggactctgtgcttctctggtttggggcctaggataaacacaggccctgcttgccccttggttctaggacacatcttcccatgc

SEQ ID NO: 61694 - DNA, 396 bp, Homo sapiens
tagaacctgccagacttaaaaatgccagttggctacatgctgcggctggttttgggagaggtctgtgccaggctagaaaaatattactctgcagtctcagtagggatctcccagacctgtgttgaagcctgagcctcggactctcctttcggcatgaagtttgacagtggttaggagtattcttggcctgtggccacaaacatgtatgttgtttcacagctggtccacgacaaagagttggcagcagaagatgagcaggtgttcctaatgaagcaacaggtaagaagaccagtgaggttagaacagaggccttctcatgcatgaaatgccagtccctagggtggggttgggggtgtctgcatgtgggaagtcacaaagagcttgcagtggtagagg

SEQ ID NO: 61695 - DNA, 759 bp, Homo sapiens
  misc_feature (752)..(752): n is a, c, g, or t
agcgggtggggctgcagttggcaagatggcgccggtgggggtggagaagaagctgctgctaggtcccaacgggcccgcggtggcggccgccggcgacctgaccagtgaggaggaggaaggccagagcctatggtcctccattctgagcgaagtgtccacccgcgccaggtccaagctgccgtccggcaagaacatcctggtcttcggtgaagatggttctggtaaaacaaccctcatgactaaactacaaggagctgagcatggcaaaaaaggaagaggcctagaatatctctacctcagtgtccatgatgaggaccgagatgatcacacgcgctgcaacgtgtggattctggatggagacttgtaccacaaaggcctgctgaaatttgcagtttctgctgaatccttgccagagaccctcgtcatttttgttgcagacatgtctagaccttggactgtgatggaatctctgcagaaatgggctagtgttttacgtgagcacattgataaaatgaaaattccaccagaaaaaatgagggagctggaacggaagtttgtgaaagattttcaagactatatggaacctgaagaaggttgtcaaggttccccacagagaagaggccctctgacctcaggctccgatgaagaaaatgttgccctgcctctgggtgacaatgtgctgactcataacctggggatcccggtgttggtggtgtgcacaaagtgtaatccgttaatgtcccggaaaaagngcacaat

SEQ ID NO: 61696 - DNA, 4332 bp, Homo sapiens
agcgggtggggctgcagttggcaagatggcgccggtgggggtggagaagaagctgctgctaggtcccaacgggcccgcggtggcggccgccggcgacctgaccagtgaggaggaggaaggccagagcctatggtcctccattctgagcgaagtgtccacccgcgccaggtccaagctgccgtccggcaagaacatcctggtcttcggtgaagatggttctggtaaaacaaccctcatgactaaactacaaggagctgagcatggcaaaaaaggaagaggcctagaatatctctacctcagtgtccatgatgaggaccgagatgatcacacgcgctgcaacgtgtggattctggatggagacttgtaccacaaaggcctgctgaaatttgcagtttctgctgaatccttgccagagaccctcgtcatttttgttgcagacatgtctagaccttggactgtgatggaatctctgcagaaatgggctagtgttttacgtgagcacattgataaaatgaaaattccaccagaaaaaatgagggagctggaacggaagtttgtgaaagattttcaagactatatggaacctgaagaaggttgtcaaggttccccacagagaagaggccctctgacctcaggctccgatgaagaaaatgttgccctgcctctgggtgacaatgtgctgactcataacctggggatcccggtgttggtggtgtgcacaaagtgtgatgcggtgagtgtcctggagaaggagcacgattacagggatgagcatttggactttatccagtcacacctgcggaggttctgccttcagtatggagctgccttgatttacacatcagtgaaagaagagaaaaacctcgacttgttgtataagtatattgttcataaaacatacggtttccacttcaccacacctgccttagttgtggaaaaggatgccgtttttatacctgcaggctgggacaatgaaaagaaaatagctattttacatgaaaattttacaaccgtgaagccggaagatgcatatgaagactttattgtgaaacctcccgtgagaaagctggtccacgacaaagagttggcagcagaagatgagcaggtgttcctaatgaagcaacagtcactccttgccaagcaaccagccactcccacgagagcttctgaatctcctgcaagaggaccctctggctctccaaggacccagggtcggggagggccagccagtgtgcctagctcctccccaggcacgtcagtaaaaaagccggacccaaacatcaaaaataatgcagcaagtgaaggggtgttggccagcttcttcaacagtctgttgagtaaaaagacaggctctcctggaagtcctggtgctggtggggtgcagagcacagccaagaagtcaggacaaaagactgtgttgtcaaatgttcaggaagaactggatagaatgactcgaaagccagactctatggtaacaaactcttcaacagaaaatgaagcctgaacctccttaaaaagtgcatatgtcgaatgaccaaataactatgtatattgatctgctaagaccaggatttttctgatatggcacatgctatcagttttttggggcaggggagatgaactttaaaaaaaaaaaaaaaacttcattggcttgtccgagtgtgaaatgcacatttaggaaggttacatgtcagaccctttgttaaggataacccttggactctggggcatgtggctcttttgtgggaggcaagcacatctgggcttcttgtggaggggaaggtagagtgaaagaaagagggcccactttctaacagggtggagcaaatgagaccaagaaatcattggtaagatgatggttagtctgaccagtttcatgttagtaaattcacttgttcttgggaagcagattaagtagcagaaagtccaggaaagaaagaccagaaggagtaatgagacaagtgatggtggggaagctgaatgttgagggaggtggaggaaggaggagatgagcagtgtcagtaaatactgtgcattcagtagaagttgaagaatcattgttagaagcatttccaaacaaaacactaagcaaaatgggaattaggcttattttgaatgcatctttaacttacgaaagatgtactaattgtgggggtgcctgagtcaggcggagctgacccaggggtgggaacgatggcagctgcccaggacccatgtgcttggcccaggctatgtcctcgtgagaggtactggggtccacggatatgtgttgtggggcagacagtcactgtgggatgtcttcaaagtcagcagttacagaattagtttactttgaattttgttgtctaaatagctcctgctttattttttaaattaaattttttgtttttactatcacaggctggcctaactaatacaaaataggtgatgaacctctggttttaccataatgcaatgtgccacggaaagtttgggggaggtttttaatgtaattgcactctggttaattggctcgtaccaagccctgccttatgacttgtggaaagcttcaaggagttccactgatgcaaaagggtcttttcctagcttcctggtctgatcagtgctatgagatggacagataagtgtgaatgttttatacagaaaatggaaatgatacatttctcttgttaggtgttttcataaaatgtagcattttttttcttatggaaataagagtttcaggtgtctccccacctagggcaaattcatgcacattgtcatgttataccaccattctggaaatgatttctgtggatttgaaattgcacttttaattttatatatgacagcatttaaatgcaaacactaccatgaatttaatgtataaaatgttgtcaaaccaagggaaaaaaccacagttcaccatgtggagtttactttttttatatgaatgtttgttgtactgtgtctaagcataacttccctaatgtcattacttttacataccagatttgactgaccactaatgtagtactggggataacttaatatcctatgttgtgtcaagactctttgaagactttcttgaattgctttcgtaaaggtctgaacactgttaaggagaaagctgagtatcaacttgcctttctgatagaaatgtttcttgtgccagttttattgttgagatatactatttttttccttttttaattcagttttttaaaaaaacaaatgtattgtggcttccagttaccaggttgtctaggtaatgacagtaaactgactgtagaatgataattgtggtatagtgaccaatagatgccaaacagcttgtggcctcactaaaggtggggtcgcttagtccccgggagtaaaatgagtgacctcagaaacaagaattcctggaaaggcacatgccgaagaggaatatggtataattttaaattttaatgcaaaattttaatttgtctttattttttatcatttgaactgataagcactttttgtgtcaatataaaatatactaaaactgatgaaatgctaagacatgtcttgtgaaggaaggtttcttggagaccacttttatttactcatgagaagtggaagctcctagtatcagaagaagctgatacatagtgtcatgtgctcagtggttgccaaagtctaccaactttggggagctgcagggttctttttgggaggtgggaggaagggagatgagttttgttattttggggttttcaagcattggaaccaaaggccaaataataaacagcctttagtttttaaagtaaaattcattttatttgcagagtacacttgtatggtagactgttaaagacaattttatgactatttatgcacattataatggttacatctgctttttgtctttaaaataaaaaaaaaaatcagagaaaagcccacctttgaatacgtggctgaagataacagccaagaattggtctttcctaaaaatgcaacagataatgctgctagattgttattttgtttgcacttttttttgattggcattttaaaatcggtatttaaactgaagacattgtcatgttttattaatttaacaaagttgaaagtgactgctctgtacatcatgaccttaacaatgttaatgctgtaagtgaaagttcactgtcgtctgtatactaaatttattggtgtttctaacttaaaagtaagactgcagattatcccccaccagccttagtccaggggtgtggctctgtccgggtgcagtatgcagtcatgtggaaccttgctttctagtcctgggaaaaaaagatgtctctaattactggcttcaataaacacgaatccagactgcttaca

SEQ ID NO: 61697 - DNA, 4390 bp, Homo sapiens
agcgggtggggctgcagttggcaagatggcgccggtgggggtggagaagaagctgctgctaggtcccaacgggcccgcggtggcggccgccggcgacctgaccagtgaggaggaggaaggccagagcctatggtcctccattctgagcgaagtgtccacccgcgccaggtccaagctgccgtccggcaagaacatcctggtcttcggtgaagatggttctggtaaaacaaccctcatgactaaactacaaggagctgagcatggcaaaaaaggaagaggcctagaatatctctacctcagtgtccatgatgaggaccgagatgatcacacgcgctgcaacgtgtggattctggatggagacttgtaccacaaaggcctgctgaaatttgcagtttctgctgaatccttgccagagaccctcgtcatttttgttgcagacatgtctagaccttggactgtgatggaatctctgcagaaatgggctagtgttttacgtgagcacattgataaaatgaaaattccaccagaaaaaatgagggagctggaacggaagtttgtgaaagattttcaagactatatggaacctgaagaaggttgtcaaggttccccacagagaagaggccctctgacctcaggctccgatgaagaaaatgttgccctgcctctgggtgacaatgtgctgactcataacctggggatcccggtgttggtggtgtgcacaaagtgtgatgcggtgagtgtcctggagaaggagcacgattacagggatgagcatttggactttatccagtcacacctgcggaggttctgccttcagtatggagctgccttgatttacacatcagtgaaagaagagaaaaacctcgacttgttgtataagtatattgttcataaaacatacggtttccacttcaccacacctgccttagttgtggaaaaggatgccgtttttatacctgcaggctgggacaatgaaaagaaaatagctattttacatgaaaattttacaaccgtgaagccggaagatgcatatgaagactttattgtgaaacctcccgtgagaaagctggtccacgacaaagagttggcagcagaagatgagcaggtgttcctaatgaagcaacagtcactccttgccaagcaaccagccactcccacgagagcttctgaatctcctgcaagaggaccctctggctctccaaggacccagggtcggggagggccagccagtgtgcctagctcctccccaggcacgtcagtaaaaaagccggacccaaacatcaaaaataatgcagcaagtgaaggggtgttggccagcttcttcaacagtctgttgagtaaaaagacaggctctcctggaagtcctggtgctggtggggtgcagagcacagccaagaagtcaggacaaaagactgtgttgtcaaatgttcaggaagaactggatagaatgactcgaaagccagactctatggtaacaaactcttcaacagaaaatgaagcctgaacctccttaaaaagtgcatatgtcgaatgaccaaataactatgtatattgatctgctaagaccaggatttttctgatatggcacatgctatcagttttttggggcaggggagatgaactttaaaaaaaaaaaaaaaacttcattggcttgtccgagtgtgaaatgcacatttaggaaggttacatgtcagaccctttgttaaggataacccttggactctggggcatgtggctcttttgtgggaggcaagcacatctgggcttcttgtggaggggaaggtagagtgaaagaaagagggcccactttctaacagggtggagcaaatgagaccaagaaatcattggtaagatgatggttagtctgaccagtttcatgttagtaaattcacttgttcttgggaagcagattaagtagcagaaagtccaggaaagaaagaccagaaggagtaatgagacaagtgatggtggggaagctgaatgttgagggaggtggaggaaggaggagatgagcagtgtcagtaaatactgtgcattcagtagaagttgaagaatcattgttagaagcatttccaaacaaaacactaagcaaaatgggaattaggcttattttgaatgcatctttaacttacgaaagatgtactaattgtgggggtgcctgagtcaggcggagctgacccaggggtgggaacgatggcagctgcccaggacccatgtgcttggcccaggctatgtcctcgtgagaggtactggggtccacggatatgtgttgtggggcagacagtcactgtgggatgtcttcaaagtcagcagttacagaattagtttactttgaattttgttgtctaaatagctcctgctttattttttaaattaaattttttgtttttactatcacaggctggcctaactaatacaaaataggtgatgaacctctggttttaccataatgcaatgtgccacggaaagtttgggggaggtttttaatgtaattgcactctggttaattggctcgtaccaagccctgccttatgacttgtggaaagcttcaaggagttccactgatgcaaaagggtcttttcctagcttcctggtctgatcagtgctatgagatggacagataagtgtgaatgttttatacagaaaatggaaatgatacatttctcttgttaggtgttttcataaaatgtagcattttttttcttatggaaataagagtttcaggtgtctccccacctagggcaaattcatgcacattgtcatgttataccaccattctggaaatgatttctgtggatttgaaattgcacttttaattttatatatgacagcatttaaatgcaaacactaccatgaatttaatgtataaaatgttgtcaaaccaagggaaaaaaccacagttcaccatgtggagtttactttttttatatgaatgtttgttgtactgtgtctaagcataacttccctaatgtcattacttttacataccagatttgactgaccactaatgtagtactggggataacttaatatcctatgttgtgtcaagactctttgaagactttcttgaattgctttcgtaaaggtctgaacactgttaaggagaaagctgagtatcaacttgcctttctgatagaaatgtttcttgtgccagttttattgttgagatatactatttttttccttttttaattcagttttttaaaaaaacaaatgtattgtggcttccagttaccaggttgtctaggtaatgacagtaaactgactgtagaatgataattgtggtatagtgaccaatagatgccaaacagcttgtggcctcactaaaggtggggtcgcttagtccccgggagtaaaatgagtgacctcagaaacaagaattcctggaaaggcacatgccgaagaggaatatggtataattttaaattttaatgcaaaattttaatttgtctttattttttatcatttgaactgataagcactttttgtgtcaatataaaatatactaaaactgatgaaatgctaagacatgtcttgtgaaggaaggtttcttggagaccacttttatttactcatgagaagtggaagctcctagtatcagaagaagctgatacatagtgtcatgtgctcagtggttgccaaagtctaccaactttggggagctgcagggttctttttgggaggtgggaggaagggagatgagttttgttattttggggttttcaagcattggaaccaaaggccaaataataaacagcctttagtttttaaagtaaaattcattttatttgcagagtacacttgtatggtagactgttaaagacaattttatgactatttatgcacattataatggttacatctgctttttgtctttaaaataaaaaaaaaaatcagagaaaagcccacctttgaatacgtggctgaagataacagccaagaattggtctttcctaaaaatgcaacagataatgctgctagattgttattttgtttgcacttttttttgattggcattttaaaatcggtatttaaactgaagacattgtcatgttttattaatttaacaaagttgaaagtgactgctctgtacatcatgaccttaacaatgttaatgctgtaagtgaaagttcactgtcgtctgtatactaaatttattggtgtttctaacttaaaagtaagactgcagattatcccccaccagccttagtccaggggtgtggctctgtccgggtgcagtatgcagtcatgtggaaccttgctttctagtcctgggaaaaaaagatgtctctaattactggcttcaataaacacgaatccagactgcttacaaaaaacaacaaaaaacaaaaagtcgagcggccgcgaatttagtagtagtaggcgccgc

SEQ ID NO: 61698 - DNA, 4881 bp, Homo sapiens
agcgggtggggctgcagttggcaagatggcgccggtgggggtggagaagaagctgctgctaggtcccaacgggcccgcggtggcggccgccggcgacctgaccagtgaggaggaggaaggccagagcctatggtcctccattctgagcgaagtgtccacccgcgccaggtccaagctgccgtccggcaagaacatcctggtcttcggtgaagatggttctggtaaaacaaccctcatgactaaactacaaggagctgagcatggcaaaaaaggaagaggcctagaatatctctacctcagtgtccatgatgaggaccgagatgatcacacgcgctgcaacgtgtggattctggatggagacttgtaccacaaaggcctgctgaaatttgcagtttctgctgaatccttgccagagaccctcgtcatttttgttgcagacatgtctagaccttggactgtgatggaatctctgcagaaatgggctagtgttttacgtgagcacattgataaaatgaaaattccaccagaaaaaatgagggagctggaacggaagtttgtgaaagattttcaagactatatggaacctgaagaaggttgtcaaggttccccacagagaagaggccctctgacctcaggctccgatgaagaaaatgttgccctgcctctgggtgacaatgtgctgactcataacctggggatcccggtgttggtggtgtgcacaaagtgtgatgcggtgagtgtcctggagaaggagcacgattacagggatgagcatttggactttatccagtcacacctgcggaggttctgccttcagtatggagctgccttgatttacacatcagtgaaagaagagaaaaacctcgacttgttgtataagtatattgttcataaaacatacggtttccacttcaccacacctgccttagttgtggaaaaggatgccgtttttatacctgcaggctgggacaatgaaaagaaaatagctattttacatgaaaattttacaaccgtgaagccggaagatgcatatgaagactttattgtgaaacctcccgtgagaaagctggtccacgacaaagagttggcagcagaagatgagcaggtgttcctaatgaagcaacagtcactccttgccaagcaaccagccactcccacgagagcttctgaatctcctgcaagaggaccctctggctctccaaggacccagggtcggggagggccagccagtgtgcctagctcctccccaggcacgtcagtaaaaaagccggacccaaacatcaaaaataatgcagcaagtgaaggggtgttggccagcttcttcaacagtctgttgagtaaaaagacaggctctcctggaagtcctggtgctggtggggtgcagagcacagccaagaagtcaggacaaaagactgtgttgtcaaatgttcaggaagaactggatagaatgactcgaaagccagactctatggtaacaaactcttcaacagaaaatgaagcctgaacctccttaaaaagtgcatatgtcgaatgaccaaataactatgtatattgatctgctaagaccaggatttttctgatatggcacatgctatcagttttttggggcaggggagatgaactttaaaaaaaaaaaaaaaacttcattggcttgtccgagtgtgaaatgcacatttaggaaggttacatgtcagaccctttgttaaggataacccttggactctggggcatgtggctcttttgtgggaggcaagcacatctgggcttcttgtggaggggaaggtagagtgaaagaaagagggcccactttctaacagggtggagcaaatgagaccaagaaatcattggtaagatgatggttagtctgaccagtttcatgttagtaaattcacttgttcttgggaagcagattaagtagcagaaagtccaggaaagaaagaccagaaggagtaatgagacaagtgatggtggggaagctgaatgttgagggaggtggaggaaggaggagatgagcagtgtcagtaaatactgtgcattcagtagaagttgaagaatcattgttagaagcatttccaaacaaaacactaagcaaaatgggaattaggcttattttgaatgcatctttaacttacgaaagatgtactaattgtgggggtgcctgagtcaggcggagctgacccaggggtgggaacgatggcagctgcccaggacccatgtgcttggcccaggctatgtcctcgtgagaggtactggggtccacggatatgtgttgtggggcagacagtcactgtgggatgtcttcaaagtcagcagttacagaattagtttactttgaattttgttgtctaaatagctcctgctttattttttaaattaaattttttgtttttactatcacaggctggcctaactaatacaaaataggtgatgaacctctggttttaccataatgcaatgtgccacggaaagtttgggggaggtttttaatgtaattgcactctggttaattggctcgtaccaagccctgccttatgacttgtggaaagcttcaaggagttccactgatgcaaaagggtcttttcctagcttcctggtctgatcagtgctatgagatggacagataagtgtgaatgttttatacagaaaatggaaatgatacatttctcttgttaggtgttttcataaaatgtagcattttttttcttatggaaataagagtttcaggtgtctccccacctagggcaaattcatgcacattgtcatgttataccaccattctggaaatgatttctgtggatttgaaattgcacttttaattttatatatgacagcatttaaatgcaaacactaccatgaatttaatgtataaaatgttgtcaaaccaagggaaaaaaccacagttcaccatgtggagtttactttttttatatgaatgtttgttgtactgtgtctaagcataacttccctaatgtcattacttttacataccagatttgactgaccactaatgtagtactggggataacttaatatcctatgttgtgtcaagactctttgaagactttcttgaattgctttcgtaaaggtctgaacactgttaaggagaaagctgagtatcaacttgcctttctgatagaaatgtttcttgtgccagttttattgttgagatatactatttttttccttttttaattcagttttttaaaaaaacaaatgtattgtggcttccagttaccaggttgtctaggtaatgacagtaaactgactgtagaatgataattgtggtatagtgaccaatagatgccaaacagcttgtggcctcactaaaggtggggtcgcttagtccccgggagtaaaatgagtgacctcagaaacaagaattcctggaaaggcacatgccgaagaggaatatggtataattttaaattttaatgcaaaattttaatttgtctttattttttatcatttgaactgataagcactttttgtgtcaatataaaatatactaaaactgatgaaatgctaagacatgtcttgtgaaggaaggtttcttggagaccacttttatttactcatgagaagtggaagctcctagtatcagaagaagctgatacatagtgtcatgtgctcagtggttgccaaagtctaccaactttggggagctgcagggttctttttgggaggtgggaggaagggagatgagttttgttattttggggttttcaagcattggaaccaaaggccaaataataaacagcctttagtttttaaagtaaaattcattttatttgcagagtacacttgtatggtagactgttaaagacaattttatgactatttatgcacattataatggttacatctgctttttgtctttaaaataaaaaaaaaaatcagagaaaagcccacctttgaatacgtggctgaagataacagccaagaattggtctttcctaaaaatgcaacagataatgctgctagattgttattttgtttgcacttttttttgattggcattttaaaatcggtatttaaactgaagacattgtcatgttttattaatttaacaaagttgaaagtgactgctctgtacatcatgaccttaacaatgttaatgctgtaagtgaaagttcactgtcgtctgtatactaaatttattggtgtttctaacttaaaagtaagactgcagattatcccccaccagccttagtccaggggtgtggctctgtccgggtgcagtatgcagtcatgtggaaccttgctttctagtcctgggaaaaaaagatgtctctaattactggcttcaataaacacgaatccagactgcttacaaaaaaaaacaaacaaaacaaaaaaaacaaaaacaaaaaacacacaacacaaaacaaacaaaaaccacacaaacacacacaacaaagaaagtaaaagaaacacaacacacaaaaaaaacgaaagctcacacacaactatactagatccagaaaacaggaaggaggagcagccagaggcggcacaacctacaagaggagaccgaacatcaagcagacacaacgcgcacgagtacacagacaagtgatgagagcttaccgaattgaggccagtacaggaacacgccagggcggataaggcaagacaagaataagaagcggcgcgagagcaggggaacggcaacaggacgaacaaagaaaagagggaagtcagaacgagagagaagaaggaccgaacccggtgatcaagaagcaggcgcaaagccgagcggcgagaccgacagcccgacaagaagaacaagagagaggacaacgagcgccgacagaccaatcacaaacatcaggccgatgtgtgtcgagaacacaaaacaagcagacaggagtaggccgcaag

SEQ ID NO: 61699 - DNA, 3487 bp, Homo sapiens
agcgtgtcctacccagagagctctgaaatgtgatctgacatatgcatctagtgcagtcgccagcactatggcccttcgacgcctctctcttgtggccttagtagcttggctgctgggcggacggtggaggggatccttcatctattttacatgaaaattttacaaccgtgaagccggaagatgcatatgaagactttattgtgaaacctcccgtgagaaagctggtccacgacaaagagttggcagcagaagatgagcaggtgttcctaatgaagcaacagtcactccttgccaagcaaccagccactcccacgagagcttctgaatctcctgcaagaggaccctctggctctccaaggacccagggtcggggagggccagccagtgtgcctagctcctccccaggcacgtcagtaaaaaagccggacccaaacatcaaaaataatgcagcaagtgaaggggtgttggccagcttcttcaacagtctgttgagtaaaaagacaggctctcctggaagtcctggtgctggtggggtgcagagcacagccaagaagtcaggacaaaagactgtgttgtcaaatgttcaggaagaactggatagaatgactcgaaagccagactctatggtaacaaactcttcaacagaaaatgaagcctgaacctccttaaaaagtgcatatgtcgaatgaccaaataactatgtatattgatctgctaagaccaggatttttctgatatggcacatgctatcagttttttggggcaggggagatgaactttaaaaaaaaaaaaaaaacttcattggcttgtccgagtgtgaaatgcacatttaggaaggttacatgtcagaccctttgttaaggataacccttggactctggggcatgtggctcttttgtgggaggcaagcacatctgggcttcttgtggaggggaaggtagagtgaaagaaagagggcccactttctaacagggtggagcaaatgagaccaagaaatcattggtaagatgatggttagtctgaccagtttcatgttagtaaattcacttgttcttgggaagcagattaagtagcagaaagtccaggaaagaaagaccagaaggagtaatgagacaagtgatggtggggaagctgaatgttgagggaggtggaggaaggaggagatgagcagtgtcagtaaatactgtgcattcagtagaagttgaagaatcattgttagaagcatttccaaacaaaacactaagcaaaatgggaattaggcttattttgaatgcatctttaacttacgaaagatgtactaattgtgggggtgcctgagtcaggcggagctgacccaggggtgggaacgatggcagctgcccaggacccatgtgcttggcccaggctatgtcctcgtgagaggtactggggtccacggatatgtgttgtggggcagacagtcactgtgggatgtcttcaaagtcagcagttacagaattagtttactttgaattttgttgtctaaatagctcctgctttattttttaaattaaattttttgtttttactatcacaggctggcctaactaatacaaaataggtgatgaacctctggttttaccataatgcaatgtgccacggaaagtttgggggaggtttttaatgtaattgcactctggttaattggctcgtaccaagccctgccttatgacttgtggaaagcttcaaggagttccactgatgcaaaagggtcttttcctagcttcctggtctgatcagtgctatgagatggacagataagtgtgaatgttttatacagaaaatggaaatgatacatttctcttgttaggtgttttcataaaatgtagcattttttttcttatggaaataagagtttcaggtgtctccccacctagggcaaattcatgcacattgtcatgttataccaccattctggaaatgatttctgtggatttgaaattgcacttttaattttatatatgacagcatttaaatgcaaacactaccatgaatttaatgtataaaatgttgtcaaaccaagggaaaaaaccacagttcaccatgtggagtttactttttttatatgaatgtttgttgtactgtgtctaagcataacttccctaatgtcattacttttacataccagatttgactgaccactaatgtagtactggggataacttaatatcctatgttgtgtcaagactctttgaagactttcttgaattgctttcgtaaaggtctgaacactgttaaggagaaagctgagtatcaacttgcctttctgatagaaatgtttcttgtgccagttttattgttgagatatactatttttttccttttttaattcagttttttaaaaaaacaaatgtattgtggcttccagttaccaggttgtctaggtaatgacagtaaactgactgtagaatgataattgtggtatagtgaccaatagatgccaaacagcttgtggcctcactaaaggtggggtcgcttagtccccgggagtaaaatgagtgacctcagaaacaagaattcctggaaaggcacatgccgaagaggaatatggtataattttaaattttaatgcaaaattttaatttgtctttattttttatcatttgaactgataagcactttttgtgtcaatataaaatatactaaaactgatgaaatgctaagacatgtcttgtgaaggaaggtttcttggagaccacttttatttactcatgagaagtggaagctcctagtatcagaagaagctgatacatagtgtcatgtgctcagtggttgccaaagtctaccaactttggggagctgcagggttctttttgggaggtgggaggaagggagatgagttttgttattttggggttttcaagcattggaaccaaaggccaaataataaacagcctttagtttttaaagtaaaattcattttatttgcagagtacacttgtatggtagactgttaaagacaattttatgactatttatgcacattataatggttacatctgctttttgtctttaaaataaaaaaaaaaatcagagaaaagcccacctttgaatacgtggctgaagataacagccaagaattggtctttcctaaaaatgcaacagataatgctgctagattgttattttgtttgcacttttttttgattggcattttaaaatcggtatttaaactgaagacattgtcatgttttattaatttaacaaagttgaaagtgactgctctgtacatcatgaccttaacaatgttaatgctgtaagtgaaagttcactgtcgtctgtatactaaatttattggtgtttctaacttaaaagtaagactgcagattatcccccaccagccttagtccaggggtgtggctctgtccgggtgcagtatgcagtcatgtggaaccttgctttctagtcctgggaaaaaaagatgtctctaattactggcttcaataaacacgaatccagactgcttaca

SEQ ID NO: 61700 - DNA, 2368 bp, Homo sapiens
agcgggtggggctgcagttggcaagatggcgccggtgggggtggagaagaagctgctgctaggtcccaacgggcccgcggtggcggccgccggcgacctgaccagtgaggaggaggaaggccagagcctatggtcctccattctgagcgaagtgtccacccgcgccaggtccaagctgccgtccggcaagaacatcctggtcttcggtgaagatggttctggtaaaacaaccctcatgactaaactacaaggagctgagcatggcaaaaaaggaagaggcctagaatatctctacctcagtgtccatgatgaggaccgagatgatcacacgcgctgcaacgtgtggattctggatggagacttgtaccacaaaggcctgctgaaatttgcagtttctgctgaatccttgccagagaccctcgtcatttttgttgcagacatgtctagaccttggactgtgatggaatctctgcagaaatgggctagtgttttacgtgagcacattgataaaatgaaaattccaccagaaaaaatgagggagctggaacggaagtttgtgaaagattttcaagactatatggaacctgaagaaggttgtcaaggttccccacagagaagaggccctctgacctcaggctccgatgaagaaaatgttgccctgcctctgggtgacaatgtgctgactcataacctggggatcccggtgttggtggtgtgcacaaagtgtgatgcggtgagtgtcctggagaaggagcacgattacagggatgagcatttggactttatccagtcacacctgcggaggttctgccttcagtatggagctgccttgatttacacatcagtgaaagaagagaaaaacctcgacttgttgtataagtatattgttcataaaacatacggtttccacttcaccacacctgccttagttgtggaaaaggatgccgtttttatacctgcaggctgggacaatgaaaagaaaatagctattttacatgaaaattttacaaccgtgaagccggaagatgcatatgaagactttattgtgaaacctcccgtgagaaagctggtccacgacaaagagttggcagcagaagatgagcaggtgttcctaatgaagcaacagtcactccttgccaagcaaccagccactcccacgagagcttctgaatctcctgcaagaggaccctctggctctccaaggacccagggtcggggagggccagccagtgtgcctagctcctccccaggcacgtcagtaaaaaagccggacccaaacatcaaaaataatgcagcaagtgaaggggtgttggccagcttcttcaacagtctgttgagtaaaaagacaggctctcctggaagtcctggtgctggtggggtgcagagcacagccaagaagtcaggacaaaagactgtgttgtcaaatgttcaggaagaactggatagaatgactcgaaagccagactctatggtaacaaactcttcaacagaaaatgaagcctgaacctccttaaaaagtgcatatgtcgaatgaccaaataactatgtatattgatctgctaagaccaggatttttctgatatggcacatgctatcagttttttggggcaggggagatgaactttaaaaaaaaaaaaaaaacttcattggcttgtccgagtgtgaaatgcacatttaggaaggttacatgtcagaccctttgttaaggataacccttggactctggggcatgtggctcttttgtgggaggcaagcacatctgggcttcttgtggaggggaaggtagagtgaaagaaagagggcccactttctaacagggtggagcaaatgagaccaagaaatcattggtaagatgatggttagtctgaccagtttcatgttagtaaattcacttgttcttgggaagcagattaagtagcagaaagtccaggaaagaaagaccagaaggagtaatgagacaagtgatggtggggaagctgaatgttgagggaggtggaggaaggaggagatgagcagtgtcagtaaatactgtgcattcagtagaagttgaagaatcattgttagaagcatttccaaacaaaacactaagcaaaatgggaattaggcttattttgaatgcatctttaacttacgaaagatgtactaattgtgggggtgcctgagtcaggcggagctgacccaggggtgggaacgatggcagctgcccaggacccatgtgcttggcccaggctatgtcctcgtgagaggtactggggtccacggatatgtgttgtggggcagacagtcactgtgggatgtcttcaaagtcagcagttacagaattagtttactttgaattttgttgtctttgctgtggaaggaccggcat

SEQ ID NO: 61701 - DNA, 1638 bp, Homo sapiens
agcgggtggggctgcagttggcaagatggcgccggtgggggtggagaagaagctgctgctaggtcccaacgggcccgcggtggcggccgccggcgacctgaccagtgaggaggaggaaggccagagcctatggtcctccattctgagcgaagtgtccacccgcgccaggtccaagctgccgtccggcaagaacatcctggtcttcggtgaagatggttctggtaaaacaaccctcatgactaaactacaaggagctgagcatggcaaaaaaggaagaggcctagaatatctctacctcagtgtccatgatgaggaccgagatgatcacacgcgctgcaacgtgtggattctggatggagacttgtaccacaaaggcctgctgaaatttgcagtttctgctgaatccttgccagagaccctcgtcatttttgttgcagacatgtctagaccttggactgtgatggaatctctgcagaaatgggctagtgttttacgtgagcacattgataaaatgaaaattccaccagaaaaaatgagggagctggaacggaagtttgtgaaagattttcaagactatatggaacctgaagaaggttgtcaaggttccccacagagaagaggccctctgacctcaggctccgatgaagaaaatgttgccctgcctctgggtgacaatgtgctgactcataacctggggatcccggtgttggtggtgtgcacaaagtgtgatgcggtgagtgtcctggagaaggagcacgattacagggatgagcatttggactttatccagtcacacctgcggaggttctgccttcagtatggagctgccttgatttacacatcagtgaaagaagagaaaaacctcgacttgttgtataagtatattgttcataaaacatacggtttccacttcaccacacctgccttagttgtggaaaaggatgccgtttttatacctgcaggctgggacaatgaaaagaaaatagctattttacatgaaaattttacaaccgtgaagccggaagatgcatatgaagactttattgtgaaacctcccgtgagaaagctggtccacgacaaagagttggcagcagaagatgagcaggtgttcctaatgaagcaacagtcactccttgccaagcaaccagccactcccacgagagcttctgaatctcctgcaagaggaccctctggctctccaaggacccagggtcggggagggccagccagtgtgcctagctcctccccaggcacgtcagtaaaaaagccggacccaaacatcaaaaataatgcagcaagtgaaggggtgttggccagcttcttcaacagtctgttgagtaaaaagacaggctctcctggaagtcctggtgctggtggggtgcagagcacagccaagaagtcaggacaaaagactgtgttgtcaaatgttcaggaagaactggatagaatgactcgaaagccagactctatggtaacaaactcttcaacagaaaatgaagcctgaaaacatatccagagtcagactctccagcgacacgtcagctgggaaactcagcagggaaagcgggaagtaaaaatagctccgccagccgaccctcggagccttgtcccaggctgggccttgggcttgggtccagg

SEQ ID NO: 61702 - DNA, 1214 bp, Homo sapiens
  misc_feature (1195)..(1195): n is a, c, g, or t
agcgggtggggctgcagttggcaagatggcgccggtgggggtggagaagaagctgctgctaggtcccaacgggcccgcggtggcggccgccggcgacctgaccagtgaggaggaggaaggccagagcctatggtcctccattctgagcgaagtgtccacccgcgccaggtccaagctgccgtccggcaagaacatcctggtcttcggtgaagatggttctggtaaaacaaccctcatgactaaactacaaggagctgagcatggcaaaaaaggaagaggcctagaatatctctacctcagtgtccatgatgaggaccgagatgatcacacgcgctgcaacgtgtggattctggatggagacttgtaccacaaaggcctgctgaaatttgcagtttctgctgaatccttgccagagaccctcgtcatttttgttgcagacatgtctagaccttggactgtgatggaatctctgcagaaatgggctagtgttttacgtgagcacattgataaaatgaaaattccaccagaaaaaatgagggagctggaacggaagtttgtgaaagattttcaagactatatggaacctgaagaaggttgtcaaggttccccacagagaagaggccctctgacctcaggctccgatgaagaaaatgttgccctgcctctgggtgacaatgtgctgactcataacctggggatcccggtgttggtggtgtgcacaaagtgtgatgcggtgagtgtcctggagaaggagcacgattacagggatgagcatttggactttatccagtcacacctgcggaggttctgccttcagtatggagctgccttgatttacacatcagtgaaagaagagaaaaacctcgacttgttgtataagtatattgttcataaaacatacggtttccacttcaccacacctgccttagttgtggaaaaggatgccgtttttatacctgcaggctgggacaatgaaaagaaaatagctattttacatgaaaattttacaaccgtgaagccggaagatgcatatgaagactttattgtgaaacctcccgtgagaaagctggtccacgacaaagagttggcagcagaagatgagcaggtgttcctaatgaagcaacagtcactccttgccaagcaaccagccactcccacgagagcttctgaatctcctgcaagagaccctgggtcnttggagagccaggtcgacg

SEQ ID NO: 61703 - DNA, 623 bp, Homo sapiens
aagaagacacttgcaaagccgctaagacaggaccacacatcttaaactgctgttcctaccatgcactaaactgtttttaagttttaaaccacaccctaggctccaggagtgttcaggaaagatggtgtttgtaggtctccatgctgtttggcgttggggggtgtggagggatcatccgtcgactttctgaattttaatgtattcacttagtaacaaaccatgattgtcttaaatgccttaaattattatgagatttcttgtctcagagcccaatcagattgtcaggaattaacatgtgttaggtttgatcacccttgaccacttcttatagatatttcttcaacaaatcatgtgtgatgcctgtaggaacacaactgtacctttaaaatattgttttcatattgctgtgatggggattcgaggttcctgtatgtgccactgttttcagaatctgtagttttatacaggtgccgaccctcgttgtgatgtatgtgctgtgcacattgacatgctgaccgacaatgataagcgtttatcgtgtataaaaagacaccactggactggatgtacacaactgggaaaggaattaaaagctattaaaattgtgccttgaaatgccaaaa

SEQ ID NO: 61704 - DNA, 406 bp, Homo sapiens
aagaactcaaagagtccaaagttgacttaaaggaaataaagaataataacatttcttgtatacccagagccctaaaaggagttatggtcccactatattctgcagagtttctgtgagtatttaacatgtaagataattcatgtgaaaggcccctgcacatggtggacacttaatattttccaaatcaaatgatatcatttcaaaattggcagctgcagaaggggctgaagaacctaatttcttgcaccccatttcatcctacctgagtgaacatcagttggtccataagaagagagcctaagctcctcccaggtacagttagaaaggggaggtgaaagggtccagctttttcaagacatggtatttgatgttatttaacaggaaggtagaggtcaagcttggcaga

SEQ ID NO: 61705 - DNA, 282 bp, Homo sapiens
gaaaaggctatttgagttcatcggtccttctttctccctgacccacatctgcttcctcaagcaaggcaggacagtctgaaagaactgtatattagcaaggatttataatgtatgagcatttttaaaaagactaaaaatttaccttggatcaaacaagggaaagcgagaaagagaacaatgcaatatgtaattaagaaaaggaatgcctacaggaacaattctgatgattttggcatagcaccaaataattggaggaaaaaaaaagaaaccaagaaatatgca

SEQ ID NO: 61706 - DNA, 856 bp, Homo sapiens
agcgagggcggggaccgctgcgcctacctgcctttccctccatagggacttcccaaaggaaaggagggcgtttaggggctttcacacgcctgatcttaaacacagcgccctgacccctccccaccaaaaacggcaaaatgtcatttttgggggcaaatctaaggttttccctacaattgttcaagctttcacactaaaacatttacctaaaaacgggcagaaattcagccttaaacccacaaatctcacgatggtatagaccctgggcccactcaggtttcctgaaaactaaacagttctggagttaggggtttggagaacgggctattgttaaagaaaaaagtatttagtgacacttgttaaagcacaaaaagagggctttattcaggaccatcgcaacaggtatagggaccactgactgcaatggagacttgcagtagggaaagagatattgggctcaactcctcatacagcatgggcaagtggagatttatagccaaggagcggtgacaggccaagataatgaggcatcacctgggggatggtggagactgaagaacctgatcagatattgaggatgatcagctatcaaggatgggggtttattgctaatctgacttagcaaagttctttgcttaaactggattttacaaagaaagtgtacagaagagcctagcagaagattcagaaacctgactaaagttggccaagcaaaaaaaaaaatctttgtatctgaagggatatgttatcctctggacaaattgagggggactgtgcgttaacaatcttagcagtcctcttcagttgtaccaccatctccactttaataaaaaaaaattttctttcaaatctggcc

SEQ ID NO: 61707 - DNA, 730 bp, Homo sapiens
atactttgtgtagagatgaggtcttgccctgttgcctaagctggtctcaaactcctggactcaagctgtctgcccacctcagcctcccaaagtgtttggattacaggcttgaggcactacacccgatccccataaccatttcttttgctgctgtttaatctgctatgaatcctatccagtgaattttcattttggattttgtgggtttttttccccctggaaattatgtttgggtatatatatatatattttgtttttctcctcattatgttcatgtattcctcttaaccagcccctctcaactggttttgcagaacattgagccctgaattaacacacaacagatacggcattagggcccaatttgcatctggaaaatttgcattgtacgtttgcatctagaatgcacagccatgtaccatccttgggaaaataaagaaaatagttcctcaaataactttctgtggggctcaattctcttacagaactgtgattgagaaagactgctttgaatatttgaatgtagttataatagctgttttgagtctttgctgattctattgcttgtataatttttggatttgtttctactgactgatttttctctagttataggtcacattttttttgttttttcacatgccaagtaagttttggttggatgaaggacattgtgtattttatgttgttgggtatctagattttgttggcgtctttgttgggtttcgtt

SEQ ID NO: 61708 - DNA, 411 bp, Homo sapiens
gtaactttacatttttcataaagcatcagtaaatacatattccatcttaaaaagaaattttctttggctagcctcatttttatctgtactaaagatgtttgtattaatgaaatgcagtcttaaagtgaagaaccccatttctattctttttcacttaaccttctgccttacttgtgatggataccaaatatatttaggcaaggaatacttatatttttgaattattgcaaattctcaatgccatggtgctactagtatatataaaatatgcttgctgtattgaaaagcattcctaaaattcaaagctacttggaatataaaatatgatataacactaaatgaatcaccaatattttgaaagctgtcactttttaatgcctaactttactaataaacataataatagataag

SEQ ID NO: 61709 - DNA, 328 bp, Homo sapiens
ccatccattttctgaatgaagagagggaggagggggtgggaccctcgaattttttaatgctcccaaaataactgagtgaggaacttctggcccatttcacagaagagggagaaaaaaaaaaagactcagacaagtaagggaatagatgttgggtgaaaagggaagtgtgttctcgggccttggctaccagggccaaattttaagcatggatcagggcgatttcactttgtgccttagaggtggtggacctgcgtggctgcagaagtggtgaggagcttgttgcacagatgctagaccccagggccagccccagccctgctcatccact

SEQ ID NO: 61710 - DNA, 510 bp, Homo sapiens
gcctaaggcagagttataaactgcatgcctgagcatgtaaggcctgtggccctcacacacatacacagagcccctcagtaaagtataagaaactcatttggtacaggcatttaaggaattggtataaagtatggttctctgacccacaatggaatgaaattataaataacaaaaggaaatgttgggaattcacagataggtggaaattatacaatatacttctaaataaccaaagaatcaaagaagatacttcaaaggagagtagaaaatattttgagatgaatgaaaatgaaaacagcatatccaaacttatgagaggcagctatagcaatgcttacagggaaatttataactataaacatttatattatttaatagaaaataagaaatctcaaatcaataacctaaccttacattttaggaaagtagaaaaagaagagaaaactaaacctaaagcaagcagaataaaataaataacagagattggaggggaaataaatgagataatag

SEQ ID NO: 61711 - DNA, 366 bp, Homo sapiens
ttccatttttgctccttctcaggataatagcagaccggtgatcacaactttagttttgatgagataacctccttatctcctaaaaatggtctctattattttccaagagaagaccagtaaacactaaacacctgccttgatctcagtgtcttagatgttttcctgtttctcctttatcctagcaaactccccaggttgctattcttattcccattttatagatgggcaactgggtaagagaggtaagcttggtgaggtcactgagatagtggggaaaggagcttggttcacatcaggtatgcattcccccaaggttccactggggcatctgaagaagggtttctggaagtgcaaatataggtactg

SEQ ID NO: 61712 - DNA, 312 bp, Homo sapiens
atgggcttccactgaaatggaagaaaagacaacagacaagtgtatgtaatttagaggaaaaagaggcatgtgctgtaaagatattatcagtaccctcagcacttgatcagcaggtctccatatgaccaaattcagaataatccagatataaacttgtctgattctgggaattcatatatatttaagataacacttcactctaatttggaaagttttgactgactcctagaatcgatgtgttgcggatgttttaaaaagcctttggttttggacccatcagctagtctcttcccttccccatcatactgtctg

SEQ ID NO: 61713 - DNA, 434 bp, Homo sapiens
cttgctgtgggacgaggatctcacatgtcctcagtgaacttgttctgatgcaggcagatgagcagctcttaatctgcctgaactctcaagtccccatttttttttctaaacaacagcaacagaagccaatttagcaataacccgcggcactggggctgcacataagttttgtccccaaatcctacttctgaaagtttattttgcgatatgacctcactagttacacagaacctgaacatgtcctcagcagcactgcatgtgatagttagaaaggacatgtaaaatattcttaaatatgatatgtattagataaattatacaactgctaaaaaagaatgaggcagaaaatgtgttggacacagaaaagctaacagtaagtgaaaaaggtgagctgtagcatgttgtatatgatatcgtatgtaatatatgtgttg

SEQ ID NO: 61714 - DNA, 814 bp, Homo sapiens
tacatacacttacgtagtcaactttgaattttttacatattaatgaattatttatcccaaactgcctgccctctgccaccagccagctttcatattagacattataatattgctctcaatccatgaagtgggaattttttttcatatttcattaaatgtagagataatgtctactttacagtagagagaaaagtctattttacagagaaaaatgctttccaaagtcaagtgtcagtaatacttggatgaccactgcagtatgtttttcctctgacattgctaaccttatatcacttctgttggctaatagcatagcacccttaggcactcagtaaatcattattaatgacatgctcttgagtttaagagtccattttttaggaataggaggaagagcaaagtgccttggcaacctttgacttcaaatgccttttacatggctgatatcttacctcttttaaaaaaaaaaaaaaaaaagttcttgctctaaccacaaacctttaatttctggctattatagtgttttattgctctcctagctatttacttaatggtaacagtagtaataatggctatcttttaatggtaatgggagcgcttagtttttgaccacttactgagtgctaagctctgttgttgagctcttcactgacactattttatcctcactatactgtgcaaagtaggtactattatcccatttaacatatgggaaactgaacttttgagtggtaaaataacttggtgacagtcacacagccagcaagaagttaagtctggatttcagagactaggcccttaacccgttacattt

SEQ ID NO: 61715 - DNA, 226 bp, Homo sapiens
cacacatcacagtcgtaacattcacacgcattcacacgcacgcattcacactcacattcacacacatctacacactcacacacacacacacacacacacacacacacacacacacacacacacacactcttgatcccttgcttccctcccccagtgcgttctgtgatcgccaagttcaaagctgtgcacatgtggacactcaataaatgttcattggtgacgagaa

SEQ ID NO: 61716 - DNA, 3676 bp, Homo sapiens
gggaagggcaatgccggccgcgagaccaagggggaggaggggcagtgctgggcgggtaaaactacgcacaagcgaaggaatctgggcccccagcctctcgccgcccgctctccagaggcagtctgcaccttgcctccttcgctcgagccccagcccccagactcgggcaatacccacaagcaagatggcggcaacggcggcaccccctactgcttagcaccctgacttgccattggccagagcccggagtgaagcagccgcggattcgtcaagagcggtgcgggggtgggggtggagctgcagcagcctggagccaggagtgggcaacgcggcgtgagcagcggcccgaggctcccggagcatcgcgctgggagaagacttcgccgctcggggccgcagcctgttgggcaaggcgagcatcatggcctcggattgcgagccagctctgaaccaggcagagggccgaaaccccaccctggagcgctacctgggagccctccgtgaggccaagaatgacagcgagcagtttgcagccctgctgctagtgaccaaggcagtcaaagcaggtgacatagatgccaaaactcggcggcggatcttcgatgctgtcggcttcaccttccccaatcgtctcctgaccaccaaggaggcgccggatggctgccctgaccatgttctgcgggctttgggtgtggccctgctggcctgcttctgcagtgaccctgaactggccgcccatccccaagtcctgaacaagattcccattcttagcaccttcctcacagcccggggggacccggacgatgctgcccgccgctccatgattgatgacacctaccagtgcctgacggctgtagcaggcacacccagagggcctcggcacctcattgctggtggcaccgtgtctgccctatgccaggcatacctggggcacggctatggctttgaccaggccctggcactcctggtggggctgctggctgctgccgagacacagtgctggaaggaggcggagcccgacctgctggccgtgttgcggggcctcagtgaggatttccagaaagctgaggatgccagcaagtttgagctctgccagctgctgcccctctttttgcccccgacaaccgtgccccctgaatgctaccgggatctgcaggccgggctggcacgcatcctgggaagcaagctgagctcctggcagcgcaaccctgcactgaagctggcagcccgcctggcacacgcctgcggctccgactggatcccggcgggcagctccgggagcaagttcctggccctgctggtgaatctggcgtgcgtggaagtgcggctggcactggaggagacgggcacggaggtgaaagaggatgtggtgaccgcctgctatgccctcatggagttggggatccaggaatgcactcgctgtgagcagtcactgcttaaggagccacagaaggtgcagctcgtgagcgtcatgaaggaggccataggggctgttatccactacctgctgcaggtggggtcagagaagcagaaggagccctttgtgtttgcctcggtgcggatcctgggtgcctggctggccgaggagacctcatccttgcgtaaggaggtgtgccagctgctgcccttcctcgtccgctatgccaagaccctctacgaggaggccgaggaggccaatgacctttcccagcaggtggccaacctggccatctcccccaccaccccagggcccacctggccaggagacgctctccggctcctcctgcctggctggtgccacctgaccgttgaagatgggccccgggagatcctgatcaaggaaggggccccctcgcttctgtgcaagtatttcctgcagcagtgggaactcacatcccctggccacgacacctcggtgctgcctgacagcgtggagattggcctgcagacctgctgccacatcttcctcaacctcgtggtcaccgcaccggggctgatcaagcgtgacgcctgcttcacatctctaatgaacaccctcatgacgtcgctaccagcactagtgcagcaacagggaaggctgcttctggctgctaatgtggccaccctggggctcctcatggcccggctccttagcacctctccagctcttcagggaacaccagcatcccgagggttcttcgcagctgccatcctcttcctatcacagtcccacgtggcgcgggccaccccgggctcagaccaggcagtgctagccctgtcccctgagtatgagggcatctgggccgacctgcaggagctctggttcctgggcatgcaggccttcaccggctgtgtgcctctgctgccctggctggcccccgctgccctgcgctcccgctggccgcaggagctgctccagctgctaggcagtgtcagccccaactctgtcaagcccgagatggtggccgcctatcagggtgtcctggtggagctggcgcgggccaaccggctgtgccgggaggccatgaggctgcaggcgggcgaggagacggccagccactaccgcatggctgccttggagcagtgcctgtcagagccctgaggggtgtccaccggggacagacccaggggcgggcagagagggaaggagggaggaggcatcttccctgaagcccccaatctggcccccccctccccagacttcctccccaaaacaccccagctttctggcttttctgagggcaagggcatggtgcccacccctcaagtgtaaggaactgcgttccgcccctcaggcccccatgggggcagggatcggcttggaaatcaacgtggttgtccccgccaggccggggaaggttggagcagcccccagggaggggggcactaggtgtcattgtgcccgatgtctggctcccctgcaggagggaggctccagggtaagacagggctggcaggagcagactgcctcagcccatgtgccctgccggccagggcgtgggctcccctcggctgtggtgcctcctctggccccccaggtccacgtcctttaaattggccctttggctcttgcccttggctcccttgggcagacagcaggcttaggccattgatatcgcagttcttcctatcagcttcagtgacccagggtctgaactgcctccatcctagggcaacctggggcagacaggcctggtggggggtggggaaacctccttccacctgagcttgcttgaagggacccagagtctttgggcccagatctttaaacctttgtgtcgtgttgcagcagagtgacgatgggggttggggggttatttattttgcctgtccttatccctgcttggacacctgagcatctgattcctgtccccctggtgccatctggcctggctggagccaggaacaggagggacacttccccagaatccgcatgtttccccagtgattacactccactgccaccgtggtgcctggctttaactcccacccctgctatgactcctctctgcagagacgcgactggcggctccagcagggactacctttcttataaacccagggggaccacacacacacacacacacacacacacacacacacacacacacacacacactcttgatcccttgcttccctcccccagtgcgttctgtgatcgccaagttcaaagctgtgcacatgtggacactcaataaatgttcattggtgacgagaa

SEQ ID NO: 61717 - DNA, 3378 bp, Homo sapiens
aattccgggtcgaccccctcgtgcggaaatgcggcgtgagcagcggcccgaggctcccggagcatcgcgctgggagaagacttcgccgctcggggccgcagcctgttgggcaaggcgagcatcatggcctcggattgcgagccagctctgaaccaggcagagggccgaaaccccaccctggagcgctacctgggagccctccgtgaggccaagaatgacagcgagcagtttgcagccctgctgctagtgaccaaggcagtcaaagcaggtgacatagatgccaaaactcggcggcggatcttcgatgctgtcggcttcaccttccccaatcgtctcctgaccaccaaggaggcgccggatggctgccctgaccatgttctgcgggctttgggtgtggccctgctggcctgcttctgcagtgaccctgaactggccgcccatccccaagtcctgaacaagattcccattcttagcaccttcctcacagcccggggggacccggacgatgctgcccgccgctccatgattgatgacacctaccagtgcctgacggctgtagcaggcacacccagagggcctcggcacctcattgctggtggcaccgtgtctgccctatgccaggcatacctggggcacggctatggctttgaccaggccctggcactcctggtggggctgctggctgctgccgagacacagtgctggaaggaggcggagcccgacctgctggccgtgttgcggggcctcagtgaggatttccagaaagctgaggatgccagcaagtttgagctctgccagctgctgcccctctttttgcccccgacaaccgtgccccctgaatgctaccgggatctgcaggccgggctggcacgcatcctgggaagcaagctgagctcctggcagcgcaaccctgcactgaagctggcagcccgcctggcacacgcctgcggctccgactggatcccggcgggcagctccgggagcaagttcctggccctgctggtgaatctggcgtgcgtggaagtgcggctggcactggaggagacgggcacggaggtgaaagaggatgtggtgaccgcctgctatgccctcatggagttggggatccaggaatgcactcgctgtgagcagtcactgcttaaggagccacagaaggtgcagctcgtgagcgtcatgaaggaggccataggggctgttatccactacctgctgcaggtggggtcagagaagcagaaggagccctttgtgtttgcctcggtgcggatcctgggtgcctggctggccgaggagacctcatccttgcgtaaggaggtgtgccagctgctgcccttcctcgtccgctatgccaagaccctctacgaggaggccgaggaggccaatgacctttcccagcaggtggccaacctggccatctcccccaccaccccagggcccacctggccaggagacgctctccggctcctcctgcctggctggtgccacctgaccgttgaagatgggccccgggagatcctgatcaaggaaggggccccctcgcttctgtgcaagtatttcctgcagcagtgggaactcacatcccctggccacgacacctcggtgctgcctgacagcgtggagattggcctgcagacctgctgccacatcttcctcaacctcgtggtcaccgcaccggggctgatcaagcgtgacgcctgcttcacatctctaatgaacaccctcatgacgtcgctaccagcactagtgcagcaacagggaaggctgcttctggctgctaatgtggccaccctggggctcctcatggcccggctccttagcacctctccagctcttcagggaacaccagcatcccgagggttcttcgcagctgccatcctcttcctatcacagtcccacgtggcgcgggccaccccgggctcagaccaggcagtgctagccctgtcccctgagtatgagggcatctgggccgacctgcaggagctctggttcctgggcatgcaggccttcaccggctgtgtgcctctgctgccctggctggcccccgctgccctgcgctcccgctggccgcaggagctgctccagctgctaggcagtgtcagccccaactctgtcaagcccgagatggtggccgcctatcagggtgtcctggtggagctggcgcgggccaaccggctgtgccgggaggccatgaggctgcaggcgggcgaggagacggccagccactaccgcatggctgccttggagcagtgcctgtcagagccctgaggggtgtccaccggggacagacccaggggcgggcagagagggaaggagggaggaggcatcttccctgaagcccccaatctggcccccccctccccagacttcctccccaaaacaccccagctttctggcttttctgagggcaagggcatggtgcccacccctcaagtgtaaggaactgcgttccgcccctcaggcccccatgggggcagggatcggcttggaaatcaacgtggttgtccccgccaggccggggaaggttggagcagcccccagggaggggggcactaggtgtcattgtgcccgatgtctggctcccctgcaggagggaggctccagggtaagacagggctggcaggagcagactgcctcagcccatgtgccctgccggccagggcgtgggctcccctcggctgtggtgcctcctctggccccccaggtccacgtcctttaaattggccctttggctcttgcccttggctcccttgggcagacagcaggcttaggccattgatatcgcagttcttcctatcagcttcagtgacccagggtctgaactgcctccatcctagggcaacctggggcagacaggcctggtggggggtggggaaacctccttccacctgagcttgcttgaagggacccagagtctttgggcccagatctttaaacctttgtgtcgtgttgcagcagagtgacgatgggggttggggggttatttattttgcctgtccttatccctgcttggacacctgagcatctgattcctgtccccctggtgccatctggcctggctggagccaggaacaggagggacacttccccagaatccgcatgtttccccagtgattacactccactgccaccgtggtgcctggctttaactcccacccctgctatgactcctctctgcagagacgcgactggcggctccagcagggactacctttcttataaacccagggggaccacacacacacacacacacacacacacacacacacacacacacacacacactcttgatcccttgcttccctcccccagtgcgttctgtgatcgccaagttcaaagctgtgcacatgtggacactcaataaatgttcattggtgacgagaa

SEQ ID NO: 61718 - DNA, 3446 bp, Homo sapiens
aattccgggtcgaccccctcgtgcggaaatgcggcgtgagcagcggcccgaggctcccggagcatcgcgctgggagaagacttcgccgctcggggccgcagcctgtgtgatctcatcgccgccctgtcgtgacttcatcaatgtcgtgttgtgacctggctgcggcgggacagttgggcaaggcgagcatcatggcctcggattgcgagccagctctgaaccaggcagagggccgaaaccccaccctggagcgctacctgggagccctccgtgaggccaagaatgacagcgagcagtttgcagccctgctgctagtgaccaaggcagtcaaagcaggtgacatagatgccaaaactcggcggcggatcttcgatgctgtcggcttcaccttccccaatcgtctcctgaccaccaaggaggcgccggatggctgccctgaccatgttctgcgggctttgggtgtggccctgctggcctgcttctgcagtgaccctgaactggccgcccatccccaagtcctgaacaagattcccattcttagcaccttcctcacagcccggggggacccggacgatgctgcccgccgctccatgattgatgacacctaccagtgcctgacggctgtagcaggcacacccagagggcctcggcacctcattgctggtggcaccgtgtctgccctatgccaggcatacctggggcacggctatggctttgaccaggccctggcactcctggtggggctgctggctgctgccgagacacagtgctggaaggaggcggagcccgacctgctggccgtgttgcggggcctcagtgaggatttccagaaagctgaggatgccagcaagtttgagctctgccagctgctgcccctctttttgcccccgacaaccgtgccccctgaatgctaccgggatctgcaggccgggctggcacgcatcctgggaagcaagctgagctcctggcagcgcaaccctgcactgaagctggcagcccgcctggcacacgcctgcggctccgactggatcccggcgggcagctccgggagcaagttcctggccctgctggtgaatctggcgtgcgtggaagtgcggctggcactggaggagacgggcacggaggtgaaagaggatgtggtgaccgcctgctatgccctcatggagttggggatccaggaatgcactcgctgtgagcagtcactgcttaaggagccacagaaggtgcagctcgtgagcgtcatgaaggaggccataggggctgttatccactacctgctgcaggtggggtcagagaagcagaaggagccctttgtgtttgcctcggtgcggatcctgggtgcctggctggccgaggagacctcatccttgcgtaaggaggtgtgccagctgctgcccttcctcgtccgctatgccaagaccctctacgaggaggccgaggaggccaatgacctttcccagcaggtggccaacctggccatctcccccaccaccccagggcccacctggccaggagacgctctccggctcctcctgcctggctggtgccacctgaccgttgaagatgggccccgggagatcctgatcaaggaaggggccccctcgcttctgtgcaagtatttcctgcagcagtgggaactcacatcccctggccacgacacctcggtgctgcctgacagcgtggagattggcctgcagacctgctgccacatcttcctcaacctcgtggtcaccgcaccggggctgatcaagcgtgacgcctgcttcacatctctaatgaacaccctcatgacgtcgctaccagcactagtgcagcaacagggaaggctgcttctggctgctaatgtggccaccctggggctcctcatggcccggctccttagcacctctccagctcttcagggaacaccagcatcccgagggttcttcgcagctgccatcctcttcctatcacagtcccacgtggcgcgggccaccccgggctcagaccaggcagtgctagccctgtcccctgagtatgagggcatctgggccgacctgcaggagctctggttcctgggcatgcaggccttcaccggctgtgtgcctctgctgccctggctggcccccgctgccctgcgctcccgctggccgcaggagctgctccagctgctaggcagtgtcagccccaactctgtcaagcccgagatggtggccgcctatcagggtgtcctggtggagctggcgcgggccaaccggctgtgccgggaggccatgaggctgcaggcgggcgaggagacggccagccactaccgcatggctgccttggagcagtgcctgtcagagccctgaggggtgtccaccggggacagacccaggggcgggcagagagggaaggagggaggaggcatcttccctgaagcccccaatctggcccccccctccccagacttcctccccaaaacaccccagctttctggcttttctgagggcaagggcatggtgcccacccctcaagtgtaaggaactgcgttccgcccctcaggcccccatgggggcagggatcggcttggaaatcaacgtggttgtccccgccaggccggggaaggttggagcagcccccagggaggggggcactaggtgtcattgtgcccgatgtctggctcccctgcaggagggaggctccagggtaagacagggctggcaggagcagactgcctcagcccatgtgccctgccggccagggcgtgggctcccctcggctgtggtgcctcctctggccccccaggtccacgtcctttaaattggccctttggctcttgcccttggctcccttgggcagacagcaggcttaggccattgatatcgcagttcttcctatcagcttcagtgacccagggtctgaactgcctccatcctagggcaacctggggcagacaggcctggtggggggtggggaaacctccttccacctgagcttgcttgaagggacccagagtctttgggcccagatctttaaacctttgtgtcgtgttgcagcagagtgacgatgggggttggggggttatttattttgcctgtccttatccctgcttggacacctgagcatctgattcctgtccccctggtgccatctggcctggctggagccaggaacaggagggacacttccccagaatccgcatgtttccccagtgattacactccactgccaccgtggtgcctggctttaactcccacccctgctatgactcctctctgcagagacgcgactggcggctccagcagggactacctttcttataaacccagggggaccacacacacacacacacacacacacacacacacacacacacacacacacactcttgatcccttgcttccctcccccagtgcgttctgtgatcgccaagttcaaagctgtgcacatgtggacactcaataaatgttcattggtgacgagaa

SEQ ID NO: 61719 - DNA, 3997 bp, Homo sapiens
  misc_feature (3786)..(3786): n is a, c, g, or t
gggaagggcaatgccggccgcgagaccaagggggaggaggggcagtgctgggcgggtaaaactacgcacaagcgaaggaatctgggcccccagcctctcgccgcccgctctccagaggcagtctgcaccttgcctccttcgctcgagccccagcccccagactcgggcaatacccacaagcaagatggcggcaacggcggcaccccctactgcttagcaccctgacttgccattggccagagcccggagtgaagcagccgcggattcgtcaagagcggtgcgggggtgggggtggagctgcagcagcctggagccaggagtgggcaacgcggcgtgagcagcggcccgaggctcccggagcatcgcgctgggagaagacttcgccgctcggggccgcagcctgttgggcaaggcgagcatcatggcctcggattgcgagccagctctgaaccaggcagagggccgaaaccccaccctggagcgctacctgggagccctccgtgaggccaagaatgacagcgagcagtttgcagccctgctgctagtgaccaaggcagtcaaagcaggtgacatagatgccaaaactcggcggcggatcttcgatgctgtcggcttcaccttccccaatcgtctcctgaccaccaaggaggcgccggatggctgccctgaccatgttctgcgggctttgggtgtggccctgctggcctgcttctgcagtgaccctgaactggccgcccatccccaagtcctgaacaagattcccattcttagcaccttcctcacagcccggggggacccggacgatgctgcccgccgctccatgattgatgacacctaccagtgcctgacggctgtagcaggcacacccagagggcctcggcacctcattgctggtggcaccgtgtctgccctatgccaggcatacctggggcacggctatggctttgaccaggccctggcactcctggtggggctgctggctgctgccgagacacagtgctggaaggaggcggagcccgacctgctggccgtgttgcggggcctcagtgaggatttccagaaagctgaggatgccagcaagtttgagctctgccagctgctgcccctctttttgcccccgacaaccgtgccccctgaatgctaccgggatctgcaggccgggctggcacgcatcctgggaagcaagctgagctcctggcagcgcaaccctgcactgaagctggcagcccgcctggcacacgcctgcggctccgactggatcccggcgggcagctccgggagcaagttcctggccctgctggtgaatctggcgtgcgtggaagtgcggctggcactggaggagacgggcacggaggtgaaagaggatgtggtgaccgcctgctatgccctcatggagttggggatccaggaatgcactcgctgtgagcagtcactgcttaaggagccacagaaggtgcagctcgtgagcgtcatgaaggaggccataggggctgttatccactacctgctgcaggtggggtcagagaagcagaaggagccctttgtgtttgcctcggtgcggatcctgggtgcctggctggccgaggagacctcatccttgcgtaaggaggtgtgccagctgctgcccttcctcgtccgctatgccaagaccctctacgaggaggccgaggaggccaatgacctttcccagcaggtggccaacctggccatctcccccaccaccccagggcccacctggccaggagacgctctccggctcctcctgcctggctggtgccacctgaccgttgaagatgggccccgggagatcctgatcaaggaaggggccccctcgcttctgtgcaagtatttcctgcagcagtgggaactcacatcccctggccacgacacctcggtgctgcctgacagcgtggagattggcctgcagacctgctgccacatcttcctcaacctcgtggtcaccgcaccggggctgatcaagcgtgacgcctgcttcacatctctaatgaacaccctcatgacgtcgctaccagcactagtgcagcaacagggaaggctgcttctggctgctaatgtggccaccctggggctcctcatggcccggctccttagcacctctccagctcttcagggaacaccagcatcccgagggttcttcgcagctgccatcctcttcctatcacagtcccacgtggcgcgggccaccccgggctcagaccaggcagtgctagccctgtcccctgagtatgagggcatctgggccgacctgcaggagctctggttcctgggcatgcaggccttcaccggctgtgtgcctctgctgccctggctggcccccgctgccctgcgctcccgctggccgcaggagctgctccagctgctaggcagtgtcagccccaactctgtcaagcccgagatggtggccgcctatcagggtgtcctggtggagctggcgcgggccaaccggctgtgccgggaggccatgaggctgcaggcgggcgaggagacggccagccactaccgcatggctgccttggagcagtgcctgtcagagccctgaggggtgtccaccggggacagacccaggggcgggcagagagggaaggagggaggaggcatcttccctgaagcccccaatctggcccccccctccccagacttcctccccaaaacaccccagctttctggcttttctgagggcaagggcatggtgcccacccctcaagtgtaaggaactgcgttccgcccctcaggcccccatgggggcagggatcggcttggaaatcaacgtggttgtccccgccaggccggggaaggttggagcagcccccagggaggggggcactaggtgtcattgtgcccgatgtctggctcccctgcaggagggaggctccagggtaagacagggctggcaggagcagactgcctcagcccatgtgccctgccggccagggcgtgggctcccctcggctgtggtgcctcctctggccccccaggtccacgtcctttaaattggccctttggctcttgcccttggctcccttgggcagacagcaggcttaggccattgatatcgcagttcttcctatcagcttcagtgacccagggtctgaactgcctccatcctagggcaacctggggcagacaggcctggtggggggtggggaaacctccttccacctgagcttgcttgaagggacccagagtctttgggcccagatctttaaacctttgtgtcgtgttgcagcagagtgacgatgggggttggggggttatttattttgcctgtccttatccctgcttggacacctgagcatctgattcctgtccccctggtgccatctggcctggctggagccaggaacaggagggacacttccccagaatccgcatgtttccccagtgattacactccactgccaccgtggtgcctggctttaactcccacccctgctatgactcctctctgcagagacgcgactggcggctccagcagggactacctttcttataaacccagggggaccacacacacacacacacacacacacacacacacacacacacacacacacactcttgatcccttgcttccctcccccagtgcgttctgtgatcgccaagttcaaagctgtgcacatgtggacactcaataaatgttcattggtgacgagaaaaaaaaaaaaaaaaaaaaaaaaaaaaaaaaaaaaaaaaaaaaaaaaaaaaaaaaaaaaaaaaaaaaaaaaaaaaaaaagaaaaaaaaaaaacacaaaaaaacatataaanaaaaatataaaaatataatgaaaaaaattttttgggggggggcccggtacccaacttgccttatccgaggtgaattccccatccaccgggcccgctttccacaactggcggcttggaaaaccggggctgcccaaacttttatccctctagacgaaaaccccttttgcccaatgggcaaatttgccagagggccccccccgaaaaacttttc

SEQ ID NO: 61720 - DNA, 3552 bp, Homo sapiens
gggaagggcaatgccggccgcgagaccaagggggaggaggggcagtgctgggcgggtaaaactacgcacaagcgaaggaatctgggcccccagcctctcgccgcccgctctccagaggcagtctgcaccttgcctccttcgctcgagccccagcccccagactcgggcaatacccacaagcaagatggcggcaacggcggcaccccctactgcttagcaccctgacttgccattggccagagcccggagtgaagcagccgcggattcgtcaagagcggtgcgggggtgggggtggagctgcagcagcctggagccaggagtgggcaacgcggcgtgagcagcggcccgaggctcccggagcatcgcgctgggagaagacttcgccgctcggggccgcagcctgttgggcaaggcgagcatcatggcctcggattgcgagccagctctgaaccaggcagagggccgaaaccccaccctggagcgctacctgggagccctccgtgaggccaagaatgacagcgagcagtttgcagccctgctgctagtgaccaaggcagtcaaagcaggtgacatagatgccaaaactcggcggcggatcttcgatgctgtcggcttcaccttccccaatcgtctcctgaccaccaaggaggcgccggatggctgccctgaccatgttctgcgggctttgggtgtggccctgctggcctgcttctgcagtgaccctgaactggccgcccatccccaagtcctgaacaagattcccattcttagcaccttcctcacagcccggggggacccggacgatgctgcccgccgctccatgattgatgacacctaccagtgcctgacggctgtagcaggcacacccagagggcctcggcacctcattgctggtggcaccgtgtctgccctatgccaggcatacctggggcacggctatggctttgaccaggccctggcactcctggtggggctgctggctgctgccgagacacagtgctggaaggaggcggagcccgacctgctggccgtgttgcggggcctcagtgaggatttccagaaagctgaggatgccagcaagtttgagctctgccagctgctgcccctctttttgcccccgacaaccgtgccccctgaatgctaccgggatctgcaggccgggctggcacgcatcctgggaagcaagctgagctcctggcagcgcaaccctgcactgaagctggcagcccgcctggcacacgcctgcggctccgactggatcccggcgggcagctccgggagcaagttcctggccctgctggtgaatctggcgtgcgtggaagtgcggctggcactggaggagacgggcacggaggtgaaagaggatgtggtgaccgcctgctatgccctcatggagttggggatccaggaatgcactcgctgtgagcagtcactgcttaaggagccacagaaggtgcagctcgtgagcgtcatgaaggaggccataggggctgttatccactacctgctgcaggtggggtcagagaagcagaaggagccctttgtgtttgcctcggtgcggatcctgggtgcctggctggccgaggagacctcatccttgcgtaaggaggtgtgccagctgctgcccttcctcgtccgctatgccaagaccctctacgaggaggccgaggaggccaatgacctttcccagcaggtggccaacctggccatctcccccaccaccccagggcccacctggccaggagacgctctccggctcctcctgcctggctggtgccacctgaccgttgaagatgggccccgggagatcctgatcaaggaaggggccccctcgcttctgtgcaagtatttcctgcagcagtgggaactcacatcccctggccacgacacctcggtgctgcctgacagcgtggagattggcctgcagacctgctgccacatcttcctcaacctcgtggtcaccgcaccggggctgatcaagcgtgacgcctgcttcacatctctaatgaacaccctcatgacgtcgctaccagcactagtgcagcaacagggaaggctgcttctggctgctaatgtggccaccctggggctcctcatggcccggctccttagcacctctccagctcttcagggaacaccagcatcccgagggttcttcgcagctgccatcctcttcctatcacagtcccacgtggcgcgggccaccccgggctcagaccaggcagtgctagccctgtcccctgagtatgagggcatctgggccgacctgcaggagctctggttcctgggcatgcaggccttcaccggctgtgtgcctctgctgccctggctggcccccgctgccctgcgctcccgctggccgcaggagctgctccagctgctaggcagtgtcagccccaactctgtcaagcccgagatggtggccgcctatcagggtgtcctggtggagctggcgcgggccaaccggctgtgccgggaggccatgaggctgcaggcgggcgaggagacggccagccactaccgcatggctgccttggagcagtgcctgtcagagccctgaggggtgtccaccggggacagacccaggggcgggcagagagggaaggagggaggaggcatcttccctgaagcccccaatctggcccccccctccccagacttcctccccaaaacaccccagctttctggcttttctgagggcaagggcatggtgcccacccctcaagtgtaaggaactgcgttccgcccctcaggcccccatgggggcagggatcggcttggaaatcaacgtggttgtccccgccaggccggggaaggttggagcagcccccagggaggggggcactaggtgtcattgtgcccgatgtctggctcccctgcaggagggaggctccagggtaagacagggctggcaggagcagactgcctcagcccatgtgccctgccggccagggcgtgggctcccctcggctgtggtgcctcctctggccccccaggtccacgtcctttaaattggccctttggctcttgcccttggctcccttgggcagacagcaggcttaggccattgatatcgcagttcttcctatcagcttcagtgacccagggtctgaactgcctccatcctagggcaacctggggcagacaggcctggtggggggtggggaaacctccttccacctgagcttgcttgaagggacccagagtctttgggcccagatctttaaacctttgtgtcgtgttgcagcagagtgacgatgggggttggggggttatttattttgcctgtccttatccctgcttggacacctgagcatctgattcctctgctatgactcctctctgcagagacgcgactggcggctccagcagggactacctttcttataaacccagggggaccacacacacacacacacacacacacacacacacacacacacacacacacactcttgatcccttgcttccctcccccagtgcgttctgtgatcgccaagttcaaagctgtgcacatgtggacactcaataaatgttcattggtgacgagaa

SEQ ID NO: 61721 - DNA, 3979 bp, Homo sapiens
aattccgggtcgaccccctcgtgcggaaatgcggcgtgagcagcggcccgaggctcccggagcatcgcgctgggagaagacttcgccgctcggggccgcagcctggtgagctcagcccccttcgggccctcccctgcatcccagccggggcctctccgagccggcgctgatcgatgccgacacaccccggggaccctatcgcgactccatcgcgccatatcgcgacaccatcgtgccctgtcgagactccattttgtcacagcccttttcaatatatatcttttttttttttaatttgccctgtcatctttgggggctgtctcccatgtcgtgattttgacgtgatctctccgtgacatcaccgcgccatcgtgaagtgtgatctcatcgccgccctgtcgtgacttcatcaatgtcgtgttgtgacctggctgcggcgggacaggtggtgaccgccaggaaccctcctccccttctcatctccccatctcagcagccctgcttcgattatccggcttttggattctccgttgtcctgggaactatccgggaccccctcttgcttctccagcccctgccggcatccacaggctggtagcgggacggggagggcgagaagagggagcgcaaggggttaattctgctgctgccgccgccgctgctgctgctgctgcagcctctacccgagggagggaaaggagaggagttgggcaaggcgagcatcatggcctcggattgcgagccagctctgaaccaggcagagggccgaaaccccaccctggagcgctacctgggagccctccgtgaggccaagaatgacagcgagcagtttgcagccctgctgctagtgaccaaggcagtcaaagcaggtgacatagatgccaaaactcggcggcggatcttcgatgctgtcggcttcaccttccccaatcgtctcctgaccaccaaggaggcgccggatggctgccctgaccatgttctgcgggctttgggtgtggccctgctggcctgcttctgcagtgaccctgaactggccgcccatccccaagtcctgaacaagattcccattcttagcaccttcctcacagcccggggggacccggacgatgctgcccgccgctccatgattgatgacacctaccagtgcctgacggctgtagcaggcacacccagagggcctcggcacctcattgctggtggcaccgtgtctgccctatgccaggcatacctggggcacggctatggctttgaccaggccctggcactcctggtggggctgctggctgctgccgagacacagtgctggaaggaggcggagcccgacctgctggccgtgttgcggggcctcagtgaggatttccagaaagctgaggatgccagcaagtttgagctctgccagctgctgcccctctttttgcccccgacaaccgtgccccctgaatgctaccgggatctgcaggccgggctggcacgcatcctgggaagcaagctgagctcctggcagcgcaaccctgcactgaagctggcagcccgcctggcacacgcctgcggctccgactggatcccggcgggcagctccgggagcaagttcctggccctgctggtgaatctggcgtgcgtggaagtgcggctggcactggaggagacgggcacggaggtgaaagaggatgtggtgaccgcctgctatgccctcatggagttggggatccaggaatgcactcgctgtgagcagtcactgcttaaggagccacagaaggtgcagctcgtgagcgtcatgaaggaggccataggggctgttatccactacctgctgcaggtggggtcagagaagcagaaggagccctttgtgtttgcctcggtgcggatcctgggtgcctggctggccgaggagacctcatccttgcgtaaggaggtgtgccagctgctgcccttcctcgtccgctatgccaagaccctctacgaggaggccgaggaggccaatgacctttcccagcaggtggccaacctggccatctcccccaccaccccagggcccacctggccaggagacgctctccggctcctcctgcctggctggtgccacctgaccgttgaagatgggccccgggagatcctgatcaaggaaggggccccctcgcttctgtgcaagtatttcctgcagcagtgggaactcacatcccctggccacgacacctcggtgctgcctgacagcgtggagattggcctgcagacctgctgccacatcttcctcaacctcgtggtcaccgcaccggggctgatcaagcgtgacgcctgcttcacatctctaatgaacaccctcatgacgtcgctaccagcactagtgcagcaacagggaaggctgcttctggctgctaatgtggccaccctggggctcctcatggcccggctccttagcacctctccagctcttcagggaacaccagcatcccgagggttcttcgcagctgccatcctcttcctatcacagtcccacgtggcgcgggccaccccgggctcagaccaggcagtgctagccctgtcccctgagtatgagggcatctgggccgacctgcaggagctctggttcctgggcatgcaggccttcaccggctgtgtgcctctgctgccctggctggcccccgctgccctgcgctcccgctggccgcaggagctgctccagctgctaggcagtgtcagccccaactctgtcaagcccgagatggtggccgcctatcagggtgtcctggtggagctggcgcgggccaaccggctgtgccgggaggccatgaggctgcaggcgggcgaggagacggccagccactaccgcatggctgccttggagcagtgcctgtcagagccctgaggggtgtccaccggggacagacccaggggcgggcagagagggaaggagggaggaggcatcttccctgaagcccccaatctggcccccccctccccagacttcctccccaaaacaccccagctttctggcttttctgagggcaagggcatggtgcccacccctcaagtgtaaggaactgcgttccgcccctcaggcccccatgggggcagggatcggcttggaaatcaacgtggttgtccccgccaggccggggaaggttggagcagcccccagggaggggggcactaggtgtcattgtgcccgatgtctggctcccctgcaggagggaggctccagggtaagacagggctggcaggagcagactgcctcagcccatgtgccctgccggccagggcgtgggctcccctcggctgtggtgcctcctctggccccccaggtccacgtcctttaaattggccctttggctcttgcccttggctcccttgggcagacagcaggcttaggccattgatatcgcagttcttcctatcagcttcagtgacccagggtctgaactgcctccatcctagggcaacctggggcagacaggcctggtggggggtggggaaacctccttccacctgagcttgcttgaagggacccagagtctttgggcccagatctttaaacctttgtgtcgtgttgcagcagagtgacgatgggggttggggggttatttattttgcctgtccttatccctgcttggacacctgagcatctgattcctgtccccctggtgccatctggcctggctggagccaggaacaggagggacacttccccagaatccgcatgtttccccagtgattacactccactgccaccgtggtgcctggctttaactcccacccctgctatgactcctctctgcagagacgcgactggcggctccagcagggactacctttcttataaacccagggggaccacacacacacacacacacacacacacacacacacacacacacacacacactcttgatcccttgcttccctcccccagtgcgttctgtgatcgccaagttcaaagctgtgcacatgtggacactcaataaatgttcattggtgacgagaa

SEQ ID NO: 61722 - DNA, 2810 bp, Homo sapiens
gagcggaggagacttcgccgctcggggcgcagctggtggtgaccgccaggaaccctcctccccttctcatctccccatctcagcagccctgcttcgattatccggcttttggattctccgttgtcctgggaactatccgggaccccctcttgcttctccagcccctgccggcatccacaggctggtagcgggacggggagggcgagaagagggagcgcaaggggttaattctgctgctgccgccgccgctgctgctgctgctgcagcctctacccgagggagggaaaggagaggagttgggcaaggcgagcatcatggcctcggattgcgagccagctctgaaccaggcagagggccgaaaccccaccctggagcgctacctgggagactggatcccggcgggcagctccgggagcaagttcctggccctgctggtgaatctggcgtgcgtggaagtgcggctggcactggaggagacgggcacggaggtgaaagaggatgtggtgaccgcctgctatgccctcatggagttggggatccaggaatgcactcgctgtgagcagtcactgcttaaggagccacagaaggtgcagctcgtgagcgtcatgaaggaggccataggggctgttatccactacctgctgcaggtggggtcagagaagcagaaggagccctttgtgtttgcctcggtgcggatcctgggtgcctggctggccgaggagacctcatccttgcgtaaggaggtgtgccagctgctgcccttcctcgtccgctatgccaagaccctctacgaggaggccgaggaggccaatgacctttcccagcaggtggccaacctggccatctcccccaccaccccagggcccacctggccaggagacgctctccggctcctcctgcctggctggtgccacctgaccgttgaagatgggccccgggagatcctgatcaaggaaggggccccctcgcttctgtgcaagtatttcctgcagcagtgggaactcacatcccctggccacgacacctcggtgctgcctgacagcgtggagattggcctgcagacctgctgccacatcttcctcaacctcgtggtcaccgcaccggggctgatcaagcgtgacgcctgcttcacatctctaatgaacaccctcatgacgtcgctaccagcactagtgcagcaacagggaaggctgcttctggctgctaatgtggccaccctggggctcctcatggcccggctccttagcacctctccagctcttcagggaacaccagcatcccgagggttcttcgcagctgccatcctcttcctatcacagtcccacgtggcgcgggccaccccgggctcagaccaggcagtgctagccctgtcccctgagtatgagggcatctgggccgacctgcaggagctctggttcctgggcatgcaggccttcaccggctgtgtgcctctgctgccctggctggcccccgctgccctgcgctcccgctggccgcaggagctgctccagctgctaggcagtgtcagccccaactctgtcaagcccgagatggtggccgcctatcagggtgtcctggtggagctggcgcgggccaaccggctgtgccgggaggccatgaggctgcaggcgggcgaggagacggccagccactaccgcatggctgccttggagcagtgcctgtcagagccctgaggggtgtccaccggggacagacccaggggcgggcagagagggaaggagggaggaggcatcttccctgaagcccccaatctggcccccccctccccagacttcctccccaaaacaccccagctttctggcttttctgagggcaagggcatggtgcccacccctcaagtgtaaggaactgcgttccgcccctcaggcccccatgggggcagggatcggcttggaaatcaacgtggttgtccccgccaggccggggaaggttggagcagcccccagggaggggggcactaggtgtcattgtgcccgatgtctggctcccctgcaggagggaggctccagggtaagacagggctggcaggagcagactgcctcagcccatgtgccctgccggccagggcgtgggctcccctcggctgtggtgcctcctctggccccccaggtccacgtcctttaaattggccctttggctcttgcccttggctcccttgggcagacagcaggcttaggccattgatatcgcagttcttcctatcagcttcagtgacccagggtctgaactgcctccatcctagggcaacctggggcagacaggcctggtggggggtggggaaacctccttccacctgagcttgcttgaagggacccagagtctttgggcccagatctttaaacctttgtgtcgtgttgcagcagagtgacgatgggggttggggggttatttattttgcctgtccttatccctgcttggacacctgagcatctgattcctgtccccctggtgccatctggcctggctggagccaggaacaggagggacacttccccagaatccgcatgtttccccagtgattacactccactgccaccgtggtgcctggctttaactcccacccctgctatgactcctctctgcagagacgcgactggcggctccagcagggactacctttcttataaacccagggggaccacacacacacacacacacacacacacacacacacacacacacacacacactcttgatcccttgcttccctcccccagtgcgttctgtgatcgccaagttcaaagctgtgcacatgtggacactcaataaatgttcattggtgacgagaa

SEQ ID NO: 61723 - DNA, 1841 bp, Homo sapiens
aattccgggtcgaccccctcgtgcggaaatgcggcgtgagcagcggcccgaggctcccggagcatcgcgctgggagaagacttcgccgctcggggccgcagcctgttgggcaaggcgagcatcatggcctcggattgcgagccagctctgaaccaggcagagggccgaaaccccaccctggagcgctacctgggacagcactagtgcagcaacagggaaggctgcttctggctgctaatgtggccaccctggggctcctcatggcccggctccttagcacctctccagctcttcagggaacaccagcatcccgagggttcttcgcagctgccatcctcttcctatcacagtcccacgtggcgcgggccaccccgggctcagaccaggcagtgctagccctgtcccctgagtatgagggcatctgggccgacctgcaggagctctggttcctgggcatgcaggccttcaccggctgtgtgcctctgctgccctggctggcccccgctgccctgcgctcccgctggccgcaggagctgctccagctgctaggcagtgtcagccccaactctgtcaagcccgagatggtggccgcctatcagggtgtcctggtggagctggcgcgggccaaccggctgtgccgggaggccatgaggctgcaggcgggcgaggagacggccagccactaccgcatggctgccttggagcagtgcctgtcagagccctgaggggtgtccaccggggacagacccaggggcgggcagagagggaaggagggaggaggcatcttccctgaagcccccaatctggcccccccctccccagacttcctccccaaaacaccccagctttctggcttttctgagggcaagggcatggtgcccacccctcaagtgtaaggaactgcgttccgcccctcaggcccccatgggggcagggatcggcttggaaatcaacgtggttgtccccgccaggccggggaaggttggagcagcccccagggaggggggcactaggtgtcattgtgcccgatgtctggctcccctgcaggagggaggctccagggtaagacagggctggcaggagcagactgcctcagcccatgtgccctgccggccagggcgtgggctcccctcggctgtggtgcctcctctggccccccaggtccacgtcctttaaattggccctttggctcttgcccttggctcccttgggcagacagcaggcttaggccattgatatcgcagttcttcctatcagcttcagtgacccagggtctgaactgcctccatcctagggcaacctggggcagacaggcctggtggggggtggggaaacctccttccacctgagcttgcttgaagggacccagagtctttgggcccagatctttaaacctttgtgtcgtgttgcagcagagtgacgatgggggttggggggttatttattttgcctgtccttatccctgcttggacacctgagcatctgattcctgtccccctggtgccatctggcctggctggagccaggaacaggagggacacttccccagaatccgcatgtttccccagtgattacactccactgccaccgtggtgcctggctttaactcccacccctgctatgactcctctctgcagagacgcgactggcggctccagcagggactacctttcttataaacccagggggaccacacacacacacacacacacacacacacacacacacacacacacacacactcttgatcccttgcttccctcccccagtgcgttctgtgatcgccaagttcaaagctgtgcacatgtggacactcaataaatgttcattggtgacgagaa

SEQ ID NO: 61724 - DNA, 2263 bp, Homo sapiens
aattccgggtcgaccccctcgtgcggaaatgcggcgtgagcagcggcccgaggctcccggagcatcgcgctgggagaagacttcgccgctcggggccgcagcctggtgagctcagcccccttcgggccctcccctgcatcccagccggggcctctccgagccggcgctgatcgatgccgacacaccccggggaccctatcgcgactccatcgcgccatatcgcgacaccatcgtgccctgtcgagactccattttgtcacagcccttttcaatatatatcttttttttttttaatttgccctgtcatctttgggggctgtctcccatgtcgtgattttgacgtgatctctccgtgacatcaccgcgccatcgtgaagtgtgatctcatcgccgccctgtcgtgacttcatcaatgtcgtgttgtgacctggctgcggcgggacagttgggcaaggcgagcatcatggcctcggattgcgagccagctctgaaccaggcagagggccgaaaccccaccctggagcgctacctgggagccctccgtgaggccaagaatgacagcgagcagtttgcagccctgctgctagtgaccaaggcagtcaaagcaggtgacatagatgccaaaactcggcggcggatcttcgatgctgtcggcttcaccttccccaatcgtctcctgaccaccaaggaggcgccggatggctgccctgaccatgttctgcgggctttgggtgtggccctgctggcctgcttctgcagtgaccctgaactggccgcccatccccaagtcctgaacaagattcccattcttagcaccttcctcacagcccggggggacccggacgatgctgcccgccgctccatgattgatgacacctaccagtgcctgacggctgtagcaggcacacccagagggcctcggcacctcattgctggtggcaccgtgtctgccctatgccaggcatacctggggcacggctatggctttgaccaggccctggcactcctggtggggctgctggctgctgccgagacacagtgctggaaggaggcggagcccgacctgctggccgtgttgcggggcctcagtgaggatttccagaaagctgaggatgccagcaagtttgagctctgccagctgctgcccctctttttgcccccgacaaccgtgccccctgaatgctaccgggatctgcaggccgggctggcacgcatcctgggaagcaagctgagctcctggcagcgcaaccctgcactgaagctggcagcccgcctggcacacgcctgcggctccgactggatcccggcgggcagctccgggagcaagttcctggccctgctggtgaatctggcgtgcgtggaagtgcggctggcactggaggagacgggcacggaggtgaaagaggatgtggtgaccgcctgctatgccctcatggagttggggatccaggaatgcactcgctgtgagcagtcactgcttaaggagccacagaaggtgcagctcgtgagcgtcatgaaggaggccataggggctgttatccactacctgctgcaggtggggtcagagaagcagaaggagccctttgtgtttgcctcggtgcggatcctgggtgcctggctggccgaggagacctcatccttgcgtaaggaggtgtgccagctgctgcccttcctcgtccgctatgccaagaccctctacgaggaggccgaggaggccaatgacctttcccagcaggtggccaacctggccatctcccccaccaccccagggcccacctggccaggagacgctctccggctcctcctgcctggctggtgccacctgaccgttgaagatgggccccgggagatcctgatcaaggaaggggccccctcgcttctgtgcaagtatttcctgcagcagtgggaactcacatcccctggccacgacacctcggtgctgcctgacagcgtggagattggcctgcagacctgctgccacatcttcctcaacctcgtggtcaccgcaccggggctgatcaagcgtgacgcctgcttcacatctctaatgaacaccctcatgacgtcgctaccagcactagtgcagcaacagggaaggctgcttctggctgctaatgtggccaccctggggctcctcatggcccggctccttagcacctctccagctcttcagggaacaccagctttccgagggttcttcgcatctggtacggcggcacggttcgttggccctccttttatcctctagagtcagctatgagga

SEQ ID NO: 61725 - DNA, 622 bp, Homo sapiens
cgagctcggtaccccgctattcatcggcaccctatcagcttcagtgacccagggtctgaactgcctccatcctagggcaacctggggcagacaggcctggtggggggtggggaaacctccttccacctgagcttgcttgaagggacccagagtctttgggcccagatctttaaacctttgtgtcgtgttgcagcagagtgacgatgggggttggggggttatttattttgcctgtccttatccctgcttggacacctgagcatctgattcctgtccccctggtgccatctggcctggctggagccaggaacaggagggacacttccccagaatccgcatgtttccccagtgattacactccactgccaccgtggtgcctggctttaactcccacccctgctatgactcctctctgcagagacgcgactggcggctccagcagggactacctttcttataaacccagggggaccacacacacacacacacacacacacacacacacacacacacacacacacactcttgatcccttgcttccctcccccagtgcgttctgtgatcgccaagttcaaagctgtgcacatgtggacactcaataaatgttcattggtgacgagaa

SEQ ID NO: 61726 - DNA, 356 bp, Homo sapiens
tcaacctcgtggtcaccgcaccggggctgatcaagtgaggggctcgggagaggtgggggaggaggccggaggaggcaaaggaggctgcccagttgcctcaattctcagtctcctactttgccccccatgcccatggatttgttagtggtagcatgggggtctcagagtagacatagccagccccgcacaaggattcggcatgctggaacccccaggtactgtctcagcatgtctgcttgttccaatctctgccccccagatgctatgtttggggcccaaagttaatcaccctactgcctaatttcttgccaagggcttgatttggctgtactagacccccacctacctccatcctt

SEQ ID NO: 61727 - DNA, 439 bp, Homo sapiens
atctgcctctaaggagaaaaaaggagctggatgaaatgacctcagatgagtcctgttgcataacctcatcttgctagtcctcagtgccccaggatgcaggagagggacagtctttcccacttcttcctttcatcctgatgatagcacataccccctataggtgaccaaggcagtcaaagcaggtgacatagatgccaaaactcggcggcggatcttcgatgctgtcggcttcaccttccccaatcgtctcctgaccaccaaggaggcgccggatggctgccctgaccatgttctgcgggctttgggtgtggccctgctggcctgcttctgcagtgaccctgaactggccgcccatccccaagtcctgaacaagattcccattcttagcaccttcctcacagcccggggggacccggacgatgctgcccgccgctccatg

SEQ ID NO: 61728 - DNA, 3787 bp, Homo sapiens
gggaagggcaatgccggccgcgagaccaagggggaggaggggcagtgctgggcgggtaaaactacgcacaagcgaaggaatctgggcccccagcctctcgccgcccgctctccagaggcagtctgcaccttgcctccttcgctcgagccccagcccccagactcgggcaatacccacaagcaagatggcggcaacggcggcaccccctactgcttagcaccctgacttgccattggccagagcccggagtgaagcagccgcggattcgtcaagagcggtgcgggggtgggggtggagctgcagcagcctggagccaggagtgggcaacgcggcgtgagcagcggcccgaggctcccggagcatcgcgctgggagaagacttcgccgctcggggccgcagcctgttgggcaaggcgagcatcatggcctcggattgcgagccagctctgaaccaggcagagggccgaaaccccaccctggagcgctacctgggagccctccgtgaggccaagaatgacagcgagcagtttgcagccctgctgctagtgaccaaggcagtcaaagcaggtgacatagatgccaaaactcggcggcggatcttcgatgctgtcggcttcaccttccccaatcgtctcctgaccaccaaggaggcgccggatggctgccctgaccatgttctgcgggctttgggtgtggccctgctggcctgcttctgcagtgaccctgaactggccgcccatccccaagtcctgaacaagattcccattcttagcaccttcctcacagcccggggggacccggacgatgctgcccgccgctccatgattgatgacacctaccagtgcctgacggctgtagcaggcacacccagagggcctcggcacctcattgctggtggcaccgtgtctgccctatgccaggcatacctggggcacggctatggctttgaccaggccctggcactcctggtggggctgctggctgctgccgagacacagtgctggaaggaggcggagcccgacctgctggccgtgttgcggggcctcagtgaggatttccagaaagctgaggatgccagcaagtttgagctctgccagctgctgcccctctttttgcccccgacaaccgtgccccctgaatgctaccgggatctgcaggccgggctggcacgcatcctgggaagcaagctgagctcctggcagcgcaaccctgcactgaagctggcagcccgcctggcacacgcctgcggctccgactggatcccggcgggcagctccgggagcaagttcctggccctgctggtgaatctggcgtgcgtggaagtgcggctggcactggaggagacgggcacggaggtgaaagaggatgtggtgaccgcctgctatgccctcatggagttggggatccaggaatgcactcgctgtgagcagtcactgcttaaggagccacagaaggtgcagctcgtgagcgtcatgaaggaggccataggggctgttatccactacctgctgcaggtggggtcagagaagcagaaggagccctttgtgtttgcctcggtgcggatcctgggtgcctggctggccgaggagacctcatccttgcgtaaggaggtgtgccagctgctgcccttcctcgtccgctatgccaagaccctctacgaggaggccgaggaggccaatgacctttcccagcaggtggccaacctggccatctcccccaccaccccagggcccacctggccaggagacgctctccggctcctcctgcctggctggtgccacctgaccgttgaagatgggccccgggagatcctgatcaaggaaggggccccctcgcttctgtgcaagtatttcctgcagcagtgggaactcacatcccctggccacgacacctcggtgctgcctgacagcgtggagattggcctgcagacctgctgccacatcttcctcaacctcgtggtcaccgcaccggggctgatcaagcgtgacgcctgcttcacatctctaatgaacaccctcatgacgtcgctaccagcactagtgcagcaacagggaaggctgcttctggctgctaatgtggccaccctggggctcctcatggcccggctccttagcacctctccagctcttcagggaacaccagcatcccgagggttcttcgcagctgccatcctcttcctatcacagtcccacgtggcgcgggccaccccgggctcagaccaggcagtgctagccctgtcccctgagtatgagggcatctgggccgacctgcaggagctctggttcctgggcatgcaggccttcaccggctgtgtgcctctgctgccctggctggcccccgctgccctgcgctcccgctggccgcaggagctgctccagctgctaggcagtgtcagccccaactctgtcaagcccgagatggtggccgcctatcagggtgtcctggtggagctggcgcgggccaaccggctgtgccgggaggccatgaggctgcaggcgggcgaggagacggccagccactaccgcatggctgccttggagcagtgcctgtcagagccctgaggggtgtccaccggggacagacccaggggcgggcagagagggaaggagggaggaggcatcttccctgaagcccccaatctggcccccccctccccagacttcctccccaaaacaccccagctttctggcttttctgagggcaagggcatggtgcccacccctcaagtgtaaggaactgcgttccgcccctcaggcccccatgggggcagggatcggcttggaaatcaacgtggttgtccccgccaggccggggaaggttggagcagcccccagggaggggggcactaggtgtcattgtgcccgatgtctggctcccctgcaggagggaggctccagggtaagacagggctggcaggagcagactgcctcagcccatgtgccctgccggccagggcgtgggctcccctcggctgtggtgcctcctctggccccccaggtccacgtcctttaaattggccctttggctcttgcccttggctcccttgggcagacagcaggcttaggccattgatatcgcagttcttcctatcagcttcagtgacccagggtctgaactgcctccatcctagggcaacctggggcagacaggcctggtggggggtggggaaacctccttccacctgagcttgcttgaagggacccagagtctttgggcccagatctttaaacctttgtgtcgtgttgcagcagagtgacgatgggggttggggggttatttattttgcctgtccttatccctgcttggacacctgagcatctgattcctgtccccctggtgccatctggcctggctggagccaggaacaggagggacacttccccagaatccgcatgtttccccagtgattacactccactgccaccgtggtgcctggctttaactcccacccctgctatgactcctctctgcagagacgcgactggcggctccagcagggactacctttcttataaacccagggggaccacacacacacacacacacacacacacacacacacacacacacacacacactcttgatcccttgcttccctcccccagtgcgttctgtgatcgccaagttcaaagctgtgcacatgtggacactcaataaatgttcattggtgacgagaatactactgccttaggatttaatattattggccggtgttttacaacgttgtgattgtgcctttgtggttcctcaatttttgtcttgtatcacattccccttttgccgctggg

SEQ ID NO: 61729 - DNA, 3718 bp, Homo sapiens
aattccgggtcgaccccctcgtgcggaaatgcggcgtgagcagcggcccgaggctcccggagcatcgcgctgggagaagacttcgccgctcggggccgcagcctggtgagctcagcccccttcgggccctcccctgcatcccagccggggcctctccgagccggcgctgatcgatgccgacacaccccggggaccctatcgcgactccatcgcgccatatcgcgacaccatcgtgccctgtcgagactccattttgtcacagcccttttcaatatatatcttttttttttttaatttgccctgtcatctttgggggctgtctcccatgtcgtgattttgacgtgatctctccgtgacatcaccgcgccatcgtgaagtgtgatctcatcgccgccctgtcgtgacttcatcaatgtcgtgttgtgacctggctgcggcgggacagttgggcaaggcgagcatcatggcctcggattgcgagccagctctgaaccaggcagagggccgaaaccccaccctggagcgctacctgggagccctccgtgaggccaagaatgacagcgagcagtttgcagccctgctgctagtgaccaaggcagtcaaagcaggtgacatagatgccaaaactcggcggcggatcttcgatgctgtcggcttcaccttccccaatcgtctcctgaccaccaaggaggcgccggatggctgccctgaccatgttctgcgggctttgggtgtggccctgctggcctgcttctgcagtgaccctgaactggccgcccatccccaagtcctgaacaagattcccattcttagcaccttcctcacagcccggggggacccggacgatgctgcccgccgctccatgattgatgacacctaccagtgcctgacggctgtagcaggcacacccagagggcctcggcacctcattgctggtggcaccgtgtctgccctatgccaggcatacctggggcacggctatggctttgaccaggccctggcactcctggtggggctgctggctgctgccgagacacagtgctggaaggaggcggagcccgacctgctggccgtgttgcggggcctcagtgaggatttccagaaagctgaggatgccagcaagtttgagctctgccagctgctgcccctctttttgcccccgacaaccgtgccccctgaatgctaccgggatctgcaggccgggctggcacgcatcctgggaagcaagctgagctcctggcagcgcaaccctgcactgaagctggcagcccgcctggcacacgcctgcggctccgactggatcccggcgggcagctccgggagcaagttcctggccctgctggtgaatctggcgtgcgtggaagtgcggctggcactggaggagacgggcacggaggtgaaagaggatgtggtgaccgcctgctatgccctcatggagttggggatccaggaatgcactcgctgtgagcagtcactgcttaaggagccacagaaggtgcagctcgtgagcgtcatgaaggaggccataggggctgttatccactacctgctgcaggtggggtcagagaagcagaaggagccctttgtgtttgcctcggtgcggatcctgggtgcctggctggccgaggagacctcatccttgcgtaaggaggtgtgccagctgctgcccttcctcgtccgctatgccaagaccctctacgaggaggccgaggaggccaatgacctttcccagcaggtggccaacctggccatctcccccaccaccccagggcccacctggccaggagacgctctccggctcctcctgcctggctggtgccacctgaccgttgaagatgggccccgggagatcctgatcaaggaaggggccccctcgcttctgtgcaagtatttcctgcagcagtgggaactcacatcccctggccacgacacctcggtgctgcctgacagcgtggagattggcctgcagacctgctgccacatcttcctcaacctcgtggtcaccgcaccggggctgatcaagcgtgacgcctgcttcacatctctaatgaacaccctcatgacgtcgctaccagcactagtgcagcaacagggaaggctgcttctggctgctaatgtggccaccctggggctcctcatggcccggctccttagcacctctccagctcttcagggaacaccagcatcccgagggttcttcgcagctgccatcctcttcctatcacagtcccacgtggcgcgggccaccccgggctcagaccaggcagtgctagccctgtcccctgagtatgagggcatctgggccgacctgcaggagctctggttcctgggcatgcaggccttcaccggctgtgtgcctctgctgccctggctggcccccgctgccctgcgctcccgctggccgcaggagctgctccagctgctaggcagtgtcagccccaactctgtcaagcccgagatggtggccgcctatcagggtgtcctggtggagctggcgcgggccaaccggctgtgccgggaggccatgaggctgcaggcgggcgaggagacggccagccactaccgcatggctgccttggagcagtgcctgtcagagccctgaggggtgtccaccggggacagacccaggggcgggcagagagggaaggagggaggaggcatcttccctgaagcccccaatctggcccccccctccccagacttcctccccaaaacaccccagctttctggcttttctgagggcaagggcatggtgcccacccctcaagtgtaaggaactgcgttccgcccctcaggcccccatgggggcagggatcggcttggaaatcaacgtggttgtccccgccaggccggggaaggttggagcagcccccagggaggggggcactaggtgtcattgtgcccgatgtctggctcccctgcaggagggaggctccagggtaagacagggctggcaggagcagactgcctcagcccatgtgccctgccggccagggcgtgggctcccctcggctgtggtgcctcctctggccccccaggtccacgtcctttaaattggccctttggctcttgcccttggctcccttgggcagacagcaggcttaggccattgatatcgcagttcttcctatcagcttcagtgacccagggtctgaactgcctccatcctagggcaacctggggcagacaggcctggtggggggtggggaaacctccttccacctgagcttgcttgaagggacccagagtctttgggcccagatctttaaacctttgtgtcgtgttgcagcagagtgacgatgggggttggggggttatttattttgcctgtccttatccctgcttggacacctgagcatctgattcctgtccccctggtgccatctggcctggctggagccaggaacaggagggacacttccccagaatccgcatgtttccccagtgattacactccactgccaccgtggtgcctggctttaactcccacccctgctatgactcctctctgcagagacgcgactggcggctccagcagggactacctttcttataaacccagggggaccacacacacacacacacacacacacacacacacacacacacacacacacactcttgatcccttgcttccctcccccagtgcgttctgtgatcgccaagttcaaagctgtgcacatgtggacactcaataaatgttcattggtgacgagaa

SEQ ID NO: 61730 - DNA, 3649 bp, Homo sapiens
gggaagggcaatgccggccgcgagaccaagggggaggaggggcagtgctgggcgggtaaaactacgcacaagcgaaggaatctgggcccccagcctctcgccgcccgctctccagaggcagtctgcaccttgcctccttcgctcgagccccagcccccagactcgggcaatacccacaagcaagatggcggcaacggcggcaccccctactgcttagcaccctgacttgccattggccagagcccggagtgaagcagccgcggattcgtcaagagcggtgcgggggtgggggtggagctgcagcagcctggagccaggagtgggcaacgcggcgtgagcagcggcccgaggctcccggagcatcgcgctgggagaagacttcgccgctcggggccgcagcctgttgggcaaggcgagcatcatggcctcggattgcgagccagctctgaaccaggcagagggccgaaaccccaccctggagcgctacctgggagccctccgtgaggccaagaatgacagcgagcagtttgcagccctgctgctagtgaccaaggcagtcaaagcaggtgacatagatgccaaaactcggcggcggatcttcgatgctgtcggcttcaccttccccaatcgtctcctgaccaccaaggaggcgccggatggctgccctgaccatgttctgcgggctttgggtgtggccctgctggcctgcttctgcagtgaccctgaactggccgcccatccccaagtcctgaacaagattcccattcttagcaccttcctcacagcccggggggacccggacgatgctgcccgccgctccatgattgatgacacctaccagtgcctgacggctgtagcaggcacacccagagggcctcggcacctcattgctggtggcaccgtgtctgccctatgccaggcatacctggggcacggctatggctttgaccaggccctggcactcctggtggggctgctggctgctgccgagacacagtgctggaaggaggcggagcccgacctgctggccgtgttgcggggcctcagtgaggatttccagaaagctgaggatgccagcaagtttgagctctgccagctgctgcccctctttttgcccccgacaaccgtgccccctgaatgctaccgggatctgcaggccgggctggcacgcatcctgggaagcaagctgagctcctggcagcgcaaccctgcactgaagctggcagcccgcctggcacacgcctgcggctccgactggatcccggcgggcagctccgggagcaagttcctggccctgctggtgaatctggcgtgcgtggaagtgcggctggcactggaggagacgggcacggaggtgaaagaggatgtggtgaccgcctgctatgccctcatggagttggggatccaggaatgcactcgctgtgagcagtcactgcttaaggagccacagaaggtgcagctcgtgagcgtcatgaaggaggccataggggctgttatccactacctgctgcaggtggggtcagagaagcagaaggagccctttgtgtttgcctcggtgcggatcctgggtgcctggctggccgaggagacctcatccttgcgtaaggaggtgtgccagctgctgcccttcctcgtccgctatgccaagaccctctacgaggaggccgaggaggccaatgacctttcccagcaggtggccaacctggccatctcccccaccaccccagggcccacctggccaggagacgctctccggctcctcctgcctggctggtgccacctgaccgttgaagatgggccccgggagatcctgatcaaggaaggggccccctcgcttctgtgcaagtatttcctgcagcagtgggaactcacatcccctggccacgacacctcggtgctgcctgacagcgtggagattggcctgcagacctgctgccacatcttcctcaacctcgtggtcaccgcaccggggctgatcaagcgtgacgcctgcttcacatctctaatgaacaccctcatgacgtcgctaccagcactagtgcagcaacagggaaggctgcttctggctgctaatgtggccaccctggggctcctcatggcccggctccttagcacctctccagctcttcagggaacaccagcatcccgagggttcttcgcagctgccatcctcttcctatcacagtcccacgtggcgcgggccaccccgggctcagaccaggcagtgctagccctgtcccctgagtatgagggcatctgggccgacctgcaggagctctggttcctgggcatgcaggccttcaccggctgtgtgcctctgctgccctggctggcccccgctgccctgcgctcccgctggccgcaggagctgctccagctgctaggcagtgtcagccccaactctgtcaagcccgagatggtggccgcctatcagggtgtcctggtggagctggcgcgggccaaccggctgtgccgggaggccatgaggctgcaggcgggcgaggagacggccagccactaccgcatggctgccttggagcagtgcctgtcagagccctgaggggtgtccaccggggacagacccaggggcgggcagagagggaaggagggaggaggcatcttccctgaagcccccaatctggcccccccctccccagacttcctccccaaaacaccccagctttctggcttttctgagggcaagggcatggtgcccacccctcaagtgtaaggaactgcgttccgcccctcaggcccccatgggggcagggatcggcttggaaatcaacgtggttgtccccgccaggccggggaaggttggagcagcccccagggaggggggcactaggtgtcattgtgcccgatgtctggctcccctgcaggagggaggctccagggtaagacagggctggcaggagcagactgcctcagcccatgtgccctgccggccagggcgtgggctcccctcggctgtggtgcctcctctggccccccaggtccacgtcctttaaattggccctttggctcttgcccttggctcccttgggcagacagcaggcttaggccattgatatcgcagttcttcctatcagcttcagtgacccagggtctgaactgcctccatcctagggcaacctggggcagacaggcctggtggggggtggggaaacctccttccacctgagcttgcttgaagggacccagagtctttgggcccagatctttaaacctttgtgtcgtgttgcagcagagtgacgatgggggttggggggttatttattttgcctgtccttatccctgcttggacacctgagcatctgattcctgtccccctggtgccatctggcctggctggagccaggaacaggagggacacttccccagaatccgcatgtttccccagtgattacactccactgccaccgtggtgcctggctttaactcccacccctgctatgactcctctctgcagagacgcgactggcggctccagcagggactacctttcttataaacccagggggacacacacacacacacacacacacactcttgatcccttgcttccctcccccagtgcgttctgtgatcgccaagttcaaagctgtgcacatgtggacactcaataaatgttcattggtgacgagaa

SEQ ID NO: 61731 - DNA, 3644 bp, Homo sapiens
gggaagggcaatgccggccgcgagaccaagggggaggaggggcagtgctgggcgggtaaaactacgcacaagcgaaggaatctgggcccccagcctctcgccgcccgctctccagaggcagtctgcaccttgcctccttcgctcgagccccagcccccagactcgggcaatacccacaagcaagatggcggcaacggcggcaccccctactgcttagcaccctgacttgccattggccagagcccggagtgaagcagccgcggattcgtcaagagcggtgcgggggtgggggtggagctgcagcagcctggagccaggagtgggcaacgcggcgtgagcagcggcccgaggctcccggagcatcgcgctgggagaagacttcgccgctcggggccgcagcctgttgggcaaggcgagcatcatggcctcggattgcgagccagctctgaaccaggcagagggccgaaaccccaccctggagcgctacctgggagccctccgtgaggccaagaatgacagcgagcagtttgcagccctgctgctagtgaccaaggcagtcaaagcaggtgacatagatgccaaaactcggcggcggatcttcgatgctgtcggcttcaccttccccaatcgtctcctgaccaccaaggaggcgccggatggctgccctgaccatgttctgcgggctttgggtgtggccctgctggcctgcttctgcagtgaccctgaactggccgcccatccccaagtcctgaacaagattcccattcttagcaccttcctcacagcccggggggacccggacgatgctgcccgccgctccatgattgatgacacctaccagtgcctgacggctgtagcaggcacacccagagggcctcggcacctcattgctggtggcaccgtgtctgccctatgccaggcatacctggggcacggctatggctttgaccaggccctggcactcctggtggggctgctggctgctgccgagacacagtgctggaaggaggcggagcccgacctgctggccgtgttgcggggcctcagtgaggatttccagaaagctgaggatgccagcaagtttgagctctgccagctgctgcccctctttttgcccccgacaaccgtgccccctgaatgctaccgggatctgcaggccgggctggcacgcatcctgggaagcaagctgagctcctggcagcgcaaccctgcactgaagctggcagcccgcctggcacacgcctgcggctccgactggatcccggcgggcagctccgggagcaagttcctggccctgctggtgaatctggcgtgcgtggaagtgcggctggcactggaggagacgggcacggaggtgaaagaggatgtggtgaccgcctgctatgccctcatggagttggggatccaggaatgcactcgctgtgagcagtcactgcttaaggagccacagaaggtgcagctcgtgagcgtcatgaaggaggccataggggctgttatccactacctgctgcaggtggggtcagagaagcagaaggagccctttgtgtttgcctcggtgcggatcctgggtgcctggctggccgaggagacctcatccttgcgtaaggaggtgtgccagctgctgcccttcctcgtccgctatgccaagaccctctacgaggaggccgaggaggccaatgacctttcccagcaggtggccaacctggccatctcccccaccaccccagggcccacctggccaggagacgctctccggctcctcctgcctggctggtgccacctgaccgttgaagatgggccccgggagatcctgatcaaggaaggggccccctcgcttctgtgcaagtatttcctgcagcagtgggaactcacatcccctggccacgacacctcggtgctgcctgacagcgtggagattggcctgcagacctgctgccacatcttcctcaacctcgtggtcaccgcaccggggctgatcaagcgtgacgcctgcttcacatctctaatgaacaccctcatgacgtcgctaccagcactagtgcagcaacagggaaggctgcttctggctgctaatgtggccaccctggggctcctcatggcccggctccttagcacctctccagctcttcagggaacaccagcatcccgagggttcttcgcagctgccatcctcttcctatcacagtcccacgtggcgcgggccaccccgggctcagaccaggcagtgctagccctgtcccctgagtatgagggcatctgggccgacctgcaggagctctggttcctgggcatgcaggccttcaccggctgtgtgcctctgctgccctggctggcccccgctgccctgcgctcccgctggccgcaggagctgctccagctgctaggcagtgtcagccccaactctgtcaagcccgagatggtggccgcctatcagggtgtcctggtggagctggcgcgggccaaccggctgtgccgggaggccatgaggctgcaggcgggcgaggagacggccagccactaccgcatggctgccttggagcagtgcctgtcagagccctgaggggtgtccaccggggacagacccaggggcgggcagagagggaaggagggaggaggcatcttccctgaagcccccaatctggcccccccctccccagacttcctccccaaaacaccccagctttctggcttttctgagggcaagggcatggtgcccacccctcaagtgtaaggaactgcgttccgcccctcaggcccccatgggggcagggatcggcttggaaatcaacgtggttgtccccgccaggccggggaaggttggagcagcccccagggaggggggcactaggtgtcattgtgcccgatgtctggctcccctgcaggagggaggctccagggtaagacagggctggcaggagcagactgcctcagcccatgtgccctgccggccagggcgtgggctcccctcggctgtggtgcctcctctggccccccaggtccacgtcctttaaattggccctttggctcttgcccttggctcccttgggcagacagcaggcttaggccattgatatcgcagttcttcctatcagcttcagtgacccagggtctgaactgcctccatcctagggcaacctggggcagacaggcctggtggggggtggggaaacctccttccacctgagcttgcttgaagggacccagagtctttgggcccagatctttaaacctttgtgtcgtgttgcagcagagtgacgatgggggttggggggttatttattttgcctgtccttatccctgcttggacacctgagcatctgattcctgtccccctggtgccatctggcctggctggagccaggaacaggagggacacttcctccactgccaccgtggtgcctggctttaactcccacccctgctatgactcctctctgcagagacgcgactggcggctccagcagggactacctttcttataaacccagggggaccacacacacacacacacacacacacacacacacacacacacacacacacactcttgatcccttgcttccctcccccagtgcgttctgtgatcgccaagttcaaagctgtgcacatgtggacactcaataaatgttcattggtgacgagaa

SEQ ID NO: 61732 - DNA, 3781 bp, Homo sapiens
gggaagggcaatgccggccgcgagaccaagggggaggaggggcagtgctgggcgggtaaaactacgcacaagcgaaggaatctgggcccccagcctctcgccgcccgctctccagaggcagtctgcaccttgcctccttcgctcgagccccagcccccagactcgggcaatacccacaagcaagatggcggcaacggcggcaccccctactgcttagcaccctgacttgccattggccagagcccggagtgaagcagccgcggattcgtcaagagcggtgcgggggtgggggtggagctgcagcagcctggagccaggagtgggcaacgcggcgtgagcagcggcccgaggctcccggagcatcgcgctgggagaagacttcgccgctcggggccgcagcctgttgggcaaggcgagcatcatggcctcggattgcgagccagctctgaaccaggcagagggccgaaaccccaccctggagcgctacctgggagccctccgtgaggccaagaatgacagcgagcagtttgcagccctgctgctagtgaccaaggcagtcaaagcaggtgacatagatgccaaaactcggcggcggatcttcgatgctgtcggcttcaccttccccaatcgtctcctgaccaccaaggaggcgccggatggctgccctgaccatgttctgcgggctttgggtgtggccctgctggcctgcttctgcagtgaccctgaactggccgcccatccccaagtcctgaacaagattcccattcttagcaccttcctcacagcccggggggacccggacgatgctgcccgccgctccatgattgatgacacctaccagtgcctgacggctgtagcaggcacacccagagggcctcggcacctcattgctggtggcaccgtgtctgccctatgccaggcatacctggggcacggctatggctttgaccaggccctggcactcctggtggggctgctggctgctgccgagacacagtgctggaaggaggcggagcccgacctgctggccgtgttgcggggcctcagtgaggatttccagaaagctgaggatgccagcaagtttgagctctgccagctgctgcccctctttttgcccccgacaaccgtgccccctgaatgctaccgggatctgcaggccgggctggcacgcatcctgggaagcaagctgagctcctggcagcgcaaccctgcactgaagctggcagcccgcctggcacacgcctgcggctccgactggatcccggcgggcagctccgggagcaagttcctggccctgctggtgaatctggcgtgcgtggaagtgcggctggcactggaggagacgggcacggaggtgaaagaggatgtggtgaccgcctgctatgccctcatggagttggggatccaggaatgcactcgctgtgagcagtcactgcttaaggagccacagaaggtgcagctcgtgagcgtcatgaaggaggccataggggctgttatccactacctgctgcaggtggggtcagagaagcagaaggagccctttgtgtttgcctcggtgcggatcctgggtgcctggctggccgaggagacctcatccttgcgtaaggaggtgtgccagctgctgcccttcctcgtccgctatgccaagaccctctacgaggaggccgaggaggccaatgacctttcccagcaggtggccaacctggccatctcccccaccaccccagggcccacctggccaggagacgctctccggctcctcctgcctggctggtgccacctgaccgttgaagatgggccccgggagatcctgatcaaggaaggggccccctcgcttctgtgcaagtatttcctgcagcagtgggaactcacatcccctggccacgacacctcggtgctgcctgacagcgtggagattggcctgcagacctgctgccacatcttcctcaacctcgtggtcaccgcaccggggctgatcaagcgtgacgcctgcttcacatctctaatgaacaccctcatgacgtcgctaccagcactagtgcagcaacagggaaggctgcttctggctgctaatgtggccaccctggggctcctcatggcccggctccttagcacctctccagctcttcagggaacaccagcatcccgagggttcttcgcagctgccatcctcttcctatcacagtcccacgtggcgcgggccaccccgggctcagaccaggcagtgctagccctgtcccctgagtatgagggcatctgggccgacctgcaggagctctggttcctgggcatgcaggccttcaccggctgtgtgcctctgctgccctggctggcccccgctgccctgcgctcccgctggccgcaggagctgctccagctgctaggcagtgtcagccccaactctgtcaagcccgagatggtggccgcctatcagggtgtcctggtggagctggcgcgggccaaccggctgtgccgggaggccatgaggctgcaggcgggcgaggagacggccagccactaccgcatggctgccttggagcagtgcctgtcagagccctgaggggtgtccaccggggacagacccaggggcgggcagagagggaaggagggaggaggcatcttccctgaagcccccaatctggcccccccctccccagacttcctccccaaaacaccccagctttctggcttttctgagggcaagggcatggtgcccacccctcaagtgtaaggaactgcgttccgcccctcaggcccccatgggggcagggatcggcttggaaatcaacgtggttgtccccgccaggccggggaaggttggagcagcccccagggaggggggcactaggtgtcattgtgcccgatgtctggctcccctgcaggagggaggctccagggtaagacagggctggcaggagcagactgcctcagcccatgtgccctgccggccagggcgtgggctcccctcggctgtggtgcctcctctggccccccaggtccacgtcctttaaattggccctttggctcttgcccttggctcccttgggcagacagcaggcttaggccattgatatcgcagttcttcctatcagcttcagtgacccagggtctgaactgcctccatcctagggcaacctggggcagacaggcctggtggggggtggggaaacctccttccacctgagcttgcttgaagggacccagagtctttgggcccagatctttaaacctttgtgtcgtgttgcagcagagtgacgatgggggttggggggttatttattttgcctgtccttatctgctatgactcctctctgcagagacgcgactggcggctccagcagggactacctttcttataaacccagggggaccacacacacacacacacacacacacacacacacacacacacacacacacactcttgatcccttactaacttactccaattcattctttcatcaccaacttcatcactacacacatatctacactcaataatattcattaccactaaataacacttaactcttactatacttttactcacatacccaattttcactataaatattctaattacaatataatttactcccattatacaacttcctaacttaatcaaaccttatccttaccctatcttattcaacctttcatcaccatacccctttccttcatcttacccttttactaaacattcccatacctaacaacttctcaaacattttccaaacctaatcctccattcccaattttaactctaacattttgtttaaac

SEQ ID NO: 61733 - DNA, 2511 bp, Homo sapiens
atatctaaggcaggcagctttgagcagagtgatctggtcaccaaagctgagccctgtaaagccaggcaaccgcgtggcaaactccacgatcttgatgatgcacttggtatccagctcactgaacttgtcccacagccccagatccaactgcacgcggtgcggctggcactggaggagacgggcacggaggtgaaagaggatgtggtgaccgcctgctatgccctcatggagttggggatccaggaatgcactcgctgtgagcagtcactgcttaaggagccacagaaggtgcagctcgtgagcgtcatgaaggaggccataggggctgttatccactacctgctgcaggtggggtcagagaagcagaaggagccctttgtgtttgcctcggtgcggatcctgggtgcctggctggccgaggagacctcatccttgcgtaaggaggtgtgccagctgctgcccttcctcgtccgctatgccaagaccctctacgaggaggccgaggaggccaatgacctttcccagcaggtggccaacctggccatctcccccaccaccccagggcccacctggccaggagacgctctccggctcctcctgcctggctggtgccacctgaccgttgaagatgggccccgggagatcctgatcaaggaaggggccccctcgcttctgtgcaagtatttcctgcagcagtgggaactcacatcccctggccacgacacctcggtgctgcctgacagcgtggagattggcctgcagacctgctgccacatcttcctcaacctcgtggtcaccgcaccggggctgatcaagcgtgacgcctgcttcacatctctaatgaacaccctcatgacgtcgctaccagcactagtgcagcaacagggaaggctgcttctggctgctaatgtggccaccctggggctcctcatggcccggctccttagcacctctccagctcttcagggaacaccagcatcccgagggttcttcgcagctgccatcctcttcctatcacagtcccacgtggcgcgggccaccccgggctcagaccaggcagtgctagccctgtcccctgagtatgagggcatctgggccgacctgcaggagctctggttcctgggcatgcaggccttcaccggctgtgtgcctctgctgccctggctggcccccgctgccctgcgctcccgctggccgcaggagctgctccagctgctaggcagtgtcagccccaactctgtcaagcccgagatggtggccgcctatcagggtgtcctggtggagctggcgcgggccaaccggctgtgccgggaggccatgaggctgcaggcgggcgaggagacggccagccactaccgcatggctgccttggagcagtgcctgtcagagccctgaggggtgtccaccggggacagacccaggggcgggcagagagggaaggagggaggaggcatcttccctgaagcccccaatctggcccccccctccccagacttcctccccaaaacaccccagctttctggcttttctgagggcaagggcatggtgcccacccctcaagtgtaaggaactgcgttccgcccctcaggcccccatgggggcagggatcggcttggaaatcaacgtggttgtccccgccaggccggggaaggttggagcagcccccagggaggggggcactaggtgtcattgtgcccgatgtctggctcccctgcaggagggaggctccagggtaagacagggctggcaggagcagactgcctcagcccatgtgccctgccggccagggcgtgggctcccctcggctgtggtgcctcctctggccccccaggtccacgtcctttaaattggccctttggctcttgcccttggctcccttgggcagacagcaggcttaggccattgatatcgcagttcttcctatcagcttcagtgacccagggtctgaactgcctccatcctagggcaacctggggcagacaggcctggtggggggtggggaaacctccttccacctgagcttgcttgaagggacccagagtctttgggcccagatctttaaacctttgtgtcgtgttgcagcagagtgacgatgggggttggggggttatttattttgcctgtccttatccctgcttggacacctgagcatctgattcctgtccccctggtgccatctggcctggctggagccaggaacaggagggacacttccccagaatccgcatgtttccccagtgattacactccactgccaccgtggtgcctggctttaactcccacccctgctatgactcctctctgcagagacgcgactggcggctccagcagggactacctttcttataaacccagggggaccacacacacacacacacacacacacacacacacacacacacacacacacactcttgatcccttgcttccctcccccagtgcgttctgtgatcgccaagttcaaagctgtgcacatgtggacactcaataaatgttcattggtgacgagaa

SEQ ID NO: 61734 - DNA, 1651 bp, Homo sapiens
aattccgggtcgaccccctcgtgcggaaatgcggcgtgagcagcggcccgaggctcccggagcatcgcgctgggagaagacttcgccgctcggggccgcagcctggtgagctcagcccccttcgggccctcccctgcatcccagccggggcctctccgagccggcgctgatcgatgccgacacaccccggggaccctatcgcgactccatcgcgccatatcgcgacaccatcgtgccctgtcgagactccattttgtcacagcccttttcaatatatatcttttttttttttaatttgccctgtcatctttgggggctgtctcccatgtcgtgattttgacgtgatctctccgtgacatcaccgcgccatcgtgaagtgtgatctcatcgccgccctgtcgtgacttcatcaatgtcgtgttgtgacctggctgcggcgggacagttgggcaaggcgagcatcatggcctcggattgcgagccagctctgaaccaggcagagggccgaaaccccaccctggagcgctacctgggagccctccgtgaggccaagaatgacagcgagcagtttgcagccctgctgctagtgaccaaggcagtcaaagcaggtgacatagatgccaaaactcggcggcggatcttcgatgctgtcggcttcaccttccccaatcgtctcctgaccaccaaggaggcgccggatggctgccctgaccatgttctgcgggctttgggtgtggccctgctggcctgcttctgcagtgaccctgaactggccgcccatccccaagtcctgaacaagattcccattggaggggggcactaggtgtcattgtgcccgatgtctggctcccctgcaggagggaggctccagggtaagacagggctggcaggagcagactgcctcagcccatgtgccctgccggccagggcgtgggctcccctcggctgtggtgcctcctctggccccccaggtccacgtcctttaaattggccctttggctcttgcccttggctcccttgggcagacagcaggcttaggccattgatatcgcagttcttcctatcagcttcagtgacccagggtctgaactgcctccatcctagggcaacctggggcagacaggcctggtggggggtggggaaacctccttccacctgagcttgcttgaagggacccagagtctttgggcccagatctttaaacctttgtgtcgtgttgcagcagagtgacgatgggggttggggggttatttattttgcctgtccttatccctgcttggacacctgagcatctgattcctgtccccctggtgccatctggcctggctggagccaggaacaggagggacacttccccagaatccgcatgtttccccagtgattacactccactgccaccgtggtgcctggctttaactcccacccctgctatgactcctctctgcagagacgcgactggcggctccagcagggactacctttcttataaacccagggggaccacacacacacacacacacacacacacacacacacacacacacacacacactcttgatcccttgcttccctcccccagtgcgttctgtgatcgccaagttcaaagctgtgcacatgtggacactcaataaatgttcattggtgacgagaa

SEQ ID NO: 61735 - DNA, 359 bp, Homo sapiens
cctgctccatctcaagggggtcctgtggcaacaggtggggtcagagaagcagaaggagccctttgtgtttgcctcggtgcggatcctgggtgcctggctggccgaggagacctcatccttgcgtaaggaggtgtgccagctgctgcccttcctcgtccgctatgccaagaccctctacgaggaggccgaggaggccaatgacctttcccagcaggtggccaacctggccatctcccccaccaccccagggcccacctggccaggagacgctctccggtgagtctgtagttacagtctgtccagctagatcattctaccgaaaagcgttaacacaaggacacccctccccacaaactgag

SEQ ID NO: 61736 - DNA, 3598 bp, Homo sapiens
atctctctgagacctctgcaaagatgtcccttttatgcccttgaccttgactcaccatgggctgctggggtgtcgggagaagccacacccaacatgcccattagcagaggctgctgctgatgtggcagctgctccctaccacccgccctggctccccagctgcaggttgcacaccctcagcctgagaatgtaaaatagggcagtgcccagctggggaggtagaggaaagtgctagagtacatggtccgtgtgtggcctagctcattccatgtcagcatttggtgttactcctgtccaaattctgtttgcagacttgtttcatgatgatgctctggaatgcttggggactttgggtggaggaggatgttacttcattttataaagaggaaggggcctgggagacttgggaaaatgtttctggagaggctttcagagtggctggaaaaggctcttgttgctgtaatttagagaggagctctgtgtccttggccagtcaagtaagttcctggatctttggcaaagccagaggaagaaaggagctacctgccctttcctgggcatgcttggtgactcagattgatcttggagtgtgcagtggcccttctaccctgcacctgacctcatgatcccctccacctgcactggtgtgcattactgaagcaagggtcctgtggacatcttgcattttgggcactgctagggggtctgggctgcttggaaggagccatggcctagggttcagggaactagactctatcccagttgggttcagactgctgtgactgtggacacgatgctccttgttctgggctccagttttcccatttgtgagatgaggcaacttccaatgcttctctaggccctgcacgtaagtgatttttccagttcaaagtcaagacaggtaaaagggcattcatcattgtgcctcatatcaggttttgatgaatatatgtgtgtgtgtgtgtgtgtgtgtgtgtgtgtgtgtagagggatggacaggatgctgtttattttccctttcttggaaatggaccttctgtcccttccatttggacaccacagtggaagctggtggcctggaaggaaggattaggtcatggacatttgaacaggtgccttgggcatgatgtatagatgcagtcatatataccttgctggggtggggtgccacctccagtggccagctccagatccaaggagcagccccctggggatggaccccattcattcatcatgactcccaacagttttcattgtggaagaagaaactttggcattatagagacatcatcacaaaacagtaaaaacaaaatcaaccctgaaccccatgcactgtgctgcttcctgagcctggccctgcatcctcatagaggtgccgggttcctattggttagttggttgtttttccgtctgagtgaatttttgccagtcttgtgagcagatgtacctgatgtattctcaatgttccaagaggttctggccttcagggtcacaggcagtagggggacagcataaggtctatgtaaaacccttccctctctgaccctctgttttcaaatctgtaaaatgggcaataagactagatgatttgtatatagcccaatgcatctctggaactctgtctaaacaccagccatctacttggaatgggccccaggactgtggtatttgcctgggccaggaaaggataagaaatcctgtcatgtgaagacagcttgagaggcttgagaaaagtggggctggggagaagcaggcttgtcagactccacccctgttgatgatcattcctgggaaggggtttctcgttctatgcaatcctaaaggacgaaactcacccatgggaggccgaattctccttgggatgaagaaatttctctttccctgtcatgagtgtccagccagggagcagggaggcagtgtcagggagggactctcatcctggaggaaatgggattccaagtcaaggatgctgaggctgtcagggagccagagaggggggtccaagtgcgggatgtgggtggctctgtggttcagtgctctgtcaccctgcttgacacatccagtggcctacagcgactcttctctaaccccaccccctccaagctgggttctttgtggaagaaggacagggagctagagccaagccctaggcttgagagacacctgcatctataatccccgccaaggatgcccactcacctctctcatctgatcctcactctttgtggaagggaaagctcaaagggactctctctctctctctcttttttttttttttggagtagtacccttgccctcttcatggccacttcaaagtgaagccagcaaagtgataatactttatcatttagtattatcataaagtattaatactttgtcataaagtcctccttgagcccaggggaccatggaagtcagctagaagagccctgagcaaggagcaaggacttgggcttctccacgctttgctcctggcttgtttgaccttgactcattccccatatgtctttgaggaggctcacaaaatactaaagctgggaggaaacttggagatctataggtcaaacctccccattgggctgatgagaaaatacacgcaggcctagcatggtgcctgccaccatggtgggatccagtatgttttataaatctgaatgagtaaatggctcaccaatttatgcatagccctgcacatgagcagaatgtgacactcaaagcatccatgcagtacgcatgtaaccttgcacaggagtggggctctggtgaccgaaggttgtccaggactcttgcaggagaagcaatggagtcagtgtggtgtggggagacctactttttaacctgggcttagccacctgctctgtgatccagggcttaccttctttgggcctcggcctcctaatctgggtaatggggaggacttcattggcattgttagtcccacaggccaaggataaggttgaaatgagacggcttgtgtgtgaaaagattttggaaattacacagatgtgggcttgttattgggatgaagactgctggaagggactccttgctgtttatctactgctttgagccctcctaagttaacctgtgcctcatttgtaaaaccaccagcatcaggagtaagggggaggccagagggctcagatggacacagaattctagctttacctgcatccgctgattcagttttctgttgggatcagagtgaggatacttccatatgggtgatagcagccatgcccctgggagtcaacttcaaggatctgggacattttggtgtgcccattccttcttttcctgaactcacagtcttggggtgtttctgcacttggctatgtgtgtcttgtctgatgtctgtcttctgtagctttgcctctatcagggctggagtggtgcagcccctggcatctcagacatggttcctgcctcacttgtgggagctggaccagcctgggtttcatctcccacagtaaagctaagtaagccccacagaccttactgctactgctgctgccattaatgctgtgctcactatcttgtccaggattttaaggatgtcagactgctgtagatgactcaataaatgttttgccatttt

SEQ ID NO: 61737 - DNA, 348 bp, Homo sapiens
gcggccgctccaacatcagaatggtaacaccaaaatgtcccagatccttgaagttgactcccaggggcatggctgcacttggctatgtgtgtcttgtctgatgtctgtcttctgtagctttgcctctatcagggctggagtggtgcagcccctggcatctcagacatggttcctgcctcacttgtgggagctggaccagcctgggtttcatctcccacagtaaagctaagtaagccccacagaccttactgctactgctgctgccattaatgctgtgctcactatcttgtccaggattttaaggatgtcagactgctgtagatgactcaataaatgttttgccatttt

SEQ ID NO: 61738 - DNA, 3678 bp, Homo sapiens
atctctctgagacctctgcaaagatgtcccttttatgcccttgaccttgactcaccatgggctgctggggtgtcgggagaagccacacccaacatgcccattagcagaggctgctgctgatgtggcagctgctccctaccacccgccctggctccccagctgcaggttgcacaccctcagcctgagaatgtaaaatagggcagtgcccagctggggaggtagaggaaagtgctagagtacatggtccgtgtgtggcctagctcattccatgtcagcatttggtgttactcctgtccaaattctgtttgcagacttgtttcatgatgatgctctggaatgcttggggactttgggtggaggaggatgttacttcattttataaagaggaaggggcctgggagacttgggaaaatgtttctggagaggctttcagagtggctggaaaaggctcttgttgctgtaatttagagaggagctctgtgtccttggccagtcaagtaagttcctggatctttggcaaagccagaggaagaaaggagctacctgccctttcctgggcatgcttggtgactcagattgatcttggagtgtgcagtggcccttctaccctgcacctgacctcatgatcccctccacctgcactggtgtgcattactgaagcaagggtcctgtggacatcttgcattttgggcactgctagggggtctgggctgcttggaaggagccatggcctagggttcagggaactagactctatcccagttgggttcagactgctgtgactgtggacacgatgctccttgttctgggctccagttttcccatttgtgagatgaggcaacttccaatgcttctctaggccctgcacgtaagtgatttttccagttcaaagtcaagacaggtaaaagggcattcatcattgtgcctcatatcaggttttgatgaatatatgtgtgtgtgtgtgtgtgtgtgtgtgtgtgtgtgtagagggatggacaggatgctgtttattttccctttcttggaaatggaccttctgtcccttccatttggacaccacagtggaagctggtggcctggaaggaaggattaggtcatggacatttgaacaggtgccttgggcatgatgtatagatgcagtcatatataccttgctggggtggggtgccacctccagtggccagctccagatccaaggagcagccccctggggatggaccccattcattcatcatgactcccaacagttttcattgtggaagaagaaactttggcattatagagacatcatcacaaaacagtaaaaacaaaatcaaccctgaaccccatgcactgtgctgcttcctgagcctggccctgcatcctcatagaggtgccgggttcctattggttagttggttgtttttccgtctgagtgaatttttgccagtcttgtgagcagatgtacctgatgtattctcaatgttccaagaggttctggccttcagggtcacaggcagtagggggacagcataaggtctatgtaaaacccttccctctctgaccctctgttttcaaatctgtaaaatgggcaataagactagatgatttgtatatagcccaatgcatctctggaactctgtctaaacaccagccatctacttggaatgggccccaggactgtggtatttgcctgggccaggaaaggataagaaatcctgtcatgtgaagacagcttgagaggcttgagaaaagtggggctggggagaagcaggcttgtcagactccacccctgttgatgatcattcctgggaaggggtttctcgttctatgcaatcctaaaggacgaaactcacccatgggaggccgaattctccttgggatgaagaaatttctctttccctgtcatgagtgtccagccagggagcagggaggcagtgtcagggagggactctcatcctggaggaaatgggattccaagtcaaggatgctgaggctgtcagggagccagagaggggggtccaagtgcgggatgtgggtggctctgtggttcagtggctctgtggtagttcctagcactgcagacttcatgactccccacttaagtccaagtcacattgtctatcccagtgtgtagctctgtcaccctgcttgacacatccagtggcctacagcgactcttctctaaccccaccccctccaagctgggttctttgtggaagaaggacagggagctagagccaagccctaggcttgagagacacctgcatctataatccccgccaaggatgcccactcacctctctcatctgatcctcactctttgtggaagggaaagctcaaagggactctctctctctctctcttttttttttttttggagtagtacccttgccctcttcatggccacttcaaagtgaagccagcaaagtgataatactttatcatttagtattatcataaagtattaatactttgtcataaagtcctccttgagcccaggggaccatggaagtcagctagaagagccctgagcaaggagcaaggacttgggcttctccacgctttgctcctggcttgtttgaccttgactcattccccatatgtctttgaggaggctcacaaaatactaaagctgggaggaaacttggagatctataggtcaaacctccccattgggctgatgagaaaatacacgcaggcctagcatggtgcctgccaccatggtgggatccagtatgttttataaatctgaatgagtaaatggctcaccaatttatgcatagccctgcacatgagcagaatgtgacactcaaagcatccatgcagtacgcatgtaaccttgcacaggagtggggctctggtgaccgaaggttgtccaggactcttgcaggagaagcaatggagtcagtgtggtgtggggagacctactttttaacctgggcttagccacctgctctgtgatccagggcttaccttctttgggcctcggcctcctaatctgggtaatggggaggacttcattggcattgttagtcccacaggccaaggataaggttgaaatgagacggcttgtgtgtgaaaagattttggaaattacacagatgtgggcttgttattgggatgaagactgctggaagggactccttgctgtttatctactgctttgagccctcctaagttaacctgtgcctcatttgtaaaaccaccagcatcaggagtaagggggaggccagagggctcagatggacacagaattctagctttacctgcatccgctgattcagttttctgttgggatcagagtgaggatacttccatatgggtgatagcagccatgcccctgggagtcaacttcaaggatctgggacattttggtgtgcccattccttcttttcctgaactcacagtcttggggtgtttctgcacttggctatgtgtgtcttgtctgatgtctgtcttctgtagctttgcctctatcagggctggagtggtgcagcccctggcatctcagacatggttcctgcctcacttgtgggagctggaccagcctgggtttcatctcccacagtaaagctaagtaagccccacagaccttactgctactgctgctgccattaatgctgtgctcactatcttgtccaggattttaaggatgtcagactgctgtagatgactcaataaatgttttgccatttt

SEQ ID NO: 61739 - DNA, 2000 bp, Homo sapiens
ggccatagctgattcctgagggtaaaacgacggcagggaaagacccaagaatgacgagggctggttccggagcagaaaagaccgactccacccctgttgatgatcattcctgggaaggggtttctcgttctatgcaatcctaaaggacgaaactcacccatgggaggccgaattctccttgggatgaagaaatttctctttccctgtcatgagtgtccagccagggagcagggaggcagtgtcagggagggactctcatcctggaggaaatgggattccaagtcaaggatgctgaggctgtcagggagccagagaggggggtccaagtgcgggatgtgggtggctctgtggttcagtggctctgtggtagttcctagcactgcagacttcatgactccccacttaagtccaagtcacattgtctatcccagtgtgtagctctgtcaccctgcttgacacatccagtggcctacagcgactcttctctaaccccaccccctccaagctgggttctttgtggaagaaggacagggagctagagccaagccctaggcttgagagacacctgcatctataatccccgccaaggatgcccactcacctctctcatctgatcctcactctttgtggaagggaaagctcaaagggactctctctctctctctcttttttttttttttggagtagtacccttgccctcttcatggccacttcaaagtgaagccagcaaagtgataatactttatcatttagtattatcataaagtattaatactttgtcataaagtcctccttgagcccaggggaccatggaagtcagctagaagagccctgagcaaggagcaaggacttgggcttctccacgctttgctcctggcttgtttgaccttgactcattccccatatgtctttgaggaggctcacaaaatactaaagctgggaggaaacttggagatctataggtcaaacctccccattgggctgatgagaaaatacacgcaggcctagcatggtgcctgccaccatggtgggatccagtatgttttataaatctgaatgagtaaatggctcaccaatttatgcatagccctgcacatgagcagaatgtgacactcaaagcatccatgcagtacgcatgtaaccttgcacaggagtggggctctggtgaccgaaggttgtccaggactcttgcaggagaagcaatggagtcagtgtggtgtggggagacctactttttaacctgggcttagccacctgctctgtgatccagggcttaccttctttgggcctcggcctcctaatctgggtaatggggaggacttcattggcattgttagtcccacaggccaaggataaggttgaaatgagacggcttgtgtgtgaaaagattttggaaattacacagatgtgggcttgttattgggatgaagactgctggaagggactccttgctgtttatctactgctttgagccctcctaagttaacctgtgcctcatttgtaaaaccaccagcatcaggagtaagggggaggccagagggctcagatggacacagaattctagctttacctgcatccgctgattcagttttctgttgggatcagagtgaggatacttccatatgggtgatagcagccatgcccctgggagtcaacttcaaggatctgggacattttggtgtgcccattccttcttttcctgaactcacagtcttggggtgtttctgcacttggctatgtgtgtcttgtctgatgtctgtcttctgtagctttgcctctatcagggctggagtggtgcagcccctggcatctcagacatggttcctgcctcacttgtgggagctggaccagcctgggtttcatctcccacagtaaagctaagtaagccccacagaccttactgctactgctgctgccattaatgctgtgctcactatcttgtccaggattttaaggatgtcagactgctgtagatgactcaataaatgttttgccatttt

SEQ ID NO: 61740 - DNA, 3103 bp, Homo sapiens
aaaggaaacacaagttgcttttgataacacatgatgcaaagaaagaattagaaagaatgagcaatgaagccggtataaatgacaaacaagtgtccaaaggcccaagaagttactaccaaaagctttcaaacaatattggtttatctttaaagacacatccatagcatactttaaaaataaggaacttgaacaaggagaaccactagaaaaactaaatcttagaggctgcgaagttgtgcccgatgtaaatgtagcaggaagaaaatttggaatcaagttactaatccctgttgccgatggtatgaatgaaatgtatttgagatgtgaccatgagaatcaatacgcccaatggatggctgcctgcatgttggcatcgaagggcaaaaccatggcagacagctcctaccagccagaggtcctcaacatcctttcatttctgaggatgaaaaacaggaactctgcatctcaggtggcttccagtctcgaaaacatggatatgaacccagaatgttttgtgtcaccacggtgtgcaaaaagacacaaatccaaacagctggccgcccggatcctggaggcgcaccagaacgtggcccagatgcccctggtcgaagccaagctgcggttcatccaggcgtggcagtcactgcctgagtttggcctcacctactaccttgtcagatttaaaggaagcaaaaaagatgacattctgggagtttcatataacaggttgattaaaattgatgcagccaccgggattccagtgacaacatggagattcacaaatatcaaacagtggaatgtaaactgggaaacccggcaggtggtcatcgagtttgaccaaaacgtctttactgctttcacctgcctgagtgcagattgcaagattgtgcacgagtacattggcggctacattttcttgtccacccgctccaaggaccagaatgaaacactcgatgaggacttgttccacaaattgaccggcggtcaggattgaaacaagcacgcgtgctcggctcacaccaacaaggcaagccaaaggcgcccctccccagagggatccctaacgtgcccagcatgtagattctggactaacagacaacatacattcaccgctggtcacccagatcctcattcaaacccactgctggcacatccctttccttactttgccctgtgctaccagccacggaaggagcctctcttgttttttctataaaatgggtaggcaggagaaaagcaggtgccctaagattgctctaaggcccagcatgtggttacagttctctgacttgcagaacctgccaggtgtatggctacaagttatcctcgtgctgatctgtctcattactaagtcaatggagaagacagaaaggtaaaaatcacgtgtagcaagaacaactcttatttcacaaactcaggtatgaaacgaaacgcctgtccttcatggaactgcttttagctcctgtcttttcaaaatggcagagggagttcctacacacactttttccctggaggccaaggtctaggggtagaaaggggaggggtggggctaccaggtagcagttgacaacccaaggtcagaggagtggccctcagtgtcatctgtccacagtgatacctgccaagatgaccactgacccacatctggtcttagtcattggtctcctcagatttctggggccacctgcaagccccattccattcctacagatctctcagccacctgtaagtcctttgtgaagatgtgggtgacacagggggacaggaaaacccatttctcaacccagatccatgtctccactgcttctactctgggttgggattcaggaagacaggcacagtcctctctgttcatagaaacacctgccagtgtcaaggattccagtcaggtgtctatcccaactggtcagggagagaagggcagacccattctcaaagaccaccatgtccaaggtctgacagctccccactggctgcccccacaggggctttaggctggtctgggtcatggggaagcgtccctcttatcgctggtctgtgttctcctggatttggtatctatgttggtacgactcctggccttttatctaaaggactttggcttttgtaaatcacaagccaataatagacttttttctccccctctgttttttgctgtgtcatctctgccttgagactgccttgagacagtgcttgccttgagagagtgagccaattaacagctgcctgaattgtcattttccattttggtttgttagaggtgggaggggtgggttttgagaaggtcaaaagcaataccagaagtaaagggaaatatcagacaatattttattattttttcatagatgttctgccacacaaagaacttggggtgtaaggataaggcaaaagctccaatcccatttttcagttctcctaggatgcacccctcagggagcctggccagagttccgaggcccgtgagcgtcagctgttgctttattttccatcaaagccctctgagaagtgagacctcagcaattccgggagccacatagagacagacttggcaagggaccccctggttctgagccagtagctgccatctggaaattcctcttttagcctctccttagaggtgaatgtgaatgaagcctcccaggcacccgctgaatttctgaggccttgcttaaagctcagaagtggtttaggcatttggaaaatctggttcacatcataaagaacttgatttgaaatgttttctatagaaacaagtgctaagtgtaccgtattatacttgatgttggtcatttctcagtcctatttctcagttctattattttagaacctagtcagttctttaagattataactggtcctacattaaaataatgcttctcgatgtcagattttacctgtttgctgctgagaacatctctgcctaatttaccaaagccagaccttcagttcaacatgcttccttagcttttcatagttgtctgacatttccatgaaaacaaaggaaccaactttgttttaaccaaactttgtttggttacagttttcaggggagcgtttcttccatgacacacagcaacatcccaaagaaataaacaagtgtgac

SEQ ID NO: 61741 - DNA, 5153 bp, Homo sapiens
cctggagtctcccctggtcgggagcctcagccttctggagactgacaccaccctcttactcagagacgaatcgttttgtcgttgccttcacctccctgaccacaagtgctccggggctctttctaagggaggcagctgttctaggcgggaggctggagtctcctgggcctggacgcaccccggggtgtgagtgatgggtatgcctgaaaggaggggaagtggcgcggctttaatcatctgggctagtccccggcgggcctgggggaacagggaaactggaggcggccttaaagcgtcaggatgagacatcgcaagaggagctgcagatactgagcgtgcgccccgggttctcgccgccttctctccgccgagcagcccttcggccaccctttgcccttaaaaatctgcagactgcgcctcctctccgcgggagcgagacctagcaggcccggggctgggcgtgccctcgcctgccacgctgcgcgctgccctcagccgggccgctggggccgtgcagtgcaccgggcacgccgcgccaggctgggggcaggcaccgagcctccgtgggaggtcccgaggcagcttcgcctgctcgccctggctccagccctcacctgccgcagccttagctgagcagccgccgccactgggcgccccccgctccccacttcgccagcgcccgctcctcggctcggcccggggtagtttgtagggacgcagctctccacgtgcgcgactgcgaggctggacgctacgggctcctggaaaggagacaccagcatttgccacaatgctgtcatccactgactttacatttgcttcctgggagcttgtggtccgcgttgaccatcccaatgaagagcagcagaaagacgtcacactgagagtatctggagaccttcatgttggaggagtgatgctcaagttagtagaacagatcaatatatcccaagactggtcagactttgctctttggtgggaacagaagcattgctggcttctgaaaacccactggaccctggacaaatatggggtccaggcagatgcaaagcttctcttcacccctcagcataaaatgctgcgccttcgtctgccgaatttgaagatggtgaggttgcgagtcagcttctcagctgtggtttttaaagctgtcagtgatatctgcaaaatcctgaatattagaagatcagaagagctttccttgttaaagccgtctggtgactattttaagaagaagaagaaaaaagacaaaaataataaggaacccataattgaagatattctaaacctggagagttctccaacagcttcaggttcatcagtaagtcctggtttatacagtaaaaccatgacccctatatatgaccccatcaatggaacaccagcatcatccaccatgacttggttcagtgacagccctttgacggaacaaaactgcagcatcctcgcattcagccaacccccccagtccccagaagcacttgcggatatgtaccagcctcggtctctggttgataaagccaagctcaatgcaggttggctagactcctcacgctcccttatggaacaaggcatccaagaggatgagcagctgctcttacgatttaaatattattctttcttcgacttgaatcctaaatatgatgctgtccgaataaaccaactctatgagcaagccaggtgggccattctcttagaagaaattgattgcacagaggaagaaatgttgatctttgcagctctacagtaccacattagcaaactgtcgttgtctgctgaaacacaggattttgcaggcgagtccgaggttgatgaaatagaagcggcgctttctaatttggaagtaaccctagaaggtggaaaagcggacagccttttggaggacattactgatatccctaaacttgcagataatctcaaattatttaggcccaagaagttactaccaaaagctttcaaacaatattggtttatctttaaagacacatccatagcatactttaaaaataaggaacttgaacaaggagaaccactagaaaaactaaatcttagaggctgcgaagttgtgcccgatgtaaatgtagcaggaagaaaatttggaatcaagttactaatccctgttgccgatggtatgaatgaaatgtatttgagatgtgaccatgagaatcaatacgcccaatggatggctgcctgcatgttggcatcgaagggcaaaaccatggcagacagctcctaccagccagaggtcctcaacatcctttcatttctgaggatgaaaaacaggaactctgcatctcaggtggcttccagtctcgaaaacatggatatgaacccagaatgttttgtgtcaccacggtgtgcaaaaagacacaaatccaaacagctggccgcccggatcctggaggcgcaccagaacgtggcccagatgcccctggtcgaagccaagctgcggttcatccaggcgtggcagtcactgcctgagtttggcctcacctactaccttgtcagatttaaaggaagcaaaaaagatgacattctgggagtttcatataacaggttgattaaaattgatgcagccaccgggattccagtgacaacatggagattcacaaatatcaaacagtggaatgtaaactgggaaacccggcaggtggtcatcgagtttgaccaaaacgtctttactgctttcacctgcctgagtgcagattgcaagattgtgcacgagtacattggcggctacattttcttgtccacccgctccaaggaccagaatgaaacactcgatgaggacttgttccacaaattgaccggcggtcaggattgaaacaagcacgcgtgctcggctcacaccaacaaggcaagccaaaggcgcccctccccagagggatccctaacgtgcccagcatgtagattctggactaacagacaacatacattcaccgctggtcacccagatcctcattcaaacccactgctggcacatccctttccttactttgccctgtgctaccagccacggaaggagcctctcttgttttttctataaaatgggtaggcaggagaaaagcaggtgccctaagattgctctaaggcccagcatgtggttacagttctctgacttgcagaacctgccaggtgtatggctacaagttatcctcgtgctgatctgtctcattactaagtcaatggagaagacagaaaggtaaaaatcacgtgtagcaagaacaactcttatttcacaaactcaggtatgaaacgaaacgcctgtccttcatggaactgcttttagctcctgtcttttcaaaatggcagagggagttcctacacacactttttccctggaggccaaggtctaggggtagaaaggggaggggtggggctaccaggtagcagttgacaacccaaggtcagaggagtggccctcagtgtcatctgtccacagtgatacctgccaagatgaccactgacccacatctggtcttagtcattggtctcctcagatttctggggccacctgcaagccccattccattcctacagatctctcagccacctgtaagtcctttgtgaagatgtgggtgacacagggggacaggaaaacccatttctcaacccagatccatgtctccactgcttctactctgggttgggattcaggaagacaggcacagtcctctctgttcatagaaacacctgccagtgtcaaggattccagtcaggtgtctatcccaactggtcagggagagaagggcagacccattctcaaagaccaccatgtccaaggtctgacagctccccactggctgcccccacaggggctttaggctggtctgggtcatggggaagcgtccctcttatcgctggtctgtgttctcctggatttggtatctatgttggtacgactcctggccttttatctaaaggactttggcttttgtaaatcacaagccaataatagacttttttctccccctctgttttttgctgtgtcatctctgccttgagactgccttgagacagtgcttgccttgagagagtgagccaattaacagctgcctgaattgtcattttccattttggtttgttagaggtgggaggggtgggttttgagaaggtcaaaagcaataccagaagtaaagggaaatatcagacaatattttattattttttcatagatgttctgccacacaaagaacttggggtgtaaggataaggcaaaagctccaatcccatttttcagttctcctaggatgcacccctcagggagcctggccagagttccgaggcccgtgagcgtcagctgttgctttattttccatcaaagccctctgagaagtgagacctcagcaattccgggagccacatagagacagacttggcaagggaccccctggttctgagccagtagctgccatctggaaattcctcttttagcctctccttagaggtgaatgtgaatgaagcctcccaggcacccgctgaatttctgaggccttgcttaaagctcagaagtggtttaggcatttggaaaatctggttcacatcataaagaacttgatttgaaatgttttctatagaaacaagtgctaagtgtaccgtattatacttgatgttggtcatttctcagtcctatttctcagttctattattttagaacctagtcagttctttaagattataactggtcctacattaaaataatgcttctcgatgtcagattttacctgtttgctgctgagaacatctctgcctaatttaccaaagccagaccttcagttcaacatgcttccttagcttttcatagttgtctgacatttccatgaaaacaaaggaaccaactttgttttaaccaaactttgtttggttacagttttcaggggagcgtttcttccatgacacacagcaacatcccaaagaaataaacaagtgtgacaaaaaaaaaaaaaaacaaacctaaatgctactgttccaaagagcaacttgatggttttttttaatactgagtgcaaaaggtcacccaaattcctatgatgaaattttaaattaatgggcacctttcaacatcatttgcttccttatctacagttgattcagaaatctgcattttttattcttttatatgacttttaagtaaaagatttatatggatttga

SEQ ID NO: 61742 - DNA, 3450 bp, Homo sapiens
  misc_feature (3295)..(3295): n is a, c, g, or t
cctggagtctcccctggtcgggagcctcagccttctggagactgacaccaccctcttactcagagacgaatcgttttgtcgttgccttcacctccctgaccacaagtgctccggggctctttctaagggaggcagctgttctaggcgggaggctggagtctcctgggcctggacgcaccccggggtgtgagtgatgggtatgcctgaaaggaggggaagtggcgcggctttaatcatctgggctagtccccggcgggcctgggggaacagggaaactggaggcggccttaaagcgtcaggatgagacatcgcaagaggagctgcagatactgagcgtgcgccccgggttctcgccgccttctctccgccgagcagcccttcggccaccctttgcccttaaaaatctgcagactgcgcctcctctccgcgggagcgagacctagcaggcccggggctgggcgtgccctcgcctgccacgctgcgcgctgccctcagccgggccgctggggccgtgcagtgcaccgggcacgccgcgccaggctgggggcaggcaccgagcctccgtgggaggtcccgaggcagcttcgcctgctcgccctggctccagccctcacctgccgcagccttagctgagcagccgccgccactgggcgccccccgctccccacttcgccagcgcccgctcctcggctcggcccggggtagtttgtagggacgcagctctccacgtgcgcgactgcgaggctggacgctacgggctcctggaaaggagacaccagcatttgccacaatgctgtcatccactgactttacatttgcttcctgggagcttgtggtccgcgttgaccatcccaatgaagagcagcagaaagacgtcacactgagagtatctggagaccttcatgttggaggagtgatgctcaagttagtagaacagatcaatatatcccaagactggtcagactttgctctttggtgggaacagaagcattgctggcttctgaaaacccactggaccctggacaaatatggggtccaggcagatgcaaagcttctcttcacccctcagcataaaatgctgcgccttcgtctgccgaatttgaagatggtgaggttgcgagtcagcttctcagctgtggtttttaaagctgtcagtgatatctgcaaaatcctgaatattagaagatcagaagagctttccttgttaaagccgtctggtgactattttaagaagaagaagaaaaaagacaaaaataataaggaacccataattgaagatattctaaacctggagagttctccaacagcttcaggttcatcagtaagtcctggtttatacagtaaaaccatgacccctatatatgaccccatcaatggaacaccagcatcatccaccatgacttggttcagtgacagccctttgacggaacaaaactgcagcatcctcgcattcagccaacccccccagtccccagaagcacttgcggatatgtaccagcctcggtctctggttgataaagccaagctcaatgcaggttggctagactcctcacgctcccttatggaacaaggcatccaagaggatgagcagctgctcttacgatttaaatattattctttcttcgacttgaatcctaaatatgatgctgtccgaataaaccaactctatgagcaagccaggtgggccattctcttagaagaaattgattgcacagaggaagaaatgttgatctttgcagctctacagtaccacattagcaaactgtcgttgtctgctgaaacacaggattttgcaggcgagtccgaggttgatgaaatagaagcggcgctttctaatttggaagtaaccctagaaggtggaaaagcggacagccttttggtatgaactttttctgatcacccagaactgtggctttcttctgattgacaagtataaatgaacttttctttattagaagagaatatttcatctgattttgaaaaaaaaaaaaaaaaaagatgctcttcacctaacaagcttcaacctagtgaactaacttttcatgggttagctccacaagggactatattttcatctctactaatgacaatacttttgtgttatatttcttcctagaggtaagttggcatggtgtgaaggagccactgctgagggctccacttcactagcatggaatgtggacttggtccctaaacttaagtctagaaaataccaccctgtctattacatggagcagctgtgagaatagaataaagaaaattgtttccttttttcttttttctgagacaatcagtagtgcaatcaaggctcactgcagcctcagcctcctgggctcaagcagtcctcccatctcagcctccggagtagctgggactacagacacacactactgtgcctggctaatttttgtattttttgtagagacaaggtttgccatattccccaggctggtctctaactccagggctcaagtgactctcccacctcagcatcccaaagtgttgagattacaggcatgagccactgtgaccggccaagaaaattctttaccgataaaaaccttatttctatttacttggtcatccatttcaaccagacaagcttgaccaaagttgtggcctttttctggaacattgcaaaaagtttctgaatgcttttgacttcaggagacaaacgaaaaccctccaataaaacaaagaaaactgttttgtcatctctttctccttatccatgaaaggtgaatgtcagctttataactgaaatgcccctcctgtttaattcactcatgaggtgccacacttttgtttaacttcggccatgggaataattattaatcacattgaatcagagaggtgggtccaccataattagatgtaagcagtaatcatggattagaattagttactatattcttctgcattcaatgtatgttctcttatcattaaatgtcctaaaataagaaactggtctcattcaggagcaaatacttcgtgcaaactaaacgccaagattctgtagagatgcagggccctgtgtcacgtttatagaagacataggccccatgaacttggagttctctgttgtctactttctccgctgaataaatacaacaggaaagtaattctttttagaataaataaaaagttatgtcctccctcccttaatagttttacgtgatgctaacaataggcttttcagtttgaaaacaggcaccagcctacattacagaatgaactttgaacaaggttcactttgaaagtttaatcagtgacctaggtgtagcaggagttaccnactcttatataaaaattataaaatcttttgtttgcatataaaagtagtcatttctaattcagatttttaacttgaatgatagttatagggagtacttgatccactttttcatttttttcatctcgtttttcatttttgtaatctacgacacaaac

SEQ ID NO: 61743 - DNA, 4769 bp, Homo sapiens
cctggagtctcccctggtcgggagcctcagccttctggagactgacaccaccctcttactcagagacgaatcgttttgtcgttgccttcacctccctgaccacaagtgctccggggctctttctaagggaggcagctgttctaggcgggaggctggagtctcctgggcctggacgcaccccggggtgtgagtgatgggtatgcctgaaaggaggggaagtggcgcggctttaatcatctgggctagtccccggcgggcctgggggaacagggaaactggaggcggccttaaagcgtcaggatgagacatcgcaagaggagctgcagatactgagcgtgcgccccgggttctcgccgccttctctccgccgagcagcccttcggccaccctttgcccttaaaaatctgcagactgcgcctcctctccgcgggagcgagacctagcaggcccggggctgggcgtgccctcgcctgccacgctgcgcgctgccctcagccgggccgctggggccgtgcagtgcaccgggcacgccgcgccaggctgggggcaggcaccgagcctccgtgggaggtcccgaggcagcttcgcctgctcgccctggctccagccctcacctgccgcagccttagctgagcagccgccgccactgggcgccccccgctccccacttcgccagcgcccgctcctcggctcggcccggggtagtttgtagggacgcagctctccacgtgcgcgactgcgaggctggacgctacgggctcctggaaaggagacaccagcatttgccacaatgctgtcatccactgactttacatttgcttcctgggagcttgtggtccgcgttgaccatcccaatgaagagcagcagaaagacgtcacactgagagtatctggagaccttcatgttggaggagtgatgctcaagttagtagaacagatcaatatatcccaagactggtcagactttgctctttggtgggaacagaagcattgctggcttctgaaaacccactggaccctggacaaatatggggtccaggcagatgcaaagcttctcttcacccctcagcataaaatgctgcgccttcgtctgccgaatttgaagatggtgaggttgcgagtcagcttctcagctgtggtttttaaagctgtcagtgatatctgcaaaatcctgaatattagaagatcagaagagctttccttgttaaagccgtctggtgactattttaagaagaagaagaaaaaagacaaaaataataaggaacccataattgaagatattctaaacctggagagttctccaacagcttcaggttcatcagtaagtcctggtttatacagtaaaaccatgacccctatatatgaccccatcaatggaacaccagcatcatccaccatgacttggttcagtgacagccctttgacggaacaaaactgcagcatcctcgcattcagccaacccccccagtccccagaagcacttgcggatatgtaccagcctcggtctctggttgataaagccaagctcaatgcaggttggctagactcctcacgctcccttatggaacaaggcatccaagaggatgagcagctgctcttacgatttaaatattattctttcttcgacttgaatcctaaatatgatgctgtccgaataaaccaactctatgagcaagccaggtgggccattctcttagaagaaattgattgcacagaggaagaaatgttgatctttgcagctctacagtaccacattagcaaactgtcgttgtctgctgaaacacaggattttgcaggcgagtccgaggttgatgaaatagaagcggcgctttctaatttggaagtaaccctagaaggtggaaaagcggacagccttttggaggacattactgatatccctaaacttgcagataatctcaaattatttaggcccaagaagttactaccaaaagctttcaaacaatattggtttatctttaaagacacatccatagcatactttaaaaataaggaacttgaacaaggagaaccactagaaaaactaaatcttagaggctgcgaagttgtgcccgatgtaaatgtagcaggaagaaaatttggaatcaagttactaatccctgttgccgatggtatgaatgaaatgtatttgagatgtgaccatgagaatcaatacgcccaatggatggctgcctgcatgttggcatcgaagggcaaaaccatggcagacagctcctaccagccagaggtcctcaacatcctttcatttctgaggatgaaaaacaggaactctgcatctcaggtggcttccagtctcgaaaacatggatatgaacccagaatgttttgtgtcaccacggtgtgcaaaaagacacaaatccaaacagctggccgcccggatcctggaggcgcaccagaacgtggcccagatgcccctggtcgaagccaagctgcggttcatccaggcgtggcagtcactgcctgagtttggcctcacctactaccttgtcagatttaaaggaagcaaaaaagatgacattctgggagtttcatataacaggttgattaaaattgatgcagccaccgggattccagtgacaacatggagattcacaaatatcaaacagtggaatgtaaactgggaaacccggcaggtggtcatcgagtttgaccaaaacgtctttactgctttcacctgcctgagtgcagattgcaagattgtgcacgagtacattggcggctacattttcttgtccacccgctccaaggaccagaatgaaacactcgatgaggacttgttccacaaattgaccggcggtcaggattgaaacaagcacgcgtgctcggctcacaccaacaaggcaagccaaaggcgcccctccccagagggatccctaacgtgcccagcatgtagattctggactaacagacaacatacattcaccgctggtcacccagatcctcattcaaacccactgctggcacatccctttccttactttgccctgtgctaccagccacggaaggagcctctcttgttttttctataaaatgggtaggcaggagaaaagcaggtgccctaagattgctctaaggcccagcatgtggttacagttctctgacttgcagaacctgccaggtgtatggctacaagttatcctcgtgctgatctgtctcattactaagtcaatggagaagacagaaaggtaaaaatcacgtgtagcaagaacaactcttatttcacaaactcaggtatgaaacgaaacgcctgtccttcatggaactgcttttagctcctgtcttttcaaaatggcagagggagttcctacacacactttttccctggaggccaaggtctaggggtagaaaggggaggggtggggctaccaggtagcagttgacaacccaaggtcagaggagtggccctcagtgtcatctgtccacagtgatacctgccaagatgaccactgacccacatctggtcttagtcattggtctcctcagatttctggggccacctgcaagccccattccattcctacagatctctcagccacctgtaagtcctttgtgaagatgtgggtgacacagggggacaggaaaacccatttctcaacccagatccatgtctccactgcttctactctgggttgggattcaggaagacaggcacagtcctctctgttcatagaaacacctgccagtgtcaaggattccagtcaggtgtctatcccaactggtcagggagagaagggcagacccattctcaaagaccaccatgtccaaggtctgacagctccccactggctgcccccacaggggctttaggctggtctgggtcatggggaagcgtccctcttatcgctggtctgtgttctcctggatttggtatctatgttggtacgactcctggccttttatctaaaggactttggcttttgtaaatcacaagccaataatagacttttttctccccctctgttttttgctgtgtcatctctgccttgagactgccttgagacagtgcttgccttgagagagtgagccaattaacagctgcctgaattgtcattttccattttggtttgttagaggtgggaggggtgggttttgagaaggtcaaaagcaataccagaagtaaagggaaatatcagacaatattttattattttttcatagatgttctgccacacaaagaacttggggtgtaaggataaggcaaaagctccaatcccatttttcagttctcctaggatgcacccctcagggagcctggccagagttccgaggcccgtgagcgtcagctgttgctttattttccatcaaagccctctgagaagtgagacctcagcaattccgggagccacatagagacagacttggcaagggaccccctggttctgagccagtagctgccatctggaaattcctcttttagcctctccttagaggtgaatgtgaatgaagcctcccaggcacccgctgaatttctgaggccttgcttaaagctcagaagtggtttaggcatttggaaaatctggttcacatcataaagaacttgatttgaaatgttttctatagaaacaagtgctaagtgtaccgtattatacttgatgttggtcatttctcagtcctatttctcagttctattattttagaacctagtcagttctttaagatgtgaaccagattttccaaatgcctaaaccacttctgagctttaagcaaggcctcagaaattcagcgggtgcctgggaggcttcattcacattc

SEQ ID NO: 61744 - DNA, 4612 bp, Homo sapiens
cctggagtctcccctggtcgggagcctcagccttctggagactgacaccaccctcttactcagagacgaatcgttttgtcgttgccttcacctccctgaccacaagtgctccggggctctttctaagggaggcagctgttctaggcgggaggctggagtctcctgggcctggacgcaccccggggtgtgagtgatgggtatgcctgaaaggaggggaagtggcgcggctttaatcatctgggctagtccccggcgggcctgggggaacagggaaactggaggcggccttaaagcgtcaggatgagacatcgcaagaggagctgcagatactgagcgtgcgccccgggttctcgccgccttctctccgccgagcagcccttcggccaccctttgcccttaaaaatctgcagactgcgcctcctctccgcgggagcgagacctagcaggcccggggctgggcgtgccctcgcctgccacgctgcgcgctgccctcagccgggccgctggggccgtgcagtgcaccgggcacgccgcgccaggctgggggcaggcaccgagcctccgtgggaggtcccgaggcagcttcgcctgctcgccctggctccagccctcacctgccgcagccttagctgagcagccgccgccactgggcgccccccgctccccacttcgccagcgcccgctcctcggctcggcccggggtagtttgtagggacgcagctctccacgtgcgcgactgcgaggctggacgctacgggctcctggaaaggagacaccagcatttgccacaatgctgtcatccactgactttacatttgcttcctgggagcttgtggtccgcgttgaccatcccaatgaagagcagcagaaagacgtcacactgagagtatctggagaccttcatgttggaggagtgatgctcaagttagtagaacagatcaatatatcccaagactggtcagactttgctctttggtgggaacagaagcattgctggcttctgaaaacccactggaccctggacaaatatggggtccaggcagatgcaaagcttctcttcacccctcagcataaaatgctgcgccttcgtctgccgaatttgaagatggtgaggttgcgagtcagcttctcagctgtggtttttaaagctgtcagtgatatctgcaaaatcctgaatattagaagatcagaagagctttccttgttaaagccgtctggtgactattttaagaagaagaagaaaaaagacaaaaataataaggaacccataattgaagatattctaaacctggagagttctccaacagcttcaggttcatcagtaagtcctggtttatacagtaaaaccatgacccctatatatgaccccatcaatggaacaccagcatcatccaccatgacttggttcagtgacagccctttgacggaacaaaactgcagcatcctcgcattcagccaacccccccagtccccagaagcacttgcggatatgtaccagcctcggtctctggttgataaagccaagctcaatgcaggttggctagactcctcacgctcccttatggaacaaggcatccaagaggatgagcagctgctcttacgatttaaatattattctttcttcgacttgaatcctaaatatgatgctgtccgaataaaccaactctatgagcaagccaggtgggccattctcttagaagaaattgattgcacagaggaagaaatgttgatctttgcagctctacagtaccacattagcaaactgtcgttgtctgctgaaacacaggattttgcaggcgagtccgaggttgatgaaatagaagcggcgctttctaatttggaagtaaccctagaaggtggaaaagcggacagccttttggaggacattactgatatccctaaacttgcagataatctcaaattatttaggcccaagaagttactaccaaaagctttcaaacaatattggtttatctttaaagacacatccatagcatactttaaaaataaggaacttgaacaaggagaaccactagaaaaactaaatcttagaggctgcgaagttgtgcccgatgtaaatgtagcaggaagaaaatttggaatcaagttactaatccctgttgccgatggtatgaatgaaatgtatttgagatgtgaccatgagaatcaatacgcccaatggatggctgcctgcatgttggcatcgaagggcaaaaccatggcagacagctcctaccagccagaggtcctcaacatcctttcatttctgaggatgaaaaacaggaactctgcatctcaggtggcttccagtctcgaaaacatggatatgaacccagaatgttttgtgtcaccacggtgtgcaaaaagacacaaatccaaacagctggccgcccggatcctggaggcgcaccagaacgtggcccagatgcccctggtcgaagccaagctgcggttcatccaggcgtggcagtcactgcctgagtttggcctcacctactaccttgtcagatttaaaggaagcaaaaaagatgacattctgggagtttcatataacaggttgattaaaattgatgcagccaccgggattccagtgacaacatggagattcacaaatatcaaacagtggaatgtaaactgggaaacccggcaggtggtcatcgagtttgaccaaaacgtctttactgctttcacctgcctgagtgcagattgcaagattgtgcacgagtacattggcggctacattttcttgtccacccgctccaaggaccagaatgaaacactcgatgaggacttgttccacaaattgaccggcggtcaggattgaaacaagcacgcgtgctcggctcacaccaacaaggcaagccaaaggcgcccctccccagagggatccctaacgtgcccagcatgtagattctggactaacagacaacatacattcaccgctggtcacccagatcctcattcaaacccactgctggcacatccctttccttactttgccctgtgctaccagccacggaaggagcctctcttgttttttctataaaatgggtaggcaggagaaaagcaggtgccctaagattgctctaaggcccagcatgtggttacagttctctgacttgcagaacctgccaggtgtatggctacaagttatcctcgtgctgatctgtctcattactaagtcaatggagaagacagaaaggtaaaaatcacgtgtagcaagaacaactcttatttcacaaactcaggtatgaaacgaaacgcctgtccttcatggaactgcttttagctcctgtcttttcaaaatggcagagggagttcctacacacactttttccctggaggccaaggtctaggggtagaaaggggaggggtggggctaccaggtagcagttgacaacccaaggtcagaggagtggccctcagtgtcatctgtccacagtgatacctgccaagatgaccactgacccacatctggtcttagtcattggtctcctcagatttctggggccacctgcaagccccattccattcctacagatctctcagccacctgtaagtcctttgtgaagatgtgggtgacacagggggacaggaaaacccatttctcaacccagatccatgtctccactgcttctactctgggttgggattcaggaagacaggcacagtcctctctgttcatagaaacacctgccagtgtcaaggattccagtcaggtgtctatcccaactggtcagggagagaagggcagacccattctcaaagaccaccatgtccaaggtctgacagctccccactggctgcccccacaggggctttaggctggtctgggtcatggggaagcgtccctcttatcgctggtctgtgttctcctggatttggtatctatgttggtacgactcctggccttttatctaaaggactttggcttttgtaaatcacaagccaataatagacttttttctccccctctgttttttgctgtgtcatctctgccttgagactgccttgagacagtgcttgccttgagagagtgagccaattaacagctgcctgaattgtcattttccattttggtttgttagaggtgggaggggtgggttttgagaaggtcaaaagcaataccagaagtaaagggaaatatcagacaatattttattattttttcatagatgttctgccacacaaagaacttggggtgtaaggataaggcaaaagctccaatcccatttttcagttctcctaggatgcacccctcagggagcctggccagagttccgaggcccgtgagcgtcagctgttgctttattttccatcaaagccctctgagaagtgagacctcagcaattccgggagccacatagagacagacttggcaagggaccccctggttctgagccagtagctgccatctggaaattcctcttttagcctctccttagaggtgaatgtgaatgaagcctcccaggcacccgctgaatttctgaggccttgcttaaagctcagaagtggtttaggcatttggaaaatctggttcacatcataaagatctgtctagggtctaaaataatagaactgagaaataggactgagaaatgaccaacatcaa

SEQ ID NO: 61745 - DNA, 2559 bp, Homo sapiens
cctggagtctcccctggtcgggagcctcagccttctggagactgacaccaccctcttactcagagacgaatcgttttgtcgttgccttcacctccctgaccacaagtgctccggggctctttctaagggaggcagctgttctaggcgggaggctggagtctcctgggcctggacgcaccccggggtgtgagtgatgggtatgcctgaaaggaggggaagtggcgcggctttaatcatctgggctagtccccggcgggcctgggggaacagggaaactggaggcggccttaaagcgtcaggatgagacatcgcaagaggagctgcagatactgagcgtgcgccccgggttctcgccgccttctctccgccgagcagcccttcggccaccctttgcccttaaaaatctgcagactgcgcctcctctccgcgggagcgagacctagcaggcccggggctgggcgtgccctcgcctgccacgctgcgcgctgccctcagccgggccgctggggccgtgcagtgcaccgggcacgccgcgccaggctgggggcaggcaccgagcctccgtgggaggtcccgaggcagcttcgcctgctcgccctggctccagccctcacctgccgcagccttagctgagcagccgccgccactgggcgccccccgctccccacttcgccagcgcccgctcctcggctcggcccggggtagtttgtagggacgcagctctccacgtgcgcgactgcgaggctggacgctacgggctcctggaaaggagacaccagcatttgccacaatgctgtcatccactgactttacatttgcttcctgggagcttgtggtccgcgttgaccatcccaatgaagagcagcagaaagacgtcacactgagagtatctggagaccttcatgttggaggagtgatgctcaagttagtagaacagatcaatatatcccaagactggtcagactttgctctttggtgggaacagaagcattgctggcttctgaaaacccactggaccctggacaaatatggggtccaggcagatgcaaagcttctcttcacccctcagcataaaatgctgcgccttcgtctgccgaatttgaagatggtgaggttgcgagtcagcttctcagctgtggtttttaaagctgtcagtgatatctgcaaaatcctgaatattagaagatcagaagagctttccttgttaaagccgtctggtgactattttaagaagaagaagaaaaaagacaaaaataataaggaacccataattgaagatattctaaacctggagagttctccaacagcttcaggttcatcagtaagtcctggtttatacagtaaaaccatgacccctatatatgaccccatcaatggaacaccagcatcatccaccatgacttggttcagtgacagccctttgacggaacaaaactgcagcatcctcgcattcagccaacccccccagtccccagaagcacttgcggatatgtaccagcctcggtctctggttgataaagccaagctcaatgcaggttggctagactcctcacgctcccttatggaacaaggcatccaagaggatgagcagctgctcttacgatttaaatattattctttcttcgacttgaatcctaaatatgatgctgtccgaataaaccaactctatgagcaagccaggtgggccattctcttagaagaaattgattgcacagaggaagaaatgttgatctttgcagctctacagtaccacattagcaaactgtcgttgtctgctgaaacacaggattttgcaggcgagtccgaggttgatgaaatagaagcggcgctttctaatttggaagtaaccctagaaggtggaaaagcggacagccttttggaggacattactgatatccctaaacttgcagataatctcaaattatttaggcccaagaagttactaccaaaagctttcaaacaatattggtttatctttaaagacacatccatagcatactttaaaaataaggaacttgaacaaggagaaccactagaaaaactaaatcttagaggctgcgaagttgtgcccgatgtaaatgtagcaggaagaaaatttggaatcaagttactaatccctgttgccgatggtatgaatgaaatgtatttgagatgtgaccatgagaatcaatacgcccaatggatggctgcctgcatgttggcatcgaagggcaaaaccatggcagacagctcctaccagccagaggtcctcaacatcctttcatttctgaggatgaaaaacaggaactctgcatctcaggtggcttccagtctcgaaaacatggatatgaacccagaatgttttgtgtcaccacggtgtgcaaaaagacacaaatccaaacagctggccgcccggatcctggaggcgcaccagaacgtggcccagatgcccctggtcgaagccaagctgcggttcatccaggcgtggcagtcactgcctgagtttggcctcacctactaccttgtcagatttataggatagctttattagatgtcattctgggttttttatatatagtt

SEQ ID NO: 61746 - DNA, 1718 bp, Homo sapiens
cctggagtctcccctggtcgggagcctcagccttctggagactgacaccaccctcttactcagagacgaatcgttttgtcgttgccttcacctccctgaccacaagtgctccggggctctttctaagggaggcagctgttctaggcgggaggctggagtctcctgggcctggacgcaccccggggtgtgagtgatgggtatgcctgaaaggaggggaagtggcgcggctttaatcatctgggctagtccccggcgggcctgggggaacagggaaactggaggcggccttaaagcgtcaggatgagacatcgcaagaggagctgcagatactgagcgtgcgccccgggttctcgccgccttctctccgccgagcagcccttcggccaccctttgcccttaaaaatctgcagactgcgcctcctctccgcgggagcgagacctagcaggcccggggctgggcgtgccctcgcctgccacgctgcgcgctgccctcagccgggccgctggggccgtgcagtgcaccgggcacgccgcgccaggctgggggcaggcaccgagcctccgtgggaggtcccgaggcagcttcgcctgctcgccctggctccagccctcacctgccgcagccttagctgagcagccgccgccactgggcgccccccgctccccacttcgccagcgcccgctcctcggctcggcccggggtagtttgtagggacgcagctctccacgtgcgcgactgcgaggctggacgctacgggctcctggaaaggagacaccagcatttgccacaatgctgtcatccactgactttacatttgcttcctgggagcttgtggtccgcgttgaccatcccaatgaagagcagcagaaagacgtcacactgagagtatctggagaccttcatgttggaggagtgatgctcaagttagtagaacagatcaatatatcccaagactggtcagactttgctctttggtgggaacagaagcattgctggcttctgaaaacccactggaccctggacaaatatggggtccaggcagatgcaaagcttctcttcacccctcagcataaaatgctgcgccttcgtctgccgaatttgaagatggtgaggttgcgagtcagcttctcagctgtggtttttaaagctgtcagtgatatctgcaaaatcctgaatattagaagatcagaagagctttccttgttaaagccgtctggtgactattttaagaagaagaagaaaaaagacaaaaataataaggaacccataattgaagatattctaaacctggagagttctccaacagcttcaggttcatcagtaagtcctggtttatacagtaaaaccatgacccctatatatgaccccatcaatggaacaccagcatcatccaccatgacttggttcagtgacagccctttgacggaacaaaactgcagcatcctcgcattcagccaacccccccagtccccagaagcacttgcggatatgtaccagcctcggtctctggttgataaagccaagctcaatgcaggttggctagactcctcacgctcccttatggaacaaggcatccaagaggatgagcagctgctcttacgatttaaatattattctttcttcgacttgaatcctaaagtaagcaactttttctcttttgtctttctctttttaatatgaatgcatgaaaggataaaatggaggcatttgcttatga

SEQ ID NO: 61747 - DNA, 452 bp, Homo sapiens
tatatggcacaatagaagtattcctttcacttacctgagctgaagtttgctgcatctgattaacagagaatggcctcagttgtttcagaatctttgtattgtgggatataaatatacctcattacacacacacctctgtttttgtctctagtatgatgctgtccgaataaaccaactctatgagcaagccaggtgggccattctcttagaagaaattgattgcacagaggaagaaatgttgatctttgcagctctacaggtatgggaacttcagtaccttttctctggaaggagacaaaccaagtttgttctgcttgaagtttcatatgcttcatactggtttttttttgttctttgaagaaatatctgaaaataaggagagcaattgttttctgtattttttattttgctttcttcttcagaccagaacaaatttttaatttaaaatgctc

SEQ ID NO: 61748 - DNA, 1014 bp, Homo sapiens
tcctgggtttgtttttcaaaatatttatataataataatacatgtaatatttatagaaaatacatggacagatataccaaattttagacaataattaattttagagagatgagattacaagaggttttctttttctattttatataattcttaatgtttctcacttttacaacaaatatttctgtgaagtaaaaaaagtactattatacttgttatatatttgttataataaattaaagaattaaggaatttggttaaatctaaaaacaggagctttgttttatgggtgacataggtcacagtggaaaaaagttatattattaatatagtagtttttttttgagtttgatgacattcttttgataatcttgagttggtttttttaacgtaagactagcctcactcactgtgagctggtaagattccacagaggagtcatctattttttttttcctcagtagcataataataattttagctagcttgccatctggggacccttcctaagtggtagataagaaacttaaaataggattgtactttaccatcatatttccccacccagcactgttactggcataaatatgtgagcaagtgactggtgagagagtgatgcctttggcagggtatctgatggtgagatcgactgagaactgagtggaagagaaggcgaagtatcagattgccaaaagggcttttattcttagctcagcccttcacgtatcctgcaaagagctgctcagcaaaaggtgcttattgaattacacctcataacaggcagaatttgaatgctgttcatcacaggagctatggagtgcatagttttatagagagtatctccccgcaggcaagatacatagaacaggtgcagaattacagcatatactcatttcgcctcttgttaaataaaagcaaagacagtctcatgcgatcctgtgtgctgagtagaatatccattatagagcattttcttttatttttgttaatatttttacttgtagatttcccattaaa

SEQ ID NO: 61749 - DNA, 366 bp, Homo sapiens
tcaggtgatctgcccgccttggcctcccaaagtgctggtattatacaggcgtgagccactgcgcccggctaggaagctcccctttctatcctgtgttcagcccaaacctgctctcagttttctcacatatgagaggaaatacaaatttgtgccaaaatgtaaataacattccccttgagacattgacattttgatagagaacaattcttgcgtctctcaggactgaatctgtgtagtgtaattctggcctccctcctccccagcacataggtgctctttattcagctcaattccacaggtccatcctgaggcctctggcagactggagggaagttggatagctcttggtctactcagtcctacaca

SEQ ID NO: 61750 - DNA, 303 bp, Homo sapiens
gaatgctataattttcttaattctcagagagctaatgcagcaatccaagatttatgccattctaacctctttagactcatattcgcagcatttatatgtatgtttgtgtatacatataaatctatatgaactattccaatttttataggataccatggattcttttttgaataaatataaggatatataaaaaatatattcaagtaactataactaaatattcatcagacattaagctgataaactaatatttcagactacgtaattactttggagacattttttcatgaaaacaataatttt

SEQ ID NO: 61751 - DNA, 158 bp, Homo sapiens
tctgtgtggaggggagggacccagtctgggcccaggtgtcatcatctcagccacagcagggccctctcaggctgggaaacttctgccagagctggtgagtcctctgcaggtcaagccagggcttggacacagctacttcatttcctgtgcaggaagag

SEQ ID NO: 61752 - DNA, 102 bp, Homo sapiens
  misc_feature (30)..(30): n is a, c, g, or t
aatttaagcatattagtcagcggaggagangtgaggctggcttggggcttcgtctcggctctgggctccttccccacacggctgaccctgaaggagcagccc

SEQ ID NO: 61753 - DNA, 273 bp, Homo sapiens
aaggaaggaaagtcaaaaggacatgagccaaactgaaagagctgttaagtggccaaaactagaacaatttgaaaaataaaatgatagtattagattataacctaaaaagcaaaataaattgaggagatactttaagactgtgcagatatcctttttctccttaattatagaggggaaatactaactttacaagggaagaagctggcagatgccaccttaacaaagttgtccaggctaacaccacaaataataggacatattgatatttcaaac

SEQ ID NO: 61754 - DNA, 398 bp, Homo sapiens
agagttttaaatgcttgtcagcagccactaactcagcagatgatctccatgaagactgaatgaaaacactacaagaacaagaatcatcaaaagagcctatcaagattctagtttgtaaccaacagatgtctacagaaagaaaacatgtaaatactgaggctgagccttgaggataaggtgttaaaaactattggaaatgcaaggacacaagcagcagagtaaaaaagcaacctacagaatgggaaagaacatttgcaaatcatatatgtgatagggagttagtatctagaatatataaaattctgcaactcaacaaaaacaaagttctggagattggttgtgcaatattgtgaatacagtttacactactggactgtaaaatggttaagatattaaac

SEQ ID NO: 61755 - DNA, 665 bp, Homo sapiens
gcttcctttgttaataatatgtgactccaaactgagattcagcaattgttaattttggcctgggtaacaaagtagcttcttgttttaactatggagagataatgttgtcggtaaaacagatcagtcttaccaaaatatattcttcaaatcttctgttgcaagaaatgggggaatatggttaatgagagttctagtcagatttggagagaggaacagagggtgtaaagcacatttatggacacatgggtggcatgggcattcgggaaggatgctgccggagggtaggtcgagtgtgatgcagggaagcctgaaggtcgtgtttggatcagccagggtcagcatgacctgtatagcaaagggactttatgaataccatgtattgaccaggcacagtggctcatgggtgtaatctcagcactttgggaggccggggcaggtggatcacttgaggtcaggagttcaagacccagcctggccaacgtggtgaaacccgcatctctacttaaaatacaaaaactagcggagtgtggtggtacatgcctgtagttccagatacttgggaggccaaagctggagaattgcttgaacccaggaggcagaggttgcagtgagccaagatcaccccactgcattccagcctgagtgagactccctctcaaaaaaaa

SEQ ID NO: 61756 - DNA, 429 bp, Homo sapiens
aaaattagccgagcgtggtggcaggcgcctgtaatcccagatactcaggaggctgaggcaggagaatcgcttgaaattggaagatggaggttgcagtgagccaagatcacggccactgcactccagcctgggcaaaagaccaaaactccatctcaacaacaacaacaaaaaagagccgggtgcagtggctcacgcctgtaatcccagcactttgggaggccaaggcgggcagatcatgaggtcaggagatcgagaccatcctggctaacacggtgaaaccccgtctctactaaaaatacaaaaaaattagccgggtgtggcggcgggctcctgtagtcccagctgctggggaggctgaggcaggagaatggcgtgaacccgggaggcagagcttgcagcgagccgagatcgcaccactgcactccagcc

SEQ ID NO: 61757 - DNA, 2642 bp, Homo sapiens
cgaaatatatcggctaggtagcgaggctgggtggtgacgctccaagatggctgcctccatagtgcggcgcgggatgctcctggcgcggtaaaagatacctgctttcttcagcctatgtagacagccacaaatgggaagcaagagaaaaagaacattactgtcttgctgatcttgcatctttaatggataaaacatttgagagaaagttgcctgttagttctttaacaatatcacggcttatagacaacatttcctctcgggaagagatagatcatgcagagtattacctttacaagtttcgacacagccccaactgctggtacctgagaaactggactatccacacctggattaggcagtgtctaaaatatgatgcacaagacaaagccctatatacccttgtaaataaggttcaatatggaatttttccagataactttacattcaatttactgatggattctttcataaagaaagaaaattacaaagatgctttatctgtggtttttgaggtcatgatgcaagaagcctttgaagtgccttccacccaacttctctccctctatgttttatttcattgcctggcaaagaagacagacttcagttgggaagaggagaggaactttggtgcatcccttttgcttccaggcctaaaacaaaagaactcagtgggtttcagttcccagttgtatggctatgcacttcttgggaaggtggagttgcagcaagggctacgggctgtgtaccacaacatgcctctgatatggaaaccaggctaccttgacagagcccttcaagtgatggagaaagtggctgcctccccagaagacataaagctgtgtagagaagcgctcgatgtgctgggtgcagtgctgaaggctctgacttcagctgatggggcttcagaggagcagtcccaaaatgatgaagacaaccaggggtcagaaaaactggtggagcagttagacatcgaggaaacagagcagtccaagcttcctcaatacctggaacgatttaaggccttacattctaagcttcaagctctgggcaaaattgagtcagaaggtcttttaagtctgaccacccagcttgtcaaggaaaaactctccacctgtgaagcagaggacatcgccacctatgagcagaatctgcagcagtggcatctagaccttgtacagttgatccagagagaacagcaacagagggagcaagcgaagcaggagtaccaggctcagaaagcagcaaaggcatctgcctaatagggtcccccagggccccacctgtctcacaagaacttcactcaaccccgtgccaggactcagcagtggcctggacaacagcctcagcttcctctacccatcttcttttcttaaagcaggctatgtgccctacatggcaaggcaccatgactgcccatcgagatgccaagaagggctatggaactatgcaggtggctagtggtcagactgaagtcaccagctgaataccttaaggaggactcttgaggctcataatggagttcctggggcacagggattagttatgagcattaaagttcctaagacccagtgacagtactgggagaaaccaaggctgaagagtcaggttgaagcacaggcttttgttttttgttgtttttgttttttgagacagagtctcattctgtcacccaggctggagtgcagtggcgcaatcttggctcactgcaacctccgactcccaggttcaagcaattctcctgcctcggcctcctttagtaggtgggattacaggtgcataccaccacacctttctaatttttgcatttttagtagagatggggtttcaccatgttggtcaggctggtctcaacctcctgacctcaagtgatctgcccgcctcagcctcccaaagtgctgggatgataggcgtgagccaccacacccggccaagcacaggcttttgaatggtctccctctccccagcccaggtacatgaggccaaggtgaactgtgcatcctgagaccttgtgtccctgagtctcctttctgagtgcaagctgcactgtgagctggctgtgggatactcacacattcccacattctcctttctgccacatctcgcccttctggacctgcactgggagaaattcaggacaggagtgaactcaaggccatgaactcactggatttccatttttaggcacccatagggatgtttttaggatgtaagtttctgaggagaaagctagctctagcatgaagcttttttggattggcttctccatcgtgttggggtaacattttttttccaattttttttttcccaaaacatcgtctcagctcatttatcaagtaggtaaaatgagccttttgtgtacacacagaggcacatgtgcatgcacacacaacttgtgaacacacatttctgttaaagaagttagaaaatgagagatgggttggggcttgaagtgcatcagaggtatgaatgttgtaaaactgtcaggagatgtaaaattcctttctgaagtgtctcttctgtgaaagggttcagagcagattttgcttactatgtagtgttgcccttaagtacagtggtgtaattttattcaagattgtgctcttctatcaaaagcctctggaaataaatgttccgggatcatg

SEQ ID NO: 61758 - DNA, 821 bp, Homo sapiens
tccgaggatagggtcacgtgagatacttttctggggaagatttgttctgaaacaaaaatagtatctcagtgacttgttttaagagtatccttacctagagccatatatgtcagcctctcaaatgccctcagcccagtggtttatattatacttcctcagcccaaatgagaaagaagaaaactaagttcatgtaatttggcattacaaaatggatacagtgaattttaccacattcgtcattatctatctgaagtgtcaccgaatgagatgagtctgtgggtacagatttaaaatgatccttctctatttctagtgctgccaggtgaacattcacttgggccttcaggtcctcagtcttagaaatggtgggaagacatggctgagcattctttattgttctttttggccacagggaaggtggagttgcagcaagggctacgggctgtgtaccacaacatgcctctgatatggaaaccaggctaccttgacagagcccttcaagtgatggagaaagtggctgcctccccagaagacataaagctgtgtagagaagcggtatgttcttcagctctaaggcagtgagatttagccatctgtttcccataacctgagctttaaatttgttttcattgtctttccactacccctactttctatatgtctatagaataggtatttatcaagtcgaaaaaatgcaaaaccacaaacattttcaatgctcctgaccaaaggcactagaaaatatgattaacattgatttatagttcattgtctaggaaaaaaaaactattccactgcctcgtccctcacctccttaccaa

SEQ ID NO: 61759 - DNA, 2672 bp, Homo sapiens
ctctgtccgtaacccgttggctgttccttttggtacgctccaagatggctgcctccatagtgcggcgcgggatgctcctggcgcggcaagtggttcttcctcagctctctcctgcaggtaaaagatacctgctttcttcagcctatgtagacagccacaaatgggaagcaagagaaaaagaacattactgtcttgctgatcttgcatctttaatggataaaacatttgagagaaagttgcctgttagttctttaacaatatcacggcttatagacaacatttcctctcgggaagagatagatcatgcagagtattacctttacaagtttcgacacagccccaactgctggtacctgagaaactggactatccacacctggattaggcagtgtctaaaatatgatgcacaagacaaagccctatatacccttgtaaataaggttcaatatggaatttttccagataactttacattcaatttactgatggattctttcataaagaaagaaaattacaaagatgctttatctgtggtttttgaggtcatgatgcaagaagcctttgaagtgccttccacccaacttctctccctctatgttttatttcattgcctggcaaagaagacagacttcagttgggaagaggagaggaactttggtgcatcccttttgcttccaggcctaaaacaaaagaactcagtgggtttcagttcccagttgtatggctatgcacttcttgggaaggtggagttgcagcaagggctacgggctgtgtaccacaacatgcctctgatatggaaaccaggctaccttgacagagcccttcaagtgatggagaaagtggctgcctccccagaagacataaagctgtgtagagaagcgctcgatgtgctgggtgcagtgctgaaggctctgacttcagctgatggggcttcagaggagcagtcccaaaatgatgaagacaaccaggggtcagaaaaactggtggagcagttagacatcgaggaaacagagcagtccaagcttcctcaatacctggaacgatttaaggccttacattctaagcttcaagctctgggcaaaattgagtcagaaggtcttttaagtctgaccacccagcttgtcaaggaaaaactctccacctgtgaagcagaggacatcgccacctatgagcagaatctgcagcagtggcatctagaccttgtacagttgatccagagagaacagcaacagagggagcaagcgaagcaggagtaccaggctcagaaagcagcaaaggcatctgcctaatagggtcccccagggccccacctgtctcacaagaacttcactcaaccccgtgccaggactcagcagtggcctggacaacagcctcagcttcctctacccatcttcttttcttaaagcaggctatgtgccctacatggcaaggcaccatgactgcccatcgagatgccaagaagggctatggaactatgcaggtggctagtggtcagactgaagtcaccagctgaataccttaaggaggactcttgaggctcataatggagttcctggggcacagggattagttatgagcattaaagttcctaagacccagtgacagtactgggagaaaccaaggctgaagagtcaggttgaagcacaggcttttgttttttgttgtttttgttttttgagacagagtctcattctgtcacccaggctggagtgcagtggcgcaatcttggctcactgcaacctccgactcccaggttcaagcaattctcctgcctcggcctcctttagtaggtgggattacaggtgcataccaccacacctttctaatttttgcatttttagtagagatggggtttcaccatgttggtcaggctggtctcaacctcctgacctcaagtgatctgcccgcctcagcctcccaaagtgctgggatgataggcgtgagccaccacacccggccaagcacaggcttttgaatggtctccctctccccagcccaggtacatgaggccaaggtgaactgtgcatcctgagaccttgtgtccctgagtctcctttctgagtgcaagctgcactgtgagctggctgtgggatactcacacattcccacattctcctttctgccacatctcgcccttctggacctgcactgggagaaattcaggacaggagtgaactcaaggccatgaactcactggatttccatttttaggcacccatagggatgtttttaggatgtaagtttctgaggagaaagctagctctagcatgaagcttttttggattggcttctccatcgtgttggggtaacattttttttccaattttttttttcccaaaacatcgtctcagctcatttatcaagtaggtaaaatgagccttttgtgtacacacagaggcacatgtgcatgcacacacaacttgtgaacacacatttctgttaaagaagttagaaaatgagagatgggttggggcttgaagtgcatcagaggtatgaatgttgtaaaactgtcaggagatgtaaaattcctttctgaagtgtctcttctgtgaaagggttcagagcagattttgcttactatgtagtgttgcccttaagtacagtggtgtaattttattcaagattgtgctcttctatcaaaagcctctggaaataaatgttccgggatcatg

SEQ ID NO: 61760 - DNA, 2823 bp, Homo sapiens
cgaaatatatcggctaggtagcgaggctgggtggtgacgctccaagatggctgcctccatagtgcggcgcgggatgctcctggcgcggcaagtggttcttcctcagctctctcctgcaggttggccggacagcttcattaggcccctgattattctgttttttgggtgaagggagcggtgggctttcaagaggagaggaaacgtttctggaatctgattgctagggacgccatttggggtgtttggtagtgcagaagaaggagacaaggtaaaagatacctgctttcttcagcctatgtagacagccacaaatgggaagcaagagaaaaagaacattactgtcttgctgatcttgcatctttaatggataaaacatttgagagaaagttgcctgttagttctttaacaatatcacggcttatagacaacatttcctctcgggaagagatagatcatgcagagtattacctttacaagtttcgacacagccccaactgctggtacctgagaaactggactatccacacctggattaggcagtgtctaaaatatgatgcacaagacaaagccctatatacccttgtaaataaggttcaatatggaatttttccagataactttacattcaatttactgatggattctttcataaagaaagaaaattacaaagatgctttatctgtggtttttgaggtcatgatgcaagaagcctttgaagtgccttccacccaacttctctccctctatgttttatttcattgcctggcaaagaagacagacttcagttgggaagaggagaggaactttggtgcatcccttttgcttccaggcctaaaacaaaagaactcagtgggtttcagttcccagttgtatggctatgcacttcttgggaaggtggagttgcagcaagggctacgggctgtgtaccacaacatgcctctgatatggaaaccaggctaccttgacagagcccttcaagtgatggagaaagtggctgcctccccagaagacataaagctgtgtagagaagcgctcgatgtgctgggtgcagtgctgaaggctctgacttcagctgatggggcttcagaggagcagtcccaaaatgatgaagacaaccaggggtcagaaaaactggtggagcagttagacatcgaggaaacagagcagtccaagcttcctcaatacctggaacgatttaaggccttacattctaagcttcaagctctgggcaaaattgagtcagaaggtcttttaagtctgaccacccagcttgtcaaggaaaaactctccacctgtgaagcagaggacatcgccacctatgagcagaatctgcagcagtggcatctagaccttgtacagttgatccagagagaacagcaacagagggagcaagcgaagcaggagtaccaggctcagaaagcagcaaaggcatctgcctaatagggtcccccagggccccacctgtctcacaagaacttcactcaaccccgtgccaggactcagcagtggcctggacaacagcctcagcttcctctacccatcttcttttcttaaagcaggctatgtgccctacatggcaaggcaccatgactgcccatcgagatgccaagaagggctatggaactatgcaggtggctagtggtcagactgaagtcaccagctgaataccttaaggaggactcttgaggctcataatggagttcctggggcacagggattagttatgagcattaaagttcctaagacccagtgacagtactgggagaaaccaaggctgaagagtcaggttgaagcacaggcttttgttttttgttgtttttgttttttgagacagagtctcattctgtcacccaggctggagtgcagtggcgcaatcttggctcactgcaacctccgactcccaggttcaagcaattctcctgcctcggcctcctttagtaggtgggattacaggtgcataccaccacacctttctaatttttgcatttttagtagagatggggtttcaccatgttggtcaggctggtctcaacctcctgacctcaagtgatctgcccgcctcagcctcccaaagtgctgggatgataggcgtgagccaccacacccggccaagcacaggcttttgaatggtctccctctccccagcccaggtacatgaggccaaggtgaactgtgcatcctgagaccttgtgtccctgagtctcctttctgagtgcaagctgcactgtgagctggctgtgggatactcacacattcccacattctcctttctgccacatctcgcccttctggacctgcactgggagaaattcaggacaggagtgaactcaaggccatgaactcactggatttccatttttaggcacccatagggatgtttttaggatgtaagtttctgaggagaaagctagctctagcatgaagcttttttggattggcttctccatcgtgttggggtaacattttttttccaattttttttttcccaaaacatcgtctcagctcatttatcaagtaggtaaaatgagccttttgtgtacacacagaggcacatgtgcatgcacacacaacttgtgaacacacatttctgttaaagaagttagaaaatgagagatgggttggggcttgaagtgcatcagaggtatgaatgttgtaaaactgtcaggagatgtaaaattcctttctgaagtgtctcttctgtgaaagggttcagagcagattttgcttactatgtagtgttgcccttaagtacagtggtgtaattttattcaagattgtgctcttctatcaaaagcctctggaaataaatgttccgggatcatg

SEQ ID NO: 61761 - DNA, 2564 bp, Homo sapiens
cgaaatatatcggctaggtagcgaggctgggtggtgacgctccaagatggctgcctccatagtgcggcgcgggatgctcctggcgcgctgatcttgcatctttaatggataaaacatttgagagaaagttgcctgttagttctttaacaatatcacggcttatagacaacatttcctctcgggaagagatagatcatgcagagtattacctttacaagtttcgacacagccccaactgctggtacctgagaaactggactatccacacctggattaggcagtgtctaaaatatgatgcacaagacaaagccctatatacccttgtaaataaggttcaatatggaatttttccagataactttacattcaatttactgatggattctttcataaagaaagaaaattacaaagatgctttatctgtggtttttgaggtcatgatgcaagaagcctttgaagtgccttccacccaacttctctccctctatgttttatttcattgcctggcaaagaagacagacttcagttgggaagaggagaggaactttggtgcatcccttttgcttccaggcctaaaacaaaagaactcagtgggtttcagttcccagttgtatggctatgcacttcttgggaaggtggagttgcagcaagggctacgggctgtgtaccacaacatgcctctgatatggaaaccaggctaccttgacagagcccttcaagtgatggagaaagtggctgcctccccagaagacataaagctgtgtagagaagcgctcgatgtgctgggtgcagtgctgaaggctctgacttcagctgatggggcttcagaggagcagtcccaaaatgatgaagacaaccaggggtcagaaaaactggtggagcagttagacatcgaggaaacagagcagtccaagcttcctcaatacctggaacgatttaaggccttacattctaagcttcaagctctgggcaaaattgagtcagaaggtcttttaagtctgaccacccagcttgtcaaggaaaaactctccacctgtgaagcagaggacatcgccacctatgagcagaatctgcagcagtggcatctagaccttgtacagttgatccagagagaacagcaacagagggagcaagcgaagcaggagtaccaggctcagaaagcagcaaaggcatctgcctaatagggtcccccagggccccacctgtctcacaagaacttcactcaaccccgtgccaggactcagcagtggcctggacaacagcctcagcttcctctacccatcttcttttcttaaagcaggctatgtgccctacatggcaaggcaccatgactgcccatcgagatgccaagaagggctatggaactatgcaggtggctagtggtcagactgaagtcaccagctgaataccttaaggaggactcttgaggctcataatggagttcctggggcacagggattagttatgagcattaaagttcctaagacccagtgacagtactgggagaaaccaaggctgaagagtcaggttgaagcacaggcttttgttttttgttgtttttgttttttgagacagagtctcattctgtcacccaggctggagtgcagtggcgcaatcttggctcactgcaacctccgactcccaggttcaagcaattctcctgcctcggcctcctttagtaggtgggattacaggtgcataccaccacacctttctaatttttgcatttttagtagagatggggtttcaccatgttggtcaggctggtctcaacctcctgacctcaagtgatctgcccgcctcagcctcccaaagtgctgggatgataggcgtgagccaccacacccggccaagcacaggcttttgaatggtctccctctccccagcccaggtacatgaggccaaggtgaactgtgcatcctgagaccttgtgtccctgagtctcctttctgagtgcaagctgcactgtgagctggctgtgggatactcacacattcccacattctcctttctgccacatctcgcccttctggacctgcactgggagaaattcaggacaggagtgaactcaaggccatgaactcactggatttccatttttaggcacccatagggatgtttttaggatgtaagtttctgaggagaaagctagctctagcatgaagcttttttggattggcttctccatcgtgttggggtaacattttttttccaattttttttttcccaaaacatcgtctcagctcatttatcaagtaggtaaaatgagccttttgtgtacacacagaggcacatgtgcatgcacacacaacttgtgaacacacatttctgttaaagaagttagaaaatgagagatgggttggggcttgaagtgcatcagaggtatgaatgttgtaaaactgtcaggagatgtaaaattcctttctgaagtgtctcttctgtgaaagggttcagagcagattttgcttactatgtagtgttgcccttaagtacagtggtgtaattttattcaagattgtgctcttctatcaaaagcctctggaaataaatgttccgggatcatg

SEQ ID NO: 61762 - DNA, 2596 bp, Homo sapiens
cgaaatatatcggctaggtagcgaggctgggtggtgacgctccaagatggctgcctccatagtgcggcgcgggatgctcctggcgcggcaagtggttcttcctcagctctctcctgcagctgatcttgcatctttaatggataaaacatttgagagaaagttgcctgttagttctttaacaatatcacggcttatagacaacatttcctctcgggaagagatagatcatgcagagtattacctttacaagtttcgacacagccccaactgctggtacctgagaaactggactatccacacctggattaggcagtgtctaaaatatgatgcacaagacaaagccctatatacccttgtaaataaggttcaatatggaatttttccagataactttacattcaatttactgatggattctttcataaagaaagaaaattacaaagatgctttatctgtggtttttgaggtcatgatgcaagaagcctttgaagtgccttccacccaacttctctccctctatgttttatttcattgcctggcaaagaagacagacttcagttgggaagaggagaggaactttggtgcatcccttttgcttccaggcctaaaacaaaagaactcagtgggtttcagttcccagttgtatggctatgcacttcttgggaaggtggagttgcagcaagggctacgggctgtgtaccacaacatgcctctgatatggaaaccaggctaccttgacagagcccttcaagtgatggagaaagtggctgcctccccagaagacataaagctgtgtagagaagcgctcgatgtgctgggtgcagtgctgaaggctctgacttcagctgatggggcttcagaggagcagtcccaaaatgatgaagacaaccaggggtcagaaaaactggtggagcagttagacatcgaggaaacagagcagtccaagcttcctcaatacctggaacgatttaaggccttacattctaagcttcaagctctgggcaaaattgagtcagaaggtcttttaagtctgaccacccagcttgtcaaggaaaaactctccacctgtgaagcagaggacatcgccacctatgagcagaatctgcagcagtggcatctagaccttgtacagttgatccagagagaacagcaacagagggagcaagcgaagcaggagtaccaggctcagaaagcagcaaaggcatctgcctaatagggtcccccagggccccacctgtctcacaagaacttcactcaaccccgtgccaggactcagcagtggcctggacaacagcctcagcttcctctacccatcttcttttcttaaagcaggctatgtgccctacatggcaaggcaccatgactgcccatcgagatgccaagaagggctatggaactatgcaggtggctagtggtcagactgaagtcaccagctgaataccttaaggaggactcttgaggctcataatggagttcctggggcacagggattagttatgagcattaaagttcctaagacccagtgacagtactgggagaaaccaaggctgaagagtcaggttgaagcacaggcttttgttttttgttgtttttgttttttgagacagagtctcattctgtcacccaggctggagtgcagtggcgcaatcttggctcactgcaacctccgactcccaggttcaagcaattctcctgcctcggcctcctttagtaggtgggattacaggtgcataccaccacacctttctaatttttgcatttttagtagagatggggtttcaccatgttggtcaggctggtctcaacctcctgacctcaagtgatctgcccgcctcagcctcccaaagtgctgggatgataggcgtgagccaccacacccggccaagcacaggcttttgaatggtctccctctccccagcccaggtacatgaggccaaggtgaactgtgcatcctgagaccttgtgtccctgagtctcctttctgagtgcaagctgcactgtgagctggctgtgggatactcacacattcccacattctcctttctgccacatctcgcccttctggacctgcactgggagaaattcaggacaggagtgaactcaaggccatgaactcactggatttccatttttaggcacccatagggatgtttttaggatgtaagtttctgaggagaaagctagctctagcatgaagcttttttggattggcttctccatcgtgttggggtaacattttttttccaattttttttttcccaaaacatcgtctcagctcatttatcaagtaggtaaaatgagccttttgtgtacacacagaggcacatgtgcatgcacacacaacttgtgaacacacatttctgttaaagaagttagaaaatgagagatgggttggggcttgaagtgcatcagaggtatgaatgttgtaaaactgtcaggagatgtaaaattcctttctgaagtgtctcttctgtgaaagggttcagagcagattttgcttactatgtagtgttgcccttaagtacagtggtgtaattttattcaagattgtgctcttctatcaaaagcctctggaaataaatgttccgggatcatg

SEQ ID NO: 61763 - DNA, 2938 bp, Homo sapiens
agcaagggacactgcggcgtgtgggtgtgggcttcatgtgccagagcgccgtctcccctgagccgtgccctgccggggagtacggcgagagagaggttctggcctctcggagtgggcttgcggttccggtgccccctctcttcgtcctcgtggctgattgtgccagagagctcctcggggagggccctagcgtgagggcagtttcccagcgccggggccgcggtggacgccaatgcagctgtctaggacctgcgcccgcggtgcgtccagagggccccggcgcgaacgtcagaacgccgccccgttccgcgctctcagcagccagccagggccgctgccagttccaccgtggagaggaggaaaccgggcgagagcctcactttcctttccgcccaaaaagctttctcagtgattgctgtagtacctgagattctaccataggatcttccgcctacattaaactgatcttgcatctttaatggataaaacatttgagagaaagttgcctgttagttctttaacaatatcacggcttatagacaacatttcctctcgggaagagatagatcatgcagagtattacctttacaagtttcgacacagccccaactgctggtacctgagaaactggactatccacacctggattaggcagtgtctaaaatatgatgcacaagacaaagccctatatacccttgtaaataaggttcaatatggaatttttccagataactttacattcaatttactgatggattctttcataaagaaagaaaattacaaagatgctttatctgtggtttttgaggtcatgatgcaagaagcctttgaagtgccttccacccaacttctctccctctatgttttatttcattgcctggcaaagaagacagacttcagttgggaagaggagaggaactttggtgcatcccttttgcttccaggcctaaaacaaaagaactcagtgggtttcagttcccagttgtatggctatgcacttcttgggaaggtggagttgcagcaagggctacgggctgtgtaccacaacatgcctctgatatggaaaccaggctaccttgacagagcccttcaagtgatggagaaagtggctgcctccccagaagacataaagctgtgtagagaagcgctcgatgtgctgggtgcagtgctgaaggctctgacttcagctgatggggcttcagaggagcagtcccaaaatgatgaagacaaccaggggtcagaaaaactggtggagcagttagacatcgaggaaacagagcagtccaagcttcctcaatacctggaacgatttaaggccttacattctaagcttcaagctctgggcaaaattgagtcagaaggtcttttaagtctgaccacccagcttgtcaaggaaaaactctccacctgtgaagcagaggacatcgccacctatgagcagaatctgcagcagtggcatctagaccttgtacagttgatccagagagaacagcaacagagggagcaagcgaagcaggagtaccaggctcagaaagcagcaaaggcatctgcctaatagggtcccccagggccccacctgtctcacaagaacttcactcaaccccgtgccaggactcagcagtggcctggacaacagcctcagcttcctctacccatcttcttttcttaaagcaggctatgtgccctacatggcaaggcaccatgactgcccatcgagatgccaagaagggctatggaactatgcaggtggctagtggtcagactgaagtcaccagctgaataccttaaggaggactcttgaggctcataatggagttcctggggcacagggattagttatgagcattaaagttcctaagacccagtgacagtactgggagaaaccaaggctgaagagtcaggttgaagcacaggcttttgttttttgttgtttttgttttttgagacagagtctcattctgtcacccaggctggagtgcagtggcgcaatcttggctcactgcaacctccgactcccaggttcaagcaattctcctgcctcggcctcctttagtaggtgggattacaggtgcataccaccacacctttctaatttttgcatttttagtagagatggggtttcaccatgttggtcaggctggtctcaacctcctgacctcaagtgatctgcccgcctcagcctcccaaagtgctgggatgataggcgtgagccaccacacccggccaagcacaggcttttgaatggtctccctctccccagcccaggtacatgaggccaaggtgaactgtgcatcctgagaccttgtgtccctgagtctcctttctgagtgcaagctgcactgtgagctggctgtgggatactcacacattcccacattctcctttctgccacatctcgcccttctggacctgcactgggagaaattcaggacaggagtgaactcaaggccatgaactcactggatttccatttttaggcacccatagggatgtttttaggatgtaagtttctgaggagaaagctagctctagcatgaagcttttttggattggcttctccatcgtgttggggtaacattttttttccaattttttttttcccaaaacatcgtctcagctcatttatcaagtaggtaaaatgagccttttgtgtacacacagaggcacatgtgcatgcacacacaacttgtgaacacacatttctgttaaagaagttagaaaatgagagatgggttggggcttgaagtgcatcagaggtatgaatgttgtaaaactgtcaggagatgtaaaattcctttctgaagtgtctcttctgtgaaagggttcagagcagattttgcttactatgtagtgttgcccttaagtacagtggtgtaattttattcaagattgtgctcttctatcaaaagcctctggaaataaatgttccgggatcatg

SEQ ID NO: 61764 - DNA, 3277 bp, Homo sapiens
  misc_feature (2691)..(2691): n is a, c, g, or t
  misc_feature (2693)..(2693): n is a, c, g, or t
ctctgtccgtaacccgttggctgttccttttggtacgctccaagatggctgcctccatagtgcggcgcgggatgctcctggcgcggcaagtggttcttcctcagctctctcctgcaggtaaaagatacctgctttcttcagcctatgtagacagccacaaatgggaagcaagagaaaaagaacattactgtcttgctgatcttgcatctttaatggataaaacatttgagagaaagttgcctgttagttctttaacaatatcacggcttatagacaacatttcctctcgggaagagatagatcatgcagagtattacctttacaagtttcgacacagccccaactgctggtacctgagaaactggactatccacacctggattaggcagtgtctaaaatatgatgcacaagacaaagccctatatacccttgtaaataaggttcaatatggaatttttccagataactttacattcaatttactgatggattctttcataaagaaagaaaattacaaagatgctttatctgtggtttttgaggtcatgatgcaagaagcctttgaagtgccttccacccaacttctctccctctatgttttatttcattgcctggcaaagaagacagacttcagttgggaagaggagaggaactttggtgcatcccttttgcttccaggcctaaaacaaaagaactcagtgggtttcagttcccagttgtatggctatgcacttcttgggaaggtggagttgcagcaagggctacgggctgtgtaccacaacatgcctctgatatggaaaccaggctaccttgacagagcccttcaagtgatggagaaagtggctgcctccccagaagacataaagctgtgtagagaagcgctcgatgtgctgggtgcagtgctgaaggctctgacttcagctgatggggcttcagaggagcagtcccaaaatgatgaagacaaccaggggtcagaaaaactggtggagcagttagacatcgaggaaacagagcagtccaagcttcctcaatacctggaacgatttaaggccttacattctaagcttcaagctctgggcaaaattgagtcagaaggtcttttaagtctgaccacccagcttgtcaaggaaaaactctccacctgtgaagcagaggacatcgccacctatgagcagaatctgcagcagtggcatctagaccttgtacagttgatccagagagaacagcaacagagggagcaagcgaagcaggagtaccaggctcagaaagcagcaaaggcatctgcctaatagggtcccccagggccccacctgtctcacaagaacttcactcaaccccgtgccaggactcagcagtggcctggacaacagcctcagcttcctctacccatcttcttttcttaaagcaggctatgtgccctacatggcaaggcaccatgactgcccatcgagatgccaagaagggctatggaactatgcaggtggctagtggtcagactgaagtcaccagctgaataccttaaggaggactcttgaggctcataatggagttcctggggcacagggattagttatgagcattaaagttcctaagacccagtgacagtactgggagaaaccaaggctgaagagtcaggttgaagcacaggcttttgttttttgttgtttttgttttttgagacagagtctcattctgtcacccaggctggagtgcagtggcgcaatcttggctcactgcaacctccgactcccaggttcaagcaattctcctgcctcggcctcctttagtaggtgggattacaggtgcataccaccacacctttctaatttttgcatttttagtagagatggggtttcaccatgttggtcaggctggtctcaacctcctgacctcaagtgatctgcccgcctcagcctcccaaagtgctgggatgataggcgtgagccaccacacccggccaagcacaggcttttgaatggtctccctctccccagcccaggtacatgaggccaaggtgaactgtgcatcctgagaccttgtgtccctgagtctcctttctgagtgcaagctgcactgtgagctggctgtgggatactcacacattcccacattctcctttctgccacatctcgcccttctggacctgcactgggagaaattcaggacaggagtgaactcaaggccatgaactcactggatttccatttttaggcacccatagggatgtttttaggatgtaagtttctgaggagaaagctagctctagcatgaagcttttttggattggcttctccatcgtgttggggtaacattttttttccaattttttttttcccaaaacatcgtctcagctcatttatcaagtaggtaaaatgagccttttgtgtacacacagaggcacatgtgcatgcacacacaacttgtgaacacacatttctgttaaagaagttagaaaatgagagatgggttggggcttgaagtgcatcagaggtatgaatgttgtaaaactgtcaggagatgtaaaattcctttctgaagtgtctcttctgtgaaagggttcagagcagattttgcttactatgtagtgttgcccttaagtacagtggtgtaattttattcaagattgtgctcttctatcaaaagcctctggaaataaatgttccgggatcatgaaaaaaaaaaaaaaaaaananaaaaaaaaagaagaaaacaaaaaaaaaaagaaaaaaaagaaaaaacaaaaaaaaagaaagaagaggggggggccccgacgagaagagaatactccaccaagaggggagcgccgaaacaaaataacgagcggagcacacacggagagttctgtgaaaaaaagagaggggggccgaccaaataagagagaggaggcgaagaaaatctaaagaggaaaggaagaggcggcgagagcagatagaaagaaaaaggggaagtaaaggaggaaaaaaaagcgcggtacacaggcgagggcaaaaattactgggggaaaaaaaagaaccaaccaacccaagaaggggggggggcggaaaacacaaaaaacaggagagaacaaaacgacatcacacacaaaacaaaaaagaattaggaaaaccaaccacgaaggaaggacaaccaaaacaaacaaaccataaccacaagagacatacgaaaacagggggtacgtaaacagccaaactgaggagcaaaaacagcggaagccaggccgagaaaaaaaaaagataggtgaaaaaacaaggagaaagaaacacgactgcgagaaaac

SEQ ID NO: 61765 - DNA, 2795 bp, Homo sapiens
ctctgtccgtaacccgttggctgttccttttggtacgctccaagatggctgcctccatagtgcggcgcgggatgctcctggcgcggcaagtggttcttcctcagctctctcctgcaggtaaaagatacctgctttcttcagcctatgtagacagccacaaatgggaagcaagagaaaaagaacattactgtcttgctgatcttgcatctttaatggataaaacatttgagagaaagttgcctgttagttctttaacaatatcacggcttatagacaacatttcctctcgggaagagatagatcatgcagagtattacctttacaagtttcgacacagccccaactgctggtacctgagaaactggactatccacacctggattaggcagtgtctaaaatatgatgcacaagacaaagccctatatacccttgtaaataaggttcaatatggaatttttccagataactttacattcaatttactgatggattctttcataaagaaagaaaattacaaagatgctttatctgtggtttttgaggtcatgatgcaagaagcctttgaagtgccttccacccaacttctctccctctatgttttatttcattgcctggcaaagaagacagacttcagttgggaagaggagaggaactttggtgcatcccttttgcttccaggcctaaaacaaaagaactcagtgggtttcagttcccagttgtatggctatgcacttcttgggaaggtggagttgcagcaagggctacgggctgtgtaccacaacatgcctctgatatggaaaccaggctaccttgacagagcccttcaagtgatggagaaagtggctgcctccccagaagacataaagctgtgtagagaagcgctcgatgtgctgggtgcagtgctgaaggctctgacttcagctgatggggcttcagaggagcagtcccaaaatgatgaagacaaccaggggtcagaaaaactggtggagcagttagacatcgaggaaacagagcagtccaagcttcctcaatacctggaacgatttaaggccttacattctaagcttcaagctctgggcaaaattgagtcagaaggtcttttaagtctgaccacccagcttgtcaaggaaaaactctccacctgtgaagcagaggacatcgccacctatgagcagaatctgcagcagtggcatctagaccttgtacagttgatccagagagaacagcaacagagggagcaagcgaagcaggagtaccaggctcagaaagcagcaaaggcatctgcctaatagggtcccccagggccccacctgtctcacaagaacttcactcaaccccgtgccaggactcagcagtggcctggacaacagcctcagcttcctctacccatcttcttttcttaaagcaggctatgtgccctacatggcaaggcaccatgactgcccatcgagatgccaagaagggctatggaactatgcaggtggctagtggtcagactgaagtcaccagctgaataccttaaggaggactcttgaggctcataatggagttcctggggcacagggattagttatgagcattaaagttcctaagacccagtgacagtactgggagaaaccaaggctgaagagtcaggttgaagcacaggcttttgttttttgttgtttttgttttttgagacagagtctcattctgtcacccaggctggagtgcagtggcgcaatcttggctcactgcaacctccgactcccaggttcaagcaattctcctgcctcggcctcctttagtaggtgggattacaggtgcataccaccacacctttctaatttttgcatttttagtagagatggggtttcaccatgttggtcaggctggtctcaacctcctgacctcaagtgatctgcccgcctcagcctcccaaagtgctgggatgataggcgtgagccaccacacccggccaagcacaggcttttgaatggtctccctctccccagcccaggtacatgaggccaaggtgaactgtgcatcctgagaccttgtgtccctgagtctcctttctgagtgcaagctgcactgtgagctggctgtgggatactcacacattcccacattctcctttctgccacatctcgcccttctggacctgcactgggagaaattcaggacaggagtgaactcaaggccatgaactcactggatttccatttttaggcacccatagggatgtttttaggatgtaagtttctgaggagaaagctagctctagcatgaagcttttttggattggcttctccatcgtgttggggtaacattttttttccaattttttttttcccaaaacatcgtctcagctcatttatcaagtaggtaaaatgagccttttgtgtacacacagaggcacatgtgcatgcacacacaacttgtgaacacacatttctgttaaagaagttagaaaatgagagatgggttggggcttgaagtgcatcagaggtatgaatgttgtaaaactgtcaggagatgtaaaattcctttctgaagtgtctcttctgtgaaagggttcagagcagattttgcttactatgtagtgttgcccttaagtacagtggtgtaattttattcaagattgtgctcttctatcaaaagcctctggaaataaatgttccgggatcatgttagtgtactctttatctttggggaaagggaggagggagagggactcattattgttactatgattttgaggagtgtactttaaaccctcccccattaaactatgggatttattgtaataatga

SEQ ID NO: 61766 - DNA, 2643 bp, Homo sapiens
ctctgtccgtaacccgttggctgttccttttggtacgctccaagatggctgcctccatagtgcggcgcgggatgctcctggcgcggcaagtggttcttcctcagctctctcctgcaggtaaaagatacctgctttcttcagcctatgtagacagccacaaatgggaagcaagagaaaaagaacattactgtcttgctgatcttgcatctttaatggataaaacatttgagagaaagttgcctgttagttctttaacaatatcacggcttatagacaacatttcctctcgggaagagatagatcatgcagagtattacctttacaagtttcgacacagccccaactgctggtacctgagaaactggactatccacacctggattaggcagtgtctaaaatatgatgcacaagacaaagccctatatacccttgtaaataaggttcaatatggaatttttccagataactttacattcaatttactgatggattctttcataaagaaagaaaattacaaagatgctttatctgtggtttttgaggtcatgatgcaagaagcctttgaagtgccttccacccaacttctctccctctatgttttatttcattgcctggcaaagaagacagacttcagttgggaagaggagaggaactttggtgcatcccttttgcttccaggcctaaaacaaaagaactcagtgggtttcagttcccagttgtatggctatgcacttcttgggaaggtggagttgcagcaagggctacgggctgtgtaccacaacatgcctctgatatggaaaccaggctaccttgacagagcccttcaagtgatggagaaagtggctgcctccccagaagacataaagctgtgtagagaagcgctcgatgtgctgggtgcagtgctgaaggctctgacttcagctgatggggcttcagaggagcagtcccaaaatgatgaagacaaccaggggtcagaaaaactggtggagcagttagacatcgaggaaacagagcagtccaagcttcctcaatacctggaacgatttaaggccttacattctaagcttcaagctctgggcaaaattgagtcagaaggtcttttaagtctgaccacccagcttgtcaaggaaaaactctccacctgtgaagcagaggacatcgccacctatgagcagaatctgcagcagtggcatctagaccttgtacagttgatccagagagaacagcaacagagggagcaagcgaagcaggagtaccaggctcagaaagcagcaaaggcatctgcctaatagggtcccccagggccccacctgtctcacaagaacttcactcaaccccgtgccaggactcagcagtggcctggacaacagcctcagcttcctctacccatcttcttttcttaaagcaggctatgtgccctacatggcaaggcaccatgactgcccatcgagatgccaagaagggctatggaactatgcaggtggctagtggtcagactgaagtcaccagctgaataccttaaggaggactcttgaggctcataatggagttcctggggcacagggattagttatgagcattaaagttcctaagacccagtgacagtactgggagaaaccaaggctgaagagtcaggttgaagcacaggcttttgttttttgttgtttttgttttttgagacagagtctcattctgtcacccaggctggagtgcagtggcgcaatcttggctcactgcaacctccgactcccaggttcaagcaattctcctgcctcggcctcctttagtaggtgggattacaggtgcataccaccacacctttctaatttttgcatttttagtagagatggggtttcaccatgttggtcaggctggtctcaacctcctgacctcaagtgatctgcccgcctcagcctcccaaagtgctgggatgataggcgtgagccaccacacccggccaagcacaggcttttgaatggtctccctctccccagcccaggtacatgaggccaaggtgaactgtgcatcctgagtgcaagctgcactgtgagctggctgtgggatactcacacattcccacattctcctttctgccacatctcgcccttctggacctgcactgggagaaattcaggacaggagtgaactcaaggccatgaactcactggatttccatttttaggcacccatagggatgtttttaggatgtaagtttctgaggagaaagctagctctagcatgaagcttttttggattggcttctccatcgtgttggggtaacattttttttccaattttttttttcccaaaacatcgtctcagctcatttatcaagtaggtaaaatgagccttttgtgtacacacagaggcacatgtgcatgcacacacaacttgtgaacacacatttctgttaaagaagttagaaaatgagagatgggttggggcttgaagtgcatcagaggtatgaatgttgtaaaactgtcaggagatgtaaaattcctttctgaagtgtctcttctgtgaaagggttcagagcagattttgcttactatgtagtgttgcccttaagtacagtggtgtaattttattcaagattgtgctcttctatcaaaagcctctggaaataaatgttccgggatcatg

SEQ ID NO: 61767 - DNA, 2149 bp, Homo sapiens
ggaagaggagaggaactttggtgcatcccaactgaagtctgtcttctttgccaggcaatgaaataaaacatagagggagagaagttgggtggcaaagaagacagacttcagttgggaagaggagaggaactttggtgcatcccttttgcttccaggcctaaaacaaaagaactcagtgggtttcagttcccagttgtatggctatgcacttcttgggaaggtggagttgcagcaagggctacgggctgtgtaccacaacatgcctctgatatggaaaccaggctaccttgacagagcccttcaagtgatggagaaagtggctgcctccccagaagacataaagctgtgtagagaagcgctcgatgtgctgggtgcagtgctgaaggctctgacttcagctgatggggcttcagaggagcagtcccaaaatgatgaagacaaccaggggtcagaaaaactggtggagcagttagacatcgaggaaacagagcagtccaagcttcctcaatacctggaacgatttaaggccttacattctaagcttcaagctctgggcaaaattgagtcagaaggtcttttaagtctgaccacccagcttgtcaaggaaaaactctccacctgtgaagcagaggacatcgccacctatgagcagaatctgcagcagtggcatctagaccttgtacagttgatccagagagaacagcaacagagggagcaagcgaagcaggagtaccaggctcagaaagcagcaaaggcatctgcctaatagggtcccccagggccccacctgtctcacaagaacttcactcaaccccgtgccaggactcagcagtggcctggacaacagcctcagcttcctctacccatcttcttttcttaaagcaggctatgtgccctacatggcaaggcaccatgactgcccatcgagatgccaagaagggctatggaactatgcaggtggctagtggtcagactgaagtcaccagctgaataccttaaggaggactcttgaggctcataatggagttcctggggcacagggattagttatgagcattaaagttcctaagacccagtgacagtactgggagaaaccaaggctgaagagtcaggttgaagcacaggcttttgttttttgttgtttttgttttttgagacagagtctcattctgtcacccaggctggagtgcagtggcgcaatcttggctcactgcaacctccgactcccaggttcaagcaattctcctgcctcggcctcctttagtaggtgggattacaggtgcataccaccacacctttctaatttttgcatttttagtagagatggggtttcaccatgttggtcaggctggtctcaacctcctgacctcaagtgatctgcccgcctcagcctcccaaagtgctgggatgataggcgtgagccaccacacccggccaagcacaggcttttgaatggtctccctctccccagcccaggtacatgaggccaaggtgaactgtgcatcctgagaccttgtgtccctgagtctcctttctgagtgcaagctgcactgtgagctggctgtgggatactcacacattcccacattctcctttctgccacatctcgcccttctggacctgcactgggagaaattcaggacaggagtgaactcaaggccatgaactcactggatttccatttttaggcacccatagggatgtttttaggatgtaagtttctgaggagaaagctagctctagcatgaagcttttttggattggcttctccatcgtgttggggtaacattttttttccaattttttttttcccaaaacatcgtctcagctcatttatcaagtaggtaaaatgagccttttgtgtacacacagaggcacatgtgcatgcacacacaacttgtgaacacacatttctgttaaagaagttagaaaatgagagatgggttggggcttgaagtgcatcagaggtatgaatgttgtaaaactgtcaggagatgtaaaattcctttctgaagtgtctcttctgtgaaagggttcagagcagattttgcttactatgtagtgttgcccttaagtacagtggtgtaattttattcaagattgtgctcttctatcaaaagcctctggaaataaatgttccgggatcatg

SEQ ID NO: 61768 - DNA, 2449 bp, Homo sapiens
ctctgtccgtaacccgttggctgttccttttggtacgctccaagatggctgcctccatagtgcggcgcgggatgctcctggcgcggcaagtggttcttcctcagctctctcctgcaggtaaaagatacctgctttcttcagcctatgtagacagccacaaatgggaagcaagagaaaaagaacattactgtcttgctgatcttgcatctttaatggataaaacatttgagagaaagttgcctgttagttctttaacaatatcacggcttatagacaacatttcctctcgggaagagatagatcatgcagagtattacctttacaagtttcgacacagccccaactgctggtacctgagaaactggactatccacacctggattaggcagtgtctaaaatatgatgcacaagacaaagccctatatacccttgtaaataaggttcaatatggaatttttccagataactttacattcaatttactgatggattctttcataaagaaagaaaattacaaagatgctttatctgtggtttttgaggtcatgatgcaagaagcctttgaagtgccttccacccaacttctctccctctatgttttatttcattgcctggcaaagaagacagacttcagttgggaagaggagaggaactttggtgcatcccttttgcttccaggcctaaaacaaaagaactcagtgggtttcagttcccagttgtatggctatgcacttcttgggaaggtggagttgcagcaagggctacgggctgtgtaccacaacatgcctctgatatggaaaccaggctaccttgacagagcccttcaagtgatggagaaagtggctgcctccccagaagacataaagctgtgtagagaagcgctcgatgtgctgggtgcagtgctgaaggctctgacttcagctgatggggcttcagaggagcagtcccaaaatgatgaagacaaccaggggtcagaaaaactggtggagcagttagacatcgaggaaacagagcagtccaagcttcctcaatacctggaacgatttaaggccttacattctaagcttcaagctctgggcaaaattgagtcagaaggtcttttaagtctgaccacccagcttgtcaaggaaaaactctccacctgtgaagcagaggacatcgccacctatgagcagaatctgcagcagtggcatctagaccttgtacagttgatccagagagaacagcaacagagggagcaagcgaagcaggagtaccaggctcagaaagcagcaaaggcatctgcctaatagggtcccccagggccccacctgtctcacaagaacttcactcaaccccgtgccaggactcagcagtggcctggacaacagcctcagcttcctctacccatcttcttttcttaaagcaggctatgtgccctacatggcaaggcaccatgactgcccatcgagatgccaagaagggctatggaactatgcaggtggctagtggtcagactgaagtcaccagctgaataccttaaggaggactcttgaggctcataatggagttcctggggcacagggattagttatgagcattaaagttcctaagacccagtgacagtactgggagaaaccaaggctgaagagtcaggttgaagcacaggctggtctcaacctcctgacctcaagtgatctgcccgcctcagcctcccaaagtgctgggatgataggcgtgagccaccacacccggccaagcacaggcttttgaatggtctccctctccccagcccaggtacatgaggccaaggtgaactgtgcatcctgagaccttgtgtccctgagtctcctttctgagtgcaagctgcactgtgagctggctgtgggatactcacacattcccacattctcctttctgccacatctcgcccttctggacctgcactgggagaaattcaggacaggagtgaactcaaggccatgaactcactggatttccatttttaggcacccatagggatgtttttaggatgtaagtttctgaggagaaagctagctctagcatgaagcttttttggattggcttctccatcgtgttggggtaacattttttttccaattttttttttcccaaaacatcgtctcagctcatttatcaagtaggtaaaatgagccttttgtgtacacacagaggcacatgtgcatgcacacacaacttgtgaacacacatttctgttaaagaagttagaaaatgagagatgggttggggcttgaagtgcatcagaggtatgaatgttgtaaaactgtcaggagatgtaaaattcctttctgaagtgtctcttctgtgaaagggttcagagcagattttgcttactatgtagtgttgcccttaagtacagtggtgtaattttattcaagattgtgctcttctatcaaaagcctctggaaataaatgttccgggatcatg

SEQ ID NO: 61769 - DNA, 1820 bp, Homo sapiens
tccccacgttgacacttcagagagaagcgctcgatgtgctgggtgcagtgctgaaggctctgacttcagctgatggggcttcagaggagcagtcccaaaatgatgaagacaaccaggggtcagaaaaactggtggagcagttagacatcgaggaaacagagcagtccaagcttcctcaatacctggaacgatttaaggccttacattctaagcttcaagctctgggcaaaattgagtcagaaggtcttttaagtctgaccacccagcttgtcaaggaaaaactctccacctgtgaagcagaggacatcgccacctatgagcagaatctgcagcagtggcatctagaccttgtacagttgatccagagagaacagcaacagagggagcaagcgaagcaggagtaccaggctcagaaagcagcaaaggcatctgcctaatagggtcccccagggccccacctgtctcacaagaacttcactcaaccccgtgccaggactcagcagtggcctggacaacagcctcagcttcctctacccatcttcttttcttaaagcaggctatgtgccctacatggcaaggcaccatgactgcccatcgagatgccaagaagggctatggaactatgcaggtggctagtggtcagactgaagtcaccagctgaataccttaaggaggactcttgaggctcataatggagttcctggggcacagggattagttatgagcattaaagttcctaagacccagtgacagtactgggagaaaccaaggctgaagagtcaggttgaagcacaggcttttgttttttgttgtttttgttttttgagacagagtctcattctgtcacccaggctggagtgcagtggcgcaatcttggctcactgcaacctccgactcccaggttcaagcaattctcctgcctcggcctcctttagtaggtgggattacaggtgcataccaccacacctttctaatttttgcatttttagtagagatggggtttcaccatgttggtcaggctggtctcaacctcctgacctcaagtgatctgcccgcctcagcctcccaaagtgctgggatgataggcgtgagccaccacacccggccaagcacaggcttttgaatggtctccctctccccagcccaggtacatgaggccaaggtgaactgtgcatcctgagaccttgtgtccctgagtctcctttctgagtgcaagctgcactgtgagctggctgtgggatactcacacattcccacattctcctttctgccacatctcgcccttctggacctgcactgggagaaattcaggacaggagtgaactcaaggccatgaactcactggatttccatttttaggcacccatagggatgtttttaggatgtaagtttctgaggagaaagctagctctagcatgaagcttttttggattggcttctccatcgtgttggggtaacattttttttccaattttttttttcccaaaacatcgtctcagctcatttatcaagtaggtaaaatgagccttttgtgtacacacagaggcacatgtgcatgcacacacaacttgtgaacacacatttctgttaaagaagttagaaaatgagagatgggttggggcttgaagtgcatcagaggtatgaatgttgtaaaactgtcaggagatgtaaaattcctttctgaagtgtctcttctgtgaaagggttcagagcagattttgcttactatgtagtgttgcccttaagtacagtggtgtaattttattcaagattgtgctcttctatcaaaagcctctggaaataaatgttccgggatcatg

SEQ ID NO: 61770 - DNA, 2346 bp, Homo sapiens
tccgaggatagggtcacgtgagatacttttctggggaagatttgttctgaaacaaaaatagtatctcagtgacttgttttaagagtatccttacctagagccatatatgtcagcctctcaaatgccctcagcccagtggtttatattatacttcctcagcccaaatgagaaagaagaaaactaagttcatgtaatttggcattacaaaatggatacagtgaattttaccacattcgtcattatctatctgaagtgtcaccgaatgagatgagtctgtgggtacagatttaaaatgatccttctctatttctagtgctgccaggtgaacattcacttgggccttcaggtcctcagtcttagaaatggtgggaagacatggctgagcattctttattgttctttttggccacagggaaggtggagttgcagcaagggctacgggctgtgtaccacaacatgcctctgatatggaaaccaggctaccttgacagagcccttcaagtgatggagaaagtggctgcctccccagaagacataaagctgtgtagagaagcgctcgatgtgctgggtgcagtgctgaaggctctgacttcagctgatggggcttcagaggagcagtcccaaaatgatgaagacaaccaggggtcagaaaaactggtggagcagttagacatcgaggaaacagagcagtccaagcttcctcaatacctggaacgatttaaggccttacattctaagcttcaagctctgggcaaaattgagtcagaaggtcttttaagtctgaccacccagcttgtcaaggaaaaactctccacctgtgaagcagaggacatcgccacctatgagcagaatctgcagcagtggcatctagaccttgtacagttgatccagagagaacagcaacagagggagcaagcgaagcaggagtaccaggctcagaaagcagcaaaggcatctgcctaatagggtcccccagggccccacctgtctcacaagaacttcactcaaccccgtgccaggactcagcagtggcctggacaacagcctcagcttcctctacccatcttcttttcttaaagcaggctatgtgccctacatggcaaggcaccatgactgcccatcgagatgccaagaagggctatggaactatgcaggtggctagtggtcagactgaagtcaccagctgaataccttaaggaggactcttgaggctcataatggagttcctggggcacagggattagttatgagcattaaagttcctaagacccagtgacagtactgggagaaaccaaggctgaagagtcaggttgaagcacaggcttttgttttttgttgtttttgttttttgagacagagtctcattctgtcacccaggctggagtgcagtggcgcaatcttggctcactgcaacctccgactcccaggttcaagcaattctcctgcctcggcctcctttagtaggtgggattacaggtgcataccaccacacctttctaatttttgcatttttagtagagatggggtttcaccatgttggtcaggctggtctcaacctcctgacctcaagtgatctgcccgcctcagcctcccaaagtgctgggatgataggcgtgagccaccacacccggccaagcacaggcttttgaatggtctccctctccccagcccaggtacatgaggccaaggtgaactgtgcatcctgagaccttgtgtccctgagtctcctttctgagtgcaagctgcactgtgagctggctgtgggatactcacacattcccacattctcctttctgccacatctcgcccttctggacctgcactgggagaaattcaggacaggagtgaactcaaggccatgaactcactggatttccatttttaggcacccatagggatgtttttaggatgtaagtttctgaggagaaagctagctctagcatgaagcttttttggattggcttctccatcgtgttggggtaacattttttttccaattttttttttcccaaaacatcgtctcagctcatttatcaagtaggtaaaatgagccttttgtgtacacacagaggcacatgtgcatgcacacacaacttgtgaacacacatttctgttaaagaagttagaaaatgagagatgggttggggcttgaagtgcatcagaggtatgaatgttgtaaaactgtcaggagatgtaaaattcctttctgaagtgtctcttctgtgaaagggttcagagcagattttgcttactatgtagtgttgcccttaagtacagtggtgtaattttattcaagattgtgctcttctatcaaaagcctctggaaataaatgttccgggatcatg

SEQ ID NO: 61771 - DNA, 1878 bp, Homo sapiens
acttcgagctcggcaccccacaccacctgagtccaagtggagaaagtggctgcctccccagaagacataaagctgtgtagagaagcgctcgatgtgctgggtgcagtgctgaaggctctgacttcagctgatggggcttcagaggagcagtcccaaaatgatgaagacaaccaggggtcagaaaaactggtggagcagttagacatcgaggaaacagagcagtccaagcttcctcaatacctggaacgatttaaggccttacattctaagcttcaagctctgggcaaaattgagtcagaaggtcttttaagtctgaccacccagcttgtcaaggaaaaactctccacctgtgaagcagaggacatcgccacctatgagcagaatctgcagcagtggcatctagaccttgtacagttgatccagagagaacagcaacagagggagcaagcgaagcaggagtaccaggctcagaaagcagcaaaggcatctgcctaatagggtcccccagggccccacctgtctcacaagaacttcactcaaccccgtgccaggactcagcagtggcctggacaacagcctcagcttcctctacccatcttcttttcttaaagcaggctatgtgccctacatggcaaggcaccatgactgcccatcgagatgccaagaagggctatggaactatgcaggtggctagtggtcagactgaagtcaccagctgaataccttaaggaggactcttgaggctcataatggagttcctggggcacagggattagttatgagcattaaagttcctaagacccagtgacagtactgggagaaaccaaggctgaagagtcaggttgaagcacaggcttttgttttttgttgtttttgttttttgagacagagtctcattctgtcacccaggctggagtgcagtggcgcaatcttggctcactgcaacctccgactcccaggttcaagcaattctcctgcctcggcctcctttagtaggtgggattacaggtgcataccaccacacctttctaatttttgcatttttagtagagatggggtttcaccatgttggtcaggctggtctcaacctcctgacctcaagtgatctgcccgcctcagcctcccaaagtgctgggatgataggcgtgagccaccacacccggccaagcacaggcttttgaatggtctccctctccccagcccaggtacatgaggccaaggtgaactgtgcatcctgagaccttgtgtccctgagtctcctttctgagtgcaagctgcactgtgagctggctgtgggatactcacacattcccacattctcctttctgccacatctcgcccttctggacctgcactgggagaaattcaggacaggagtgaactcaaggccatgaactcactggatttccatttttaggcacccatagggatgtttttaggatgtaagtttctgaggagaaagctagctctagcatgaagcttttttggattggcttctccatcgtgttggggtaacattttttttccaattttttttttcccaaaacatcgtctcagctcatttatcaagtaggtaaaatgagccttttgtgtacacacagaggcacatgtgcatgcacacacaacttgtgaacacacatttctgttaaagaagttagaaaatgagagatgggttggggcttgaagtgcatcagaggtatgaatgttgtaaaactgtcaggagatgtaaaattcctttctgaagtgtctcttctgtgaaagggttcagagcagattttgcttactatgtagtgttgcccttaagtacagtggtgtaattttattcaagattgtgctcttctatcaaaagcctctggaaataaatgttccgggatcatg

SEQ ID NO: 61772 - DNA, 1206 bp, Homo sapiens
ctacacaacatactgtctaggtacgaggctgggtggtcaccagctgaataccttaaggaggactcttgaggctcataatggagttcctggggcacagggattagttatgagcattaaagttcctaagacccagtgacagtactgggagaaaccaaggctgaagagtcaggttgaagcacaggcttttgttttttgttgtttttgttttttgagacagagtctcattctgtcacccaggctggagtgcagtggcgcaatcttggctcactgcaacctccgactcccaggttcaagcaattctcctgcctcggcctcctttagtaggtgggattacaggtgcataccaccacacctttctaatttttgcatttttagtagagatggggtttcaccatgttggtcaggctggtctcaacctcctgacctcaagtgatctgcccgcctcagcctcccaaagtgctgggatgataggcgtgagccaccacacccggccaagcacaggcttttgaatggtctccctctccccagcccaggtacatgaggccaaggtgaactgtgcatcctgagaccttgtgtccctgagtctcctttctgagtgcaagctgcactgtgagctggctgtgggatactcacacattcccacattctcctttctgccacatctcgcccttctggacctgcactgggagaaattcaggacaggagtgaactcaaggccatgaactcactggatttccatttttaggcacccatagggatgtttttaggatgtaagtttctgaggagaaagctagctctagcatgaagcttttttggattggcttctccatcgtgttggggtaacattttttttccaattttttttttcccaaaacatcgtctcagctcatttatcaagtaggtaaaatgagccttttgtgtacacacagaggcacatgtgcatgcacacacaacttgtgaacacacatttctgttaaagaagttagaaaatgagagatgggttggggcttgaagtgcatcagaggtatgaatgttgtaaaactgtcaggagatgtaaaattcctttctgaagtgtctcttctgtgaaagggttcagagcagattttgcttactatgtagtgttgcccttaagtacagtggtgtaattttattcaagattgtgctcttctatcaaaagcctctggaaataaatgttccgggatcatg

SEQ ID NO: 61773 - DNA, 1597 bp, Homo sapiens
tccccacgttgacacttcagagagaagcgctcgatgtgctgggtgcagtgctgaaggctctgacttcagctgatggggcttcagaggagcagtcccaaaatgatgaagacaaccaggggtcagaaaaactggtggagcagttagacatcgaggaaacagagcagtccaagcttcctcaatacctggaacgatttaaggccttacattctaagcttcaagctctgggcaaaattgagtcagaaggtcttttaagtctgaccacccagcttgtcaaggaaaaactctccacctgtgaagcagaggacatcgccacctatgagcagaatctgcagcagtggcatctagaccttgtacagttgatccagagagaacagcaacagagggagcaagcgaagcaggagtaccaggctcagaaagcagcaaaggcatctgcctaatagggtcccccagggccccacctgtctcacaagaacttcactcaaccccgtgccaggactcagcagtggcctggacaacagcctcagcttcctctacccatcttcttttcttaaagcaggctatgtgccctacatggcaaggcaccatgactgcccatcgagatgccaagaagggctatggaactatgcaggtggctagtggtcagactgaagtcaccagctgaataccttaaggaggactcttgaggctcataatggagttcctggggcacagggattagttatgagcattaaagttcctaagacccagtgacagtactgggagaaaccaaggctgaagagtcaggttgaagcacaggctggtctcaacctcctgacctcaagtgatctgcccgcctcagcctcccaaagtgctgggatgataggcgtgagccaccacacccggccaagcacaggcttttgaatggtctccctctccccagcccaggtacatgaggccaaggtgaactgtgcatcctgagaccttgtgtccctgagtctcctttctgagtgcaagctgcactgtgagctggctgtgggatactcacacattcccacattctcctttctgccacatctcgcccttctggacctgcactgggagaaattcaggacaggagtgaactcaaggccatgaactcactggatttccatttttaggcacccatagggatgtttttaggatgtaagtttctgaggagaaagctagctctagcatgaagcttttttggattggcttctccatcgtgttggggtaacattttttttccaattttttttttcccaaaacatcgtctcagctcatttatcaagtaggtaaaatgagccttttgtgtacacacagaggcacatgtgcatgcacacacaacttgtgaacacacatttctgttaaagaagttagaaaatgagagatgggttggggcttgaagtgcatcagaggtatgaatgttgtaaaactgtcaggagatgtaaaattcctttctgaagtgtctcttctgtgaaagggttcagagcagattttgcttactatgtagtgttgcccttaagtacagtggtgtaattttattcaagattgtgctcttctatcaaaagcctctggaaataaatgttccgggatcatg

SEQ ID NO: 61774 - DNA, 543 bp, Homo sapiens
cgaaatatatcggctaggtagcgaggctgggtggtgacgctccaagatggctgcctccatagtgcggcgcgggatgctcctggcgcggcaagtggttcttcctcagctctctcctgcaggtaaaagatacctgctttcttcagcctatgtagacagccacaaatgggaagcaagagaaaaagaacattactgtcttgctgatcttgcatctttaatggataaaacatttgagagaaagttgcctgttagttctttaacaatatcacggcttatagacaacatttcctctcgggaagagatagatcatgcagagtattacctttacaagtaagttttccatttgatttggctatgtactctgtgatttcacaccccttttttacataaaagttggtatatgttgtgtataattttgacaccttctaagtttatattttaaagatcttttcatatgagtatagagagagtttctgattttttataactgcattttattccatactgtgagtttattatttaaaccagttccctttttatggacct

SEQ ID NO: 61775 - DNA, 563 bp, Homo sapiens
cgaaatatatcggctaggtagcgaggctgggtggtgacgctccaagatggctgcctccatagtgcggcgcgggatgctcctggcgcggcaagtggttcttcctcagctctctcctgcaggtaaaagatacctgctttcttcagcctatgtagacagccacaaatgggaagcaagagaaaaagaacattactgtcttgctgatcttgcatctttaatggataaaacatttgagagaaagttgcctgttagttctttaacaatatcacggcttatagacaacatttcctctcgggaagagatagatcatgcagagtattacctttacaagtggaattttacccgatgtgaactgttatgtacctattttcagttaacactgttttaaaaccttttctacattaccacatttacttcactctttctcacagctgctaacaattccattgtgaactacccacaaaactcagccatgtgtacaaaaagtatgttcagtgcaacatcatttatggtagcaaaagactgaaacaacctaatgcacattaaataaagaactggtcaaacaa

SEQ ID NO: 61776 - DNA, 2891 bp, Homo sapiens
  misc_feature (1229)..(1229): n is a, c, g, or t
ccagctggcagtcaaggctgtaggagggcatggagagttgaagaaaaaagcagtatcttgaggcagactggaagagtcatcacagcatccaaatcaacaagaaaacatcattccagggtcctacatgatggcgtactctgatactacaatgatgtctgatgatattgactggttacgcagccacaggggtgtgtgcaaggtagatctctacaacccagaaggacagcaagatcaggaccggaaagtgatatgctttgtcgatgtgtccaccctgaatgtagaagataaagattacaaggatgctgctagttccagctcagaaggcaacttaaacctgggaagtctggaagaaaaagagattatcgtgatcaaggacactgagaagaaagaccagtctaagacagagggatctgtatgccttttcaaacaagctccctctgatcctgtaagtgtcctcaactggcttctcagtgatctccagaagtatgccttgggtttccaacatgcactgagcccctcaacctctacctgtaaacataaagtaggagacacagagggcgaatatcacagagcatcctctgagaactgctacagtgtctatgccgatcaagtgaacatagattatttgatgaacagacctcaaaacctacgtctagaaatgacagcagctaaaaacaccaacaataatcaaagtccttcagctcctccagccaaacctcctagcactcagagagcagtcatttcccctgatggagaatgttctatagatgacctttccttctacgtcaaccgactatcttctctggtaatccagatggcccataaggaaatcaaggagaagttggaaggtaaaagcaaatgccttcatcattcaatctgtccatcccctgggaacaaagagagaatcagtccccgaactcctgcgagcaagattgcttctgaaatggcctatgaagctgtggaactgacagctgcagaaatgcgtggcactggagaggagtccagggaaggtggccagaaaagctttctatatagcgaattatccaacaagagcaaaagtggagacaaacagatgtcccagagagagagcaaagaatttgcagattccatcagcaaggggctcatggtttatgcaaatcaggtggcatctgacatgatggtctctctcatgaagaccttgaaagtgcacagctctgggaagccaattccagcatctgtggtcctgaagngggtgttgctaaggcacaccaaggagattgtgtccgatttgattgattcttgcatgaagaacctgcataatattactggggtcctgatgactgactcagactttgtctcagctgtcaagagaaatctgttcaaccagtggaaacaaaatgcctacagacatcatcggaggcccatgctgaagcgcttggtcagtgcccttataggtgaggagaaggagactaagtctcagagtctgtcatatgcatctttaaaagctgggtcccatgatcccaaatgcaggaatcagagtcttgaattctccaccatgaaagctgaaatgaaagagagggacaaaggcaaaatgaaatcagacccatgcaagtcactgactagtgctgagaaagtcggtgaacacattctcaaagagggcctaaccatctggaaccaaaagcaaggaaactcatgcaaggtggctaccaaagcatgcagcaataaagatgagaaaggagaaaagatcaatgcttccacagattcactggccaaggacctgattgtctctgcccttaagctgatccagtaccatctgacccagcagactaagggcaaagatacatgtgaagaagactgtcctggttccaccatgggctatatggctcagagtactcaatatgaaaagtgtggaggtggccaaagtgccaaagcactttcagtgaaacaactagaatctcacagagcccctggaccatccacctgtcaaaaggagaaccaacacctggactcccagaaaatggatatgtcaaacatcgttctaatgctgattcagaaactgcttaatgagaaccccttcaaatgtgaggatccatgcgaaggtgagaacaagtgttctgagcccagggcaagcaaagcagcttccatgtccaacagatctgacaaagcggaagaacaatgccaggagcatcaagaacttgactgtaccagtgggatgaagcaagcgaacgggcaatttatagataaactagtagaatctgtgatgaagctctgccttatcatggctaagtatagcaacgatggggcagcccttgctgagttggaagaacaagcagcctcggcaaataagcccaatttcaggggcaccagatgcattcacagtggtgcaatgccacagaactatcaagactctcttggacatgaagtaattgtcaataatcagtgctctacaaatagcttgcagaagcagctccaggctgtcctgcagtggattgcagcctcccagtttaacgtgcccatgctctacttcatgggagataaggatggacaactggaaaagcttcctcaggtttcagctaaagcagcagagaaggggtacagtgtaggaggtcttcttcaagaggtcatgaagtttgccaaggaacggcaaccagatgaagctgtgggaaaggtggccaggaaacagttgctggactggctgctcgctaacctgtgagctgatccttgactcctcttcatcttagcccccctagcagcattccatcccagccagagcacccccaccatcaggccagtcaactgcacaatacacaactgtatttcccaatacacttgagcagttgcctgtgaatgtaagaggtgtcaacaaactgggaaataaaataaaaaaaaataataataaatgtgtgtcattg

SEQ ID NO: 61777 - DNA, 2907 bp, Homo sapiens
  misc_feature (1245)..(1245): n is a, c, g, or t
agcggagtctggtccaacagctgacaggggtggcagccaactgcaggtgcccaagaacttggcacttctcagttccatctaaaggggcacatctcccttctgggtgtcacgttttcagccaaacatctaaaagaacttcatcatcaagatgtctgatgatattgactggttacgcagccacaggggtgtgtgcaaggtagatctctacaacccagaaggacagcaagatcaggaccggaaagtgatatgctttgtcgatgtgtccaccctgaatgtagaagataaagattacaaggatgctgctagttccagctcagaaggcaacttaaacctgggaagtctggaagaaaaagagattatcgtgatcaaggacactgagaagaaagaccagtctaaggtcttcttctttttttagaacagagggatctgtatgccttttcaaacaagctccctctgatcctgtaagtgtcctcaactggcttctcagtgatctccagaagtatgccttgggtttccaacatgcactgagcccctcaacctctacctgtaaacataaagtaggagacacagagggcgaatatcacagagcatcctctgagaactgctacagtgtctatgccgatcaagtgaacatagattatttgatgaacagacctcaaaacctacgtctagaaatgacagcagctaaaaacaccaacaataatcaaagtccttcagctcctccagccaaacctcctagcactcagagagcagtcatttcccctgatggagaatgttctatagatgacctttccttctacgtcaaccgactatcttctctggtaatccagatggcccataaggaaatcaaggagaagttggaaggtaaaagcaaatgccttcatcattcaatctgtccatcccctgggaacaaagagagaatcagtccccgaactcctgcgagcaagattgcttctgaaatggcctatgaagctgtggaactgacagctgcagaaatgcgtggcactggagaggagtccagggaaggtggccagaaaagctttctatatagcgaattatccaacaagagcaaaagtggagacaaacagatgtcccagagagagagcaaagaatttgcagattccatcagcaaggggctcatggtttatgcaaatcaggtggcatctgacatgatggtctctctcatgaagaccttgaaagtgcacagctctgggaagccaattccagcatctgtggtcctgaagngggtgttgctaaggcacaccaaggagattgtgtccgatttgattgattcttgcatgaagaacctgcataatattactggggtcctgatgactgactcagactttgtctcagctgtcaagagaaatctgttcaaccagtggaaacaaaatgcctacagacatcatcggaggcccatgctgaagcgcttggtcagtgcccttataggtgaggagaaggagactaagtctcagagtctgtcatatgcatctttaaaagctgggtcccatgatcccaaatgcaggaatcagagtcttgaattctccaccatgaaagctgaaatgaaagagagggacaaaggcaaaatgaaatcagacccatgcaagtcactgactagtgctgagaaagtcggtgaacacattctcaaagagggcctaaccatctggaaccaaaagcaaggaaactcatgcaaggtggctaccaaagcatgcagcaataaagatgagaaaggagaaaagatcaatgcttccacagattcactggccaaggacctgattgtctctgcccttaagctgatccagtaccatctgacccagcagactaagggcaaagatacatgtgaagaagactgtcctggttccaccatgggctatatggctcagagtactcaatatgaaaagtgtggaggtggccaaagtgccaaagcactttcagtgaaacaactagaatctcacagagcccctggaccatccacctgtcaaaaggagaaccaacacctggactcccagaaaatggatatgtcaaacatcgttctaatgctgattcagaaactgcttaatgagaaccccttcaaatgtgaggatccatgcgaaggtgagaacaagtgttctgagcccagggcaagcaaagcagcttccatgtccaacagatctgacaaagcggaagaacaatgccaggagcatcaagaacttgactgtaccagtgggatgaagcaagcgaacgggcaatttatagataaactagtagaatctgtgatgaagctctgccttatcatggctaagtatagcaacgatggggcagcccttgctgagttggaagaacaagcagcctcggcaaataagcccaatttcaggggcaccagatgcattcacagtggtgcaatgccacagaactatcaagactctcttggacatgaagtaattgtcaataatcagtgctctacaaatagcttgcagaagcagctccaggctgtcctgcagtggattgcagcctcccagtttaacgtgcccatgctctacttcatgggagataaggatggacaactggaaaagcttcctcaggtttcagctaaagcagcagagaaggggtacagtgtaggaggtcttcttcaagaggtcatgaagtttgccaaggaacggcaaccagatgaagctgtgggaaaggtggccaggaaacagttgctggactggctgctcgctaacctgtgagctgatccttgactcctcttcatcttagcccccctagcagcattccatcccagccagagcacccccaccatcaggccagtcaactgcacaatacacaactgtatttcccaatacacttgagcagttgcctgtgaatgtaagaggtgtcaacaaactgggaaataaaataaaaaaaaataataataaatgtgtgtcattg

SEQ ID NO: 61778 - DNA, 2919 bp, Homo sapiens
  misc_feature (1257)..(1257): n is a, c, g, or t
cggaattcgggggaagatgtggctgctggcacttggagccaagggttcagagactcaggggtggcagccaactgcaggtgcccaagaacttggcacttctcagttccatctaaaggggcacatctcccttctgggtgtcacgttttcagccaaacatctaaaagaacttcatcatcaagatgtctgatgatattgactggttacgcagccacaggggtgtgtgcaaggtagatctctacaacccagaaggacagcaagatcaggaccggaaagtgatatgctttgtcgatgtgtccaccctgaatgtagaagataaagattacaaggatgctgctagttccagctcagaaggcaacttaaacctgggaagtctggaagaaaaagagattatcgtgatcaaggacactgagaagaaagaccagtctaagacagagggatctgtatgccttttcaaacaagctccctctgatcctgtaagtgtcctcaactggcttctcagtgatctccagaagtatgccttgggtttccaacatgcactgagcccctcaacctctacctgtaaacataaagtaggagacacagagggcgaatatcacagagcatcctctgagaactgctacagtgtctatgccgatcaagtgaacatagattatttgatgaacagacctcaaaacctacgtctagaaatgacagcagctaaaaacaccaacaataatcaaagtccttcagctcctccagccaaacctcctagcactcagagagcagtcatttcccctgatggagaatgttctatagatgacctttccttctacgtcaaccgactatcttctctggtaatccagatggcccataaggaaatcaaggagaagttggaaggtaaaagcaaatgccttcatcattcaatctgtccatcccctgggaacaaagagagaatcagtccccgaactcctgcgagcaagattgcttctgaaatggcctatgaagctgtggaactgacagctgcagaaatgcgtggcactggagaggagtccagggaaggtggccagaaaagctttctatatagcgaattatccaacaagagcaaaagtggagacaaacagatgtcccagagagagagcaaagaatttgcagattccatcagcaaggggctcatggtttatgcaaatcaggtggcatctgacatgatggtctctctcatgaagaccttgaaagtgcacagctctgggaagccaattccagcatctgtggtcctgaagngggtgttgctaaggcacaccaaggagattgtgtccgatttgattgattcttgcatgaagaacctgcataatattactggggtcctgatgactgactcagactttgtctcagctgtcaagagaaatctgttcaaccagtggaaacaaaatgcctacagacatcatcggaggcccatgctgaagcgcttggtcagtgcccttataggtgaggagaaggagactaagtctcagagtctgtcatatgcatctttaaaagctgggtcccatgatcccaaatgcaggaatcagagtcttgaattctccaccatgaaagctgaaatgaaagagagggacaaaggcaaaatgaaatcagacccatgcaagtcactgactagtgctgagaaagtcggtgaacacattctcaaagagggcctaaccatctggaaccaaaagcaaggaaactcatgcaaggtggctaccaaagcatgcagcaataaagatgagaaaggagaaaagatcaatgcttccacagattcactggccaaggacctgattgtctctgcccttaagctgatccagtaccatctgacccagcagactaagggcaaagatacatgtgaagaagactgtcctggttccaccatgggctatatggctcagagtactcaatatgaaaagtgtggaggtggccaaagtgccaaagcactttcagtgaaacaactagaatctcacagagcccctggaccatccacctgtcaaaaggagaaccaacacctggactcccagaaaatggatatgtcaaacatcgttctaatgctgattcagaaactgcttaatgagaaccccttcaaatgtgaggatccatgcgaaggtgagaacaagtgttctgagcccagggcaagcaaagcagcttccatgtccaacagatctgacaaagcggaagaacaatgccaggagcatcaagaacttgactgtaccagtgggatgaagcaagcgaacgggcaatttatagataaactagtagaatctgtgatgaagctctgccttatcatggctaagtatagcaacgatggggcagcccttgctgagttggaagaacaagcagcctcggcaaataagcccaatttcaggggcaccagatgcattcacagtggtgcaatgccacagaactatcaagactctcttggacatgaagtaattgtcaataatcagtgctctacaaatagcttgcagaagcagctccaggctgtcctgcagtggattgcagcctcccagtttaacgtgcccatgctctacttcatgggagataaggatggacaactggaaaagcttcctcaggtttcagctaaagcagcagagaaggggtacagtgtaggaggtcttcttcaagaggtcatgaagtttgccaaggaacggcaaccagatgaagctgtgggaaaggtggccaggaaacagttgctggactggctgctcgctaacctgtgagctgatccttgactcctcttcatcttagcccccctagcagcattccatcccagccagagcacccccaccatcaggccagtcaactgcacaatacacaactgtatttcccaatacacttgagcagttgcctgtgaatgtaagaggtgtcaacaaactgggaaataaaataaaaaaaaataataataaatgtgtgtcattg

SEQ ID NO: 61779 - DNA, 2888 bp, Homo sapiens
  misc_feature (1226)..(1226): n is a, c, g, or t
agcggagtctggtccaacagctgacaggggtggcagccaactgcaggtgcccaagaacttggcacttctcagttccatctaaaggggcacatctcccttctgggtgtcacgttttcagccaaacatctaaaagaacttcatcatcaagatgtctgatgatattgactggttacgcagccacaggggtgtgtgcaaggtagatctctacaacccagaaggacagcaagatcaggaccggaaagtgatatgctttgtcgatgtgtccaccctgaatgtagaagataaagattacaaggatgctgctagttccagctcagaaggcaacttaaacctgggaagtctggaagaaaaagagattatcgtgatcaaggacactgagaagaaagaccagtctaagacagagggatctgtatgccttttcaaacaagctccctctgatcctgtaagtgtcctcaactggcttctcagtgatctccagaagtatgccttgggtttccaacatgcactgagcccctcaacctctacctgtaaacataaagtaggagacacagagggcgaatatcacagagcatcctctgagaactgctacagtgtctatgccgatcaagtgaacatagattatttgatgaacagacctcaaaacctacgtctagaaatgacagcagctaaaaacaccaacaataatcaaagtccttcagctcctccagccaaacctcctagcactcagagagcagtcatttcccctgatggagaatgttctatagatgacctttccttctacgtcaaccgactatcttctctggtaatccagatggcccataaggaaatcaaggagaagttggaaggtaaaagcaaatgccttcatcattcaatctgtccatcccctgggaacaaagagagaatcagtccccgaactcctgcgagcaagattgcttctgaaatggcctatgaagctgtggaactgacagctgcagaaatgcgtggcactggagaggagtccagggaaggtggccagaaaagctttctatatagcgaattatccaacaagagcaaaagtggagacaaacagatgtcccagagagagagcaaagaatttgcagattccatcagcaaggggctcatggtttatgcaaatcaggtggcatctgacatgatggtctctctcatgaagaccttgaaagtgcacagctctgggaagccaattccagcatctgtggtcctgaagngggtgttgctaaggcacaccaaggagattgtgtccgatttgattgattcttgcatgaagaacctgcataatattactggggtcctgatgactgactcagactttgtctcagctgtcaagagaaatctgttcaaccagtggaaacaaaatgcctacagacatcatcggaggcccatgctgaagcgcttggtcagtgcccttataggtgaggagaaggagactaagtctcagagtctgtcatatgcatctttaaaagctgggtcccatgatcccaaatgcaggaatcagagtcttgaattctccaccatgaaagctgaaatgaaagagagggacaaaggcaaaatgaaatcagacccatgcaagtcactgactagtgctgagaaagtcggtgaacacattctcaaagagggcctaaccatctggaaccaaaagcaaggaaactcatgcaaggtggctaccaaagcatgcagcaataaagatgagaaaggagaaaagatcaatgcttccacagattcactggccaaggacctgattgtctctgcccttaagctgatccagtaccatctgacccagcagactaagggcaaagatacatgtgaagaagactgtcctggttccaccatgggctatatggctcagagtactcaatatgaaaagtgtggaggtggccaaagtgccaaagcactttcagtgaaacaactagaatctcacagagcccctggaccatccacctgtcaaaaggagaaccaacacctggactcccagaaaatggatatgtcaaacatcgttctaatgctgattcagaaactgcttaatgagaaccccttcaaatgtgaggatccatgcgaaggtgagaacaagtgttctgagcccagggcaagcaaagcagcttccatgtccaacagatctgacaaagcggaagaacaatgccaggagcatcaagaacttgactgtaccagtgggatgaagcaagcgaacgggcaatttatagataaactagtagaatctgtgatgaagctctgccttatcatggctaagtatagcaacgatggggcagcccttgctgagttggaagaacaagcagcctcggcaaataagcccaatttcaggggcaccagatgcattcacagtggtgcaatgccacagaactatcaagactctcttggacatgaagtaattgtcaataatcagtgctctacaaatagcttgcagaagcagctccaggctgtcctgcagtggattgcagcctcccagtttaacgtgcccatgctctacttcatgggagataaggatggacaactggaaaagcttcctcaggtttcagctaaagcagcagagaaggggtacagtgtaggaggtcttcttcaagaggtcatgaagtttgccaaggaacggcaaccagatgaagctgtgggaaaggtggccaggaaacagttgctggactggctgctcgctaacctgtgagctgatccttgactcctcttcatcttagcccccctagcagcattccatcccagccagagcacccccaccatcaggccagtcaactgcacaatacacaactgtatttcccaatacacttgagcagttgcctgtgaatgtaagaggtgtcaacaaactgggaaataaaataaaaaaaaataataataaatgtgtgtcattg

SEQ ID NO: 61780 - DNA, 415 bp, Homo sapiens
aggggcagaaaaggggaggctcctcagatggagagttggggagagaaggagggatttggagccagggcagacagagcagcatggtgctgggagaacaagaggggcagccagtgataaggagagcacagggagaaccacagcctggggagaactgggatctggggatgccagagaggggacaggtggatatagcagggaagaggggatttaacaggggaagctagggggcagcagagacggggggaagaaagaggcagaactatatgaaaattggagacaaatattgggcagaaagaagaataagaggtgaaagaagtgagaaaggagcagaacaagtggaagagaaggaatagagggaagagcaggagaaggaagaagggcttgaaatgaggagaatcctaggggaaaaataaag

SEQ ID NO: 61781 - DNA, 366 bp, Homo sapiens
actcttaaattaacttcaaatcagattaatctgagatattcaaattaaaatgatgatgaaggtgggggtggtggtggtgatgatgatgatgatttgtcaaagggattcttcatttatagacaaggcagaagacattatcagtggtatgcatatactattccccaacttagtcaagttacccaccaaattccgtatgtgataagcatatttcccttttaccgcatcatcaagcaaataaaaacacacttttctcatgtactccaagaatcatgctatcatcataaaattagctatagaaactgcattctctaaattttaagagagaaaatgtgtcccttgaccaagatctctattcctcactggtgc

SEQ ID NO: 61782 - DNA, 184 bp, Homo sapiens
cttatgaactcttaggatgttcaccctttggatcctggagacaaaatgattctgcattgaacatttaaagacacctcttgcttctttaaatcattttagacttcatagaggtatcaggaaattttcagaattgtggtgccatgttgacaactgttctgttggcagactggcagctgaaataggg

SEQ ID NO: 61783 - DNA, 503 bp, Homo sapiens
agtgctgacttgggtcccattctcaggctgtttctgagactcttcaagccgtgtttacaggttcttttttattctggggcccttggtacagagttgagtcaaaagtgctcagttgccagcacagagcctctgtggtctgtaaatcctcagcagtgtcaatcctataaatcccgggctgggctgcactccaccttccctacttcacccttgccaccttgtcacctgcttctccaggctgttgtgctcttccatgctgattcacaccctgcttcctgtttacccttccccagcacagaaaaggcagacggcactggacagcccacaactctagagtcagcagcatctctgtctggccgtggggtgctggtaaacatttagccacctgctggaggggctgagccctagcgtttgcaattcctgtgatttcaagctcccggctgtgatgttattgaatggagttgggaagagatgcacaatagcacatgtttatattgtattttcct

SEQ ID NO: 61784 - DNA, 434 bp, Homo sapiens
aacaccttgagataactctacaaaaccaggatcaaattatcacaaaaaaacttcacagagtgaagaatgaaggaaaagaaaaatgatcacaaatgggtttttgttttaatcaggaaatacggttatacacatctacaagcaaggactggatgttctatgtcatggatctcccaaaacccctggcaccattggttgacggtccaaagtatttgacttgctaaagaatctttccctcctagaagtataaaattctactttattttccctataaaaacaaacaaaataactatatatatatgctgatattgaaccagaattacaaataatttgtaatgtcagatatttaaattctacctattttataatatttatttcacaaaagtcacaagactcactatgttatacaatagagttttcagaatcactttacagaa

SEQ ID NO: 61785 - DNA, 185 bp, Homo sapiens
gaaccctggatcttctccataatccagttgtcctcaccatcccgttaccctgccgtcccttctaattcaatccaacctgcaccaacacccagaatttggtgtaagtggaaacccaggggcagcacagggctgggcgggaagggcttaaggtgtcctctacccaggaggggacttgctcttgcttt

SEQ ID NO: 61786 - DNA, 274 bp, Homo sapiens
ggtaccatggctagtgtcatagaatgctgagagcacagctcctgctgatccccacacagccaatcacaccctcctgcgggaatgagggcaccccaactttttgataccccaaaacctgtctctcacagcccctggttgttcacactcttcccaagtgcagccctgggtggccctgtgtaacatgtggtgtcctcctcccccagtctgttagtctatgtgacaaatacacagctgccattctcatctgtcctgtggcaggtgttgtgttctcagc

SEQ ID NO: 61787 - DNA, 1719 bp, Homo sapiens
ggcatatgaagtgtttgagtggtgaatgttgcaccacaagaatagatgtgccttgcttttgttctgactggtattagcaaaaagagataactatcggaatgtggtagcgccaaatttgtgattttgagtgtggcacttagaagtgaatacatcagctactagtaaacgctaggtcattgttgtacacgatatacttaagtcagattttaatattaaaagtgactttagttgagatacactgttgcatcttgaccaaatggtagattcttgctataatgtgttctcttcccattagctgctggtttaattttaatcagagggtaaaaatgtcacagtatcttttccccagagatgaattgtcagaaattgttgggaactctactgttgaagcatttcctaattacttgtttgtttggcacattaactatttacaccccatgttttattcctttcctgctgctgtgtcaaaataccttagaatgggtaatttataaacaacagaaatttatttctcacagtttgggaggttgggaagttcaagatcaaggaaccagcagatttggtgtctggcgagggcttgttcatcataaatgatgccttttagcggtattctcacatggagctgaacgctgtgtcctcatgtggcagacgacatggaagggcaaaaagtagctagttctctcaaccccttttgcaaggcctaatccctaattacctcctaaaggtcccacttcttaataccatcacctgggggtttaagttccaacatacgaattttggagggacacatacattcaaactgtggcaccccaactcagaaagtttccatgttcacagcagtgaacaaaaatgaacagaaatccttgtctttatactgtttgcattttaatacttactgtcagttaatgttatatactgttatttatattgatgtatactgatgttgtgtgtgtgaaatggctttttctggttagtatttgagtttaaagtaagattcatatgttttccaacttttaaatttttcatctataaaagtataaaaagaactaatggaagactttgctaagcaaatccaaccttggtattcacaatagaaaaataagggctttgaaataacaatgatgacaatttctgaagcccataattccattccatcacactattaaaaaaaaaaaaaaaaggaacatcgataggaagtctgggttctagtccaggttctgccattaagtcaactgagtttacttctcatctctggacctcagtatccccatttgtacaataaagagggttggattagatcagtgattttcagattgttctcttcagaggccttggcttttgtaaagatcttagggactgcaggaggagaactgtgcagatgcagaggtagacctagtaagcttccttccccagcttcaaaaaaaaaactatattatacttatcagttttatatattgggcttctggagagatatttggctttcttttatttaaaaataatttgagattgaaaatgttgatacagatcagaccttggttcccttgtaaaatgctaggattttattgaaaatggataaattactgctttcttggatcttacagtaataaccctatagattccttatatgtgactattttctaggaccaaggcaagaacttttattaactcttctgcctgtaaaacttggtagcttttaagattatcttgcaatgaacacaa

SEQ ID NO: 61788 - DNA, 337 bp, Homo sapiens
gtcttttcttctgagtatgctagatattgtctattgatacttaataccatctcaaatcctttaaactctaatttgtatcctaatggctagaaacctgaaacctgtattttacatattcttttgacatttctggcctacgttttcactagtaagaagcagttgaatgatatttggaagattaaagagaaagggaagccattattctctgttggtagcagcagtggctcctggacccatcgacccataggcagataatggatttgaggtgtgcagtgatttcttagtaagttcctttgttctttgatactacggatagttaaaacacttagattttttt

SEQ ID NO: 61789 - DNA, 356 bp, Homo sapiens
ctccctgctccccccaccccacagcagtccccagatgtgatgttccccttcaaaatcttaaacattaagctatgaatctattttgaattctaaatataaaatttcacttaaaacatacattttacgtaaactaatcatgcaaatcattttaataattgtcaataaatgcctttctccttaaataactcaaattcaattggaaagtaggtatcatttaataaatagaaaacatcaagttctatctctctgtaaggataaatcttatattaagataacattttatcatggagattagtaatacatgagtctaaagtaaatattataaaataaaaatagcttattcatcatgcacacat

SEQ ID NO: 61790 - DNA, 534 bp, Homo sapiens
tgagcagaatctacacagtccctacctgtatggaacttacatcctagtggaggaaaatagataaatacagggaagtaaatctatgatgtaatgtgggtgctaaataagaaaaacaaagctggataagggaatagagagtagaagggactgctactactttagatagattggtcaggaagggcctttttgaggaggtgacattgaagcagagacctgtcattatactgaaactagagctgaagtggacctcgtgttcccatccccgttttgcagatgaggaagttggagcagcaaggataaaggtatggcccaagatttcacagctcgacaggaatctcttcctgatataaaattctgaaggtattttcactagagcaactggtagctcttggagagcaaactggggttggccaggctgtgttcctaagcaaggaagcttttgaggtatccttcaaaggctatcagaatctgccttttcagttcatcctattttagcaagaataccttaagaatttcaaatgggaaaaaaagcaa

SEQ ID NO: 61791 - DNA, 169 bp, Homo sapiens
ctctgccgttatttatggatgcgcctggcctctcggtggacagagaaaatcaccaggccccgggggccttgtcttactcatccctgtgtggagctcccagcacaggccttggcacagaaggccagagtgaaggaagcatcagttgagcctgaggcacctggaaggccag

SEQ ID NO: 61792 - DNA, 415 bp, Homo sapiens
ccttttcattggtgtataatattatatataggcacttgatggatagcagtttgaggtgcttaccagtaatagtcaaacataatgcacatgtactttaggacacatgtattcacacaaaattggaattgccagatcctagagtagtcatatgttcaacttaggagataatgtgtgttataaatttcatctactcagtggcttctttcagtctctaaatgatctcattttaactttttaaaatgttatttatttatttttgagatggggtgtctcactctgtcaccgaggctggactgcagtagtgtgatcatagcttattgcagtctcaaattcctgggatcaagcaatcctctcacctcagcctcaggtagctgagactacaggtacgtgccaccatacctgactaacttaaaaa

SEQ ID NO: 61793 - DNA, 465 bp, Homo sapiens
gggccgggtcgggtggtgggcagccgccggcgaccgccacgcaaactcgtgccgctcgcctacaagcagttcagccccaatgtgcccgagaagaccctgggcgccagcggacgctatgaaggcaagatcgctcgcagctccgagcgcttcaaggagctcacccccaattacaatccacactcctcaagacacatccagagactgttgctgtctgtgggcagagttctgtgttctggccaatgtgaccgtagtgccggggactgggggaggtgggttggatgtgcttgccacccccccggctaagctcccccttctgctgaaccatgatccccaccccctccgccggtcagtctcccataccttatttattggagtggagggggaagcccatgggagaattttggggatgttttggtcttttcttccttttgtaataaaaattatttaagttgtagaaaaaaagag

SEQ ID NO: 61794 - DNA, 1746 bp, Homo sapiens
ggagaacacaggcgccgaccgcctcatgacccagcgctgcaaggaccgcctgaactcgctggctatctcggtgatgaaccagtggcccggtgtgaagctgcgggtgaccgagggctgggacgaggacggccaccactcagaggagtccctgcattatgagggccgcgcggtggacatcaccacatcagaccgcgaccgcaataagtatggactgctggcgcgcttggcagtggaggccggctttgactgggtgtattacgagtcaaaggcccacgtgcattgctccgtcaagtccgagcactcggccgcagccaagacgggcggctgcttccctgccggagcccaggtacgcctggagagtggggcgcgtgtggccttgtcagccgtgaggccgggagaccgtgtgctggccatgggggaggatgggagccccaccttcagcgatgtgctcattttcctggaccgcgagccccacaggctgagagccttccaggtcatcgagactcaggaccccccacgccgcctggcactcacacccgctcacctgctctttacggctgacaatcacacggagccggcagcccgcttccgggccacatttgccagccacgtgcagcctggccagtacgtgctggtggctggggtgccaggcctgcagcctgcccgcgtggcagctgtctctacacacgtggccctcggggcctacgccccgctcacaaagcatgggacactggtggtggaggatgtggtggcatcctgcttcgcggccgtggctgaccaccacctggctcagttggccttctggcccctgagactctttcacagcttggcatggggcagctggaccccgggggagggtgtgcattggtacccccagctgctctaccgcctggggcgtctcctgctagaagagggcagcttccacccactgggcatgtccggggcagggagctgaaaggactccaccgctgccctcctggaactgctgtactgggtccagaagcctctcagccaggagggagctggccctggaagggacctgagctgggggacactggctcctgccatctcctctgccatgaagatacaccattgagacttgactgggcaacaccagcgtcccccacccgcgtcgtggtgtagtcatagagctgcaagctgagctggcgaggggatggttgttgacccctctctcctagagaccttgaggctggcacggcgactcccaactcagcctgctctcactacgagttttcatactctgcctcccccattggggagggcccattccatccatcttaggcccctttgggtgggcttgcgcctcagttgatgctgctaaattccctgggagccagcatggatctggctggacccgatgctgtccagaactgggaaggccacaggggtggggcagccatcccggccattctgaggtatgacattcctccccggccacactcctcaagacacatccagagactgttgctgtctgtgggcagagttctgtgttctggccaatgtgaccgtagtgccggggactgggggaggtgggttggatgtgcttgccacccccccggctaagctcccccttctgctgaaccatgatccccaccccctccgccggtcagtctcccataccttatttattggagtggagggggaagcccatgggagaattttggggatgttttggtcttttcttccttttgtaataaaaattatttaagttgtagaaaaaaagag

SEQ ID NO: 61795 - DNA, 1375 bp, Homo sapiens
ggagaacacaggcgccgaccgcctcatgacccagcgctgcaaggaccgcctgaactcgctggctatctcggtgatgaaccagtggcccggtgtgaagctgcgggtgaccgagggctgggacgaggacggccaccactcagaggagtccctgcattatgagggccgcgcggtggacatcaccacatcagaccgcgaccgcaataagtatggactgctggcgcgcttggcagtggaggccggctttgactgggtgtattacgagtcaaaggcccacgtgcattgctccgtcaagtccgagcactcggccgcagccaagacgggcggctgcttccctgccggagcccaggtacgcctggagagtggggcgcgtgtggccttgtcagccgtgaggccgggagaccgtgtgctggccatgggggaggatgggagccccaccttcagcgatgtgctcattttcctggaccgcgagccccacaggctgagagccttccaggtcatcgagactcaggaccccccacgccgcctggcactcacacccgctcacctgctctttacggctgacaatcacacggagccggcagcccgcttccgggccacatttgccagccacgtgcagcctggccagtacgtgctggtggctggggtgccaggcctgcagcctgcccgcgtggcagctgtctctacacacgtggccctcggggcctacgccccgctcacaaagcatgggacactggtggtggaggatgtggtggcatcctgcttcgcggccgtggctgaccaccacctggctcagttggccttctggcccctgagactctttcacagcttggcatggggcagctggaccccgggggagggtgtgcattggtacccccagctgctctaccgcctggggcgtctcctgctagaagagggcagcttccacccactgggcatgtccggggcagggagctgaaaggactccaccgctgccctcctggaactgctgtactgggtccagaagcctctcagccaggagggagctggccctggaagggacctgagctgggggacactggctcctgccatctcctctgccatgaagatacaccattgagacttgactgggcaacaccagcgtcccccacccgcgtcgtggtgtagtcatagagctgcaagctgagctggcgaggggatggttgttgacccctctctcctagagaccttgaggctggcacggcgactcccaactcagcctgctctcactacgagttttcatactctgcctcccccattggggagggcccattccatccatcttaggcgcgcaaattacccactacctccccgggtcggagtgtatttgcgcgctctgctgccttcatgaaggcgatca

SEQ ID NO: 61796 - DNA, 410 bp, Homo sapiens
catttaatttggtgtatatttttaaaatgtcaaaagcagttaccataacttaattttataagcatataagggaagtatgttgcatattattgtgacttcttttaatacttcaagaaaattaataaatacactgttttctgttaaatctaataccctaaagtttaatagcaggtgaattattctgagcaattggaagaatacgagaaatagcgaaactgtattgcatgtgaagtctaattccacctggctgaatgtttcagcctattatccttcatattagatgttatgaatgtaatgtgtcataaataaccttacactaaccagcaagcctgtgtctgcagatgcaaaatgaagcgaaagattaaggcaatcaaaaagaaaattctaataaaatagtttcacctcaattt

SEQ ID NO: 61797 - DNA, 445 bp, Homo sapiens
tgctttttcattgctagccactaaagtccactacattttgggacagcttgtttgaagagatggtcattagattgtttctctatgcagaaaatttttgaattggcttattcaaaattgccaacgagaaattacatgtgttgcctggaaagggtatgatttaaaatttttaaagtctcattttagtcccttaaaaaacactttgaatgaagcagccgagtgctctggtgtgctaatggtcagcagagcggctcccagctccctcctgcagcagggcgtttggccgcagcccatggcaggagctggtggggccgcgtcaggcagccccaggcatgggtaccctttatgaataccttcctcgaatgcgaatgcgctggtcaggacaatttctatgtctggaattccaaacaaccagaccattaaaattcatgggaatgcaagtcaggca

SEQ ID NO: 61798 - DNA, 4584 bp, Homo sapiens
  misc_feature (3227)..(3227): n is a, c, g, or t
  misc_feature (4573)..(4574): n is a, c, g, or t
  misc_feature (4576)..(4578): n is a, c, g, or t
  misc_feature (4580)..(4581): n is a, c, g, or t
  misc_feature (4583)..(4583): n is a, c, g, or t
cggagaaagctccaaaagcaagccctgggccctgaacaaaatctagagacattattaaacctggcaacctcggtgttctataatagggaccaagaggaacaggtccaaaaggaaaagcgagatcagagaaaggccgcagccttagtcatggccctcagacaaacaaaccttggtggttcagagaggacagaacatgaagcaggccaatcacctggtaaggcttgttatcagtgtggtttactgggacactttaaaaaagattgtccaatgagaaacaagctgccccctcgtccgtgtccactatgctgaggcaatcactggaaggtgcactgccccagaggatgaaggttccctgggtcagaagcccccagccagacgatccaacaacaggactgagggtgcctggggcaagcgccagctcatgtcatcaccctcactgagccccgggtatgtttaactattgagggccaggaaattgacttcctcctggacactggcgcggccttctcagtgttaatctcctgtcctggacgactctcctcaaggtccgttaccatccaaggaatcctgggacagcctgtaaccaggtatttctcccacctcctcagttgtaattgggagactttgctcttttcacatgcctttcttgttatgcctgaaagtcccacagggttattagggagggatatattagccaaggctggagctattatctacatgaatatggggaacaagttacccatttgttgtcccctacttgaggagggaatcaaccctgaagtctgggcattggaaggacaatttggaagggcaaaaaatgcccacccagtccaaatcaggttaaaagatcccaccacttttccttatcaaaggcaatatccctaaggcctgaagctcataaaggattacagaatattgttaaacatttgaaagctcaaggcttagtaaggaaatgcagcagtccctgcaacaccccaattctggaagtacaaagaccgagactagtgcaagatcttagactcattaatgaggcagtaatttcactatatccagttgtacccaacccctataccctgctctctcaaataccagaggaagcagaatggttcacagttctggacctcaaggatgccttcttctgtgttcccctgcactctgattcacagttcctctttgcttttgaggatcccacaaaccacacatcccaacttacatggatggtcttgccccaagggtttagggatagccctcatctgtttggtcaggccctagccaaagatctaggccacttctcaagtccaggcactctggtccttcaatatgtggatgatttacttttggctaccagttaggaagccttgtgccagcaggctactctagatctcttgaactttctagctaatcaagggtacaaggtgtctatgtcgaaggcccagctttgcctacagcaggttaaatatctaggcctaatcttagccaaagggaccagggccctcagcaaggaatgaatacagcctatactggcttatcctcgccctaagacattaaaacagttgagggagttccttggaattaccagcttttgccgactatggatccctggatacagcgagacagccaggcccctctaatcaaggaaacccagagggcaaatactcatctagttgagtgggaaccagaggcagaaacaaccttcaaaaccttaaagcaggctctagtacaagctccagctttaagccttcccacaggacagaatttctctttatatgtcagagagagagccaggatagctcttggagtcctcactcaaactcatgggacaaccccacaaccagtggcatacctaagtaaggaaattgatgtagtagcaaaaggctggcctcactgtttaagggtagttgcagcagtggccgtcttagcatcagaggctatcaaaataatacaaggaaaggatctcactgtctagactacttatgatgtaaatggcatactaggtgccaaaggaagtttatggctatcagacaactgcctacttagataccaggcactactccttgagggaccagtgcttcaaatatgcacatgcatggccctcaaccctgccacttttctcccagaggatggggaaccaatcaagcatgactgccaacaaattatagtccagacttatgccgcccgagatgatctcttagaagtccccttaactaatcctgaccttaacctatatactgatggaagttcatttgtggagaatgggatacgaaggttagtgatgtaaccatacttgaaagcaagcctcttcccccagggaccagtgcccagttagcggaactagtggcacttacctgggccttagaactgggaaagggaaaaagaataaatgtgtatacagatagcaagtatgcttatctaatcctacatgcccatgctgcaatatggaaagagagggagttcctaacctctgtaggaacccccattaaataccacaaggaaattatagagttattgcacgcaatgcaaaaacacaaagaggtgggaatcttacactgacaaagccatcagaataggaaggagaggggagaacagcagcataagcagctggcagaggcagcagaaaggaaagaaagagacaggaagtcaaagaaagagacagagaggaagagacaagaagttagagagaaagagggacagacacagaaagtcaaagagagggtaaaaaagagaggaagagacaaagaagaagtcaaagagagagatggaagtagtaaagaaaaaacagtgtacctattcctttaaaagccagggtaaatttctctctacccacgcaaggcatattctcttatgtggatcttcaacccatatctgcctctcaaacagttggaagaaataatgaaatctatccttactttacaatcccaaatagactctttggcagcagtgactctccaaaaccgctgaggcctagatctcctcactgctgaaaaaggaggactctgcaccttcttaggggaagagtgttgtttttacactaaccagtcagggatagcatgagatgccacccagcgtttacaggaaaaggcttctgaaatcagacgcctttcaaattcttataccaacctctggagttgggcaacatggcttctcccctttctaggtcccgtggcagccatcttgctgttactcgcctttgggccccgtatttttaaccttcttgtcaaatttgtttngtctagaatcgaggccatcaagctacagatggtcttacaaatggaaccccaaatgagttcaactaacaacttctaccgaggacccctggactgaccagctggcacttcccctggcctagagagttcccctctgaaggacactacaactgcaaagccccttcttcgcccctatccagcaggaagtagctagagcagtcatcggccaaattcccaacagcagttggggtgtcctgttgattgaggggtgacagcatgctggcagtcctcacagccctcactcgctcgctcactctcggcacctcctctgcctgggctcccactttggcagcacttgaggagcccttcagctctgtatctagctactctgatgggtccttggagaacctttatgtctagctcagggattgtaaatacaccaatcagcaccctgtgtctagctcagggtttgtgaatgcaccaatggacactctgtatctagctactctggtggggccttggagaacctttgtgtcaacactctgtatctaactaacctggtggggatgtggagaacctttgtgtctagctcagggatgtaaacgcaccaatcagtgccctgtcaaaccactcggctctaccaatcagcaggatgtgggtggggccagataagagaataaaagcaggctgcccgagccagcagtggcaacccgctcaggtccccttccacactgtggaagctttgttctttcgctctttgcaatacatcttgctactgctcactctttgggtccacactgcttttatgagctgtaacactcaccacaaaggtctgtagcttcactcctgagccagcgagaccacgaactcaccagaaggaagaaactccaaacacatccgaacatcagaagaaacaaactccagacgcaccaccttaagagctgtaacactcactgtgagggtccatggcttcattcttgaagtcagtgagaccaagaacccaccaattccggacacacaaccggccatgtgacaggctcagggaaggacatgtgactcaaggcaggccagtgaagtgcaattctaggttagactggccgggaaggagcggccgtgttttctgttgatggatgctgctgccctctcctcaacctctcacactctgcactacagacaacctccttggggctgaggccagcacagcgcaaagcacagcaagaggggagcccgagcccctggatccagccatcctccacggcaagctcagaccacccgctccctcagctctttcacagaaccctggtctacctagttgatgtcttatataattccactattatctgtgattaattaatgtggaaccacatgannannngnntnc

SEQ ID NO: 61799 - DNA, 1893 bp, Homo sapiens
  misc_feature (2)..(3): n is a, c, g, or t
  misc_feature (5)..(5): n is a, c, g, or t
  misc_feature (1882)..(1883): n is a, c, g, or t
  misc_feature (1885)..(1887): n is a, c, g, or t
  misc_feature (1889)..(1890): n is a, c, g, or t
  misc_feature (1892)..(1892): n is a, c, g, or t
gnntncccttccacactgtggaagctttgttctttcactctttgcaataaatcttgctactgttcactctttgggtccacactgcttttatgagctataacactcaccgcaaaggtctgcagcttcactcctgaagccagcgagaccacaagcccactgggaggaacgaacaactccaggcgcgcaatgaacaactccaggcgcgccgccttaagagctgtaacatcaccgcgaaggtctgcagtttcactcctaagccagcgagaccacgaacccaccagaaggaagaaactccaaacacatctgaacattagaaggaacaaactccagatgcgcacctttaagagcttgtaacactcaccgcgagggtccacggcttcattcttgaagtcaagtgatgaaggatgcaagaacccaccaattccggacacattttgtcgaccatgaaggactttcgcctattgccaagcggtgagacaatcgctgagcagtgagaccatcacctattgccgagcggtgagaccattgcctatcgccaagcaaatcgaggccatcaagctacagatggtcttacaaatggaaccccaaatgagttcaactaacaacttctaccgaggacccctggactgaccagctggcacttcccctggcctagagagttcccctctgaaggacactacaactgcaaagccccttcttcgcccctatccagcaggaagtagctagagcagtcatcggccaaattcccaacagcagttggggtgtcctgttgattgaggggtgacagcatgctggcagtcctcacagccctcactcgctcgctcactctcggcacctcctctgcctgggctcccactttggcagcacttgaggagcccttcagctctgtatctagctactctgatgggtccttggagaacctttatgtctagctcagggattgtaaatacaccaatcagcaccctgtgtctagctcagggtttgtgaatgcaccaatggacactctgtatctagctactctggtggggccttggagaacctttgtgtcaacactctgtatctaactaacctggtggggatgtggagaacctttgtgtctagctcagggatgtaaacgcaccaatcagtgccctgtcaaaccactcggctctaccaatcagcaggatgtgggtggggccagataagagaataaaagcaggctgcccgagccagcagtggcaacccgctcaggtccccttccacactgtggaagctttgttctttcgctctttgcaatacatcttgctactgctcactctttgggtccacactgcttttatgagctgtaacactcaccacaaaggtctgtagcttcactcctgagccagcgagaccacgaactcaccagaaggaagaaactccaaacacatccgaacatcagaagaaacaaactccagacgcaccaccttaagagctgtaacactcactgtgagggtccatggcttcattcttgaagtcagtgagaccaagaacccaccaattccggacacacaaccggccatgtgacaggctcagggaaggacatgtgactcaaggcaggccagtgaagtgcaattctaggttagactggccgggaaggagcggccgtgttttctgttgatggatgctgctgccctctcctcaacctctcacactctgcactacagacaacctccttggggctgaggccagcacagcgcaaagcacagcaagaggggagcccgagcccctggatccagccatcctccacggcaagctcagaccacccgctccctcagctctttcacagaaccctggtctacctagttgatgtcttatataattccactattatctgtgattaattaatgtggaaccacatgannannngnntnc

SEQ ID NO: 61800 - DNA, 1219 bp, Homo sapiens
  misc_feature (2)..(3): n is a, c, g, or t
  misc_feature (5)..(5): n is a, c, g, or t
gnntncccttccacactgtggaagctttgttctttcactctttgcaataaatcttgctactgttcactctttgggtccacactgcttttatgagctataacactcaccgcaaaggtctgcagcttcactcctgaagccagcgagaccacaagcccactgggaggaacgaacaactccaggcgcgcaatgaacaactccaggcgcgccgccttaagagctgtaacatcaccgcgaaggtctgcagtttcactcctaagccagcgagaccacgaacccaccagaaggaagaaactccaaacacatctgaacattagaaggaacaaactccagatgcgcacctttaagagcttgtaacactcaccgcgagggtccacggcttcattcttgaagtcaagtgatgaaggatgcaagaacccaccaattccggacacattttgtcgaccatgaaggactttcgcctattgccaagcggtgagacaatcgctgagcagtgagaccatcacctattgccgagcggtgagaccattgcctatcgccaagcaaatcgaggccatcaagctacagatggtcttacaaatggaaccccaaatgagttcaactaacaacttctaccgaggacccctggactgaccagctggcacttcccctggcctagagagttcccctctgaaggacactacaactgcaaagccccttcttcgcccctatccagcaggaagtagctagagcagtcatcggccaaattcccaacagcagttggggtgtcctgttgattgaggggtgacagcatgctggcagtcctcacagccctcactcgctcgctcactctcggcacctcctctgcctgggctcccactttggcagcacttgaggagcccttcagctctgtatctagctactctgatgggtccttggagaacctttatgtctagctcagggattgtaaatacaccaatcagcaccctgtgtctagctcagggtttgtgaatgcaccaatggacactctgtatctagctactctggtggggccttggagaacctttgtgtcaacactctgtatctaactaacctggtggggatgtggagaacctttgtgtctagctcagggatgtaaacgcaccaatcagtgccctgtcaaaccactcggctctaccaatcagcaggatgtgggtggggccagataagagaataaaagcaggctgcccgagccagcagtggc

SEQ ID NO: 61801 - DNA, 2468 bp, Homo sapiens
  misc_feature (1111)..(1111): n is a, c, g, or t
  misc_feature (2457)..(2458): n is a, c, g, or t
  misc_feature (2460)..(2462): n is a, c, g, or t
  misc_feature (2464)..(2465): n is a, c, g, or t
  misc_feature (2467)..(2467): n is a, c, g, or t
tggctaggtcgaggccgcgtggtaatcggccgagaaattatagtccagacttatgccgcccgagatgatctcttagaagtccccttaactaatcctgaccttaacctatatactgatggaagttcatttgtggagaatgggatacgaaggttagtgatgtaaccatacttgaaagcaagcctcttcccccagggaccagtgcccagttagcggaactagtggcacttacctgggccttagaactgggaaagggaaaaagaataaatgtgtatacagatagcaagtatgcttatctaatcctacatgcccatgctgcaatatggaaagagagggagttcctaacctctgtaggaacccccattaaataccacaaggaaattatagagttattgcacgcaatgcaaaaacacaaagaggtgggaatcttacactgacaaagccatcagaataggaaggagaggggagaacagcagcataagcagctggcagaggcagcagaaaggaaagaaagagacaggaagtcaaagaaagagacagagaggaagagacaagaagttagagagaaagagggacagacacagaaagtcaaagagagggtaaaaaagagaggaagagacaaagaagaagtcaaagagagagatggaagtagtaaagaaaaaacagtgtacctattcctttaaaagccagggtaaatttctctctacccacgcaaggcatattctcttatgtggatcttcaacccatatctgcctctcaaacagttggaagaaataatgaaatctatccttactttacaatcccaaatagactctttggcagcagtgactctccaaaaccgctgaggcctagatctcctcactgctgaaaaaggaggactctgcaccttcttaggggaagagtgttgtttttacactaaccagtcagggatagcatgagatgccacccagcgtttacaggaaaaggcttctgaaatcagacgcctttcaaattcttataccaacctctggagttgggcaacatggcttctcccctttctaggtcccgtggcagccatcttgctgttactcgcctttgggccccgtatttttaaccttcttgtcaaatttgtttngtctagaatcgaggccatcaagctacagatggtcttacaaatggaaccccaaatgagttcaactaacaacttctaccgaggacccctggactgaccagctggcacttcccctggcctagagagttcccctctgaaggacactacaactgcaaagccccttcttcgcccctatccagcaggaagtagctagagcagtcatcggccaaattcccaacagcagttggggtgtcctgttgattgaggggtgacagcatgctggcagtcctcacagccctcactcgctcgctcactctcggcacctcctctgcctgggctcccactttggcagcacttgaggagcccttcagctctgtatctagctactctgatgggtccttggagaacctttatgtctagctcagggattgtaaatacaccaatcagcaccctgtgtctagctcagggtttgtgaatgcaccaatggacactctgtatctagctactctggtggggccttggagaacctttgtgtcaacactctgtatctaactaacctggtggggatgtggagaacctttgtgtctagctcagggatgtaaacgcaccaatcagtgccctgtcaaaccactcggctctaccaatcagcaggatgtgggtggggccagataagagaataaaagcaggctgcccgagccagcagtggcaacccgctcaggtccccttccacactgtggaagctttgttctttcgctctttgcaatacatcttgctactgctcactctttgggtccacactgcttttatgagctgtaacactcaccacaaaggtctgtagcttcactcctgagccagcgagaccacgaactcaccagaaggaagaaactccaaacacatccgaacatcagaagaaacaaactccagacgcaccaccttaagagctgtaacactcactgtgagggtccatggcttcattcttgaagtcagtgagaccaagaacccaccaattccggacacacaaccggccatgtgacaggctcagggaaggacatgtgactcaaggcaggccagtgaagtgcaattctaggttagactggccgggaaggagcggccgtgttttctgttgatggatgctgctgccctctcctcaacctctcacactctgcactacagacaacctccttggggctgaggccagcacagcgcaaagcacagcaagaggggagcccgagcccctggatccagccatcctccacggcaagctcagaccacccgctccctcagctctttcacagaaccctggtctacctagttgatgtcttatataattccactattatctgtgattaattaatgtggaaccacatgannannngnntnc

SEQ ID NO: 61802 - DNA, 3910 bp, Homo sapiens
  misc_feature (3227)..(3227): n is a, c, g, or t
cggagaaagctccaaaagcaagccctgggccctgaacaaaatctagagacattattaaacctggcaacctcggtgttctataatagggaccaagaggaacaggtccaaaaggaaaagcgagatcagagaaaggccgcagccttagtcatggccctcagacaaacaaaccttggtggttcagagaggacagaacatgaagcaggccaatcacctggtaaggcttgttatcagtgtggtttactgggacactttaaaaaagattgtccaatgagaaacaagctgccccctcgtccgtgtccactatgctgaggcaatcactggaaggtgcactgccccagaggatgaaggttccctgggtcagaagcccccagccagacgatccaacaacaggactgagggtgcctggggcaagcgccagctcatgtcatcaccctcactgagccccgggtatgtttaactattgagggccaggaaattgacttcctcctggacactggcgcggccttctcagtgttaatctcctgtcctggacgactctcctcaaggtccgttaccatccaaggaatcctgggacagcctgtaaccaggtatttctcccacctcctcagttgtaattgggagactttgctcttttcacatgcctttcttgttatgcctgaaagtcccacagggttattagggagggatatattagccaaggctggagctattatctacatgaatatggggaacaagttacccatttgttgtcccctacttgaggagggaatcaaccctgaagtctgggcattggaaggacaatttggaagggcaaaaaatgcccacccagtccaaatcaggttaaaagatcccaccacttttccttatcaaaggcaatatccctaaggcctgaagctcataaaggattacagaatattgttaaacatttgaaagctcaaggcttagtaaggaaatgcagcagtccctgcaacaccccaattctggaagtacaaagaccgagactagtgcaagatcttagactcattaatgaggcagtaatttcactatatccagttgtacccaacccctataccctgctctctcaaataccagaggaagcagaatggttcacagttctggacctcaaggatgccttcttctgtgttcccctgcactctgattcacagttcctctttgcttttgaggatcccacaaaccacacatcccaacttacatggatggtcttgccccaagggtttagggatagccctcatctgtttggtcaggccctagccaaagatctaggccacttctcaagtccaggcactctggtccttcaatatgtggatgatttacttttggctaccagttaggaagccttgtgccagcaggctactctagatctcttgaactttctagctaatcaagggtacaaggtgtctatgtcgaaggcccagctttgcctacagcaggttaaatatctaggcctaatcttagccaaagggaccagggccctcagcaaggaatgaatacagcctatactggcttatcctcgccctaagacattaaaacagttgagggagttccttggaattaccagcttttgccgactatggatccctggatacagcgagacagccaggcccctctaatcaaggaaacccagagggcaaatactcatctagttgagtgggaaccagaggcagaaacaaccttcaaaaccttaaagcaggctctagtacaagctccagctttaagccttcccacaggacagaatttctctttatatgtcagagagagagccaggatagctcttggagtcctcactcaaactcatgggacaaccccacaaccagtggcatacctaagtaaggaaattgatgtagtagcaaaaggctggcctcactgtttaagggtagttgcagcagtggccgtcttagcatcagaggctatcaaaataatacaaggaaaggatctcactgtctagactacttatgatgtaaatggcatactaggtgccaaaggaagtttatggctatcagacaactgcctacttagataccaggcactactccttgagggaccagtgcttcaaatatgcacatgcatggccctcaaccctgccacttttctcccagaggatggggaaccaatcaagcatgactgccaacaaattatagtccagacttatgccgcccgagatgatctcttagaagtccccttaactaatcctgaccttaacctatatactgatggaagttcatttgtggagaatgggatacgaaggttagtgatgtaaccatacttgaaagcaagcctcttcccccagggaccagtgcccagttagcggaactagtggcacttacctgggccttagaactgggaaagggaaaaagaataaatgtgtatacagatagcaagtatgcttatctaatcctacatgcccatgctgcaatatggaaagagagggagttcctaacctctgtaggaacccccattaaataccacaaggaaattatagagttattgcacgcaatgcaaaaacacaaagaggtgggaatcttacactgacaaagccatcagaataggaaggagaggggagaacagcagcataagcagctggcagaggcagcagaaaggaaagaaagagacaggaagtcaaagaaagagacagagaggaagagacaagaagttagagagaaagagggacagacacagaaagtcaaagagagggtaaaaaagagaggaagagacaaagaagaagtcaaagagagagatggaagtagtaaagaaaaaacagtgtacctattcctttaaaagccagggtaaatttctctctacccacgcaaggcatattctcttatgtggatcttcaacccatatctgcctctcaaacagttggaagaaataatgaaatctatccttactttacaatcccaaatagactctttggcagcagtgactctccaaaaccgctgaggcctagatctcctcactgctgaaaaaggaggactctgcaccttcttaggggaagagtgttgtttttacactaaccagtcagggatagcatgagatgccacccagcgtttacaggaaaaggcttctgaaatcagacgcctttcaaattcttataccaacctctggagttgggcaacatggcttctcccctttctaggtcccgtggcagccatcttgctgttactcgcctttgggccccgtatttttaaccttcttgtcaaatttgtttngtctagaatcgaggccatcaagctacagatggtcttacaaatggaaccccaaatgagttcaactaacaacttctaccgaggacccctggactgaccagctggcacttcccctggcctagagagttcccctctgaaggacactacaactgcaaagccccttcttcgcccctatccagcaggaagtagctagagcagtcatcggccaaattcccaacagcagttggggtgtcctgttgattgaggggtgacagcatgctggcagtcctcacagccctcactcgctcgctcactctcggcacctcctctgcctgggctcccactttggcagcacttgaggagcccttcagctctgtatctagctactctgatgggtccttggagaacctttatgtctagctcagggattgtaaatacaccaatcagcaccctgtgtctagctcagggtttgtgaatgcaccaatggacactctgtatctagctactctggtggggccttggagaacctttgtgtcaacactctgtatctaactaacctggtggggatgtggagaacctttgtgtctagctcagggatgtaaacgcaccaatcagtgccctgtcaaaccactcggctctaccaatcagcaggatgtgggtggggccagataagagaataaaagcaggctgcccgagccagcagtggc

SEQ ID NO: 61803 - DNA, 583 bp, Homo sapiens
tctagttagctcacccacagcctccagatgccaacagcctttgatcaaggctcacctgaagcctccccttttcccagcataaagctttctcactccgctgactgcctttgagtgtctgcaatggcaagtgactgtggctgactctctgtgtatataccacactgagaataagtagctgctgctcattttcatttgggtggtctataattattactgaagtgaagtgtgatcacagttaaggtggtaatagtcagaccctttacactgttgatggactcagactttttacttcatgccttgcttatactgcttggatgttttccatgtgcctatattaatatttacaataaaagcatgatttagattttcatttagaatttatcttaaatgcatcaaatatgcaattttaagtcaagttttgcatgtttggctcaaaatatcaaaataatgttgtgtggttttaaaataacaaggtttattgctctttatattagacatgtagttaattacgttgatctccataaaaataagtttaattttaatttgaataaaagaatgccacaatgaaatactgaccattaaa

SEQ ID NO: 61804 - DNA, 584 bp, Homo sapiens
caggtcatattcataattgcatgaaccttttctctctgtttgtccctgtctcttggcttgccctgatgtatactcagactcctgtacaatcttactcctgctggcaagagatttgtcttcttttcttgtcttcaattggctttcgggccttgtatgtggtaaaatcaccaaatcacagtcaagactgtgtttttgttcctagtttgatgcccttatgtcccggaggggttcacaaagtgctttgtcaggactgctgcagttagaaggctcactgcttctcctaagccttctgcacagatgtggcacctgcaacccaggagcaggagccggaggagctgccctctgacagcaggtgcagcagagatggctacagctcaggagctgggaaggtgatggggcacagggaaagcacagatgttctgcagcgccccaaagtgacccattgcctggagaaagagaagaaaatattttttaaaaagctagtttatttagcttctcattaattcattcaaataaagtcgtgaggtgactaattagagaataaaaattactttggactactcaaaaatacaccaaaaaaaaaa

SEQ ID NO: 61805 - DNA, 2023 bp, Homo sapiens
  misc_feature (1220)..(1220): n is a, c, g, or t
  misc_feature (1336)..(1336): n is a, c, g, or t
tagatgaaatcctttttcgggccaaactcaattgttttaacttaaaaaaaaattcattcagtttaagataaaataatgcttccttaataaaactaaaaacaaaaagcatctttagaagctgtgtagcgtactttatttatttatttatttggagacagggtctcactctgttgcccaggctggagtacagtggcacagtctcagttcattgcaacctccgcctcccgggttaaagcgattctcctgccttagcctcatgagtgactgagactacaagtgtggaccaccacgcctggctaattttggtatttttttggtagagacagagtttcaccatattggctaggctgttctgttgaccatgaggcaccatacctgggctgtgtagcagacttaaaaaaataagatttgaagttagaacttaaggctttgggccaattaatagttttgtttgtttgtttgcggcggaatctcgctctttcacccaggctggagtgcagtggcgcgatcttggctcactgcagcctctgcctcttgggtttaaggagtcctcctgcctcagcctcctaagtagctgggactacaggcgcatgccaccacacctggctaatttttgtatttttagtagagatggggtttccccatgttggccaggctgttctcaaactcttgacttcaggtaatcctcctgactcagcctcccaaagtgctgggattacaggcgtgagccatcacgcccagccccagttaatggttgtgttaccttgagcaattcacttaatctctgagactcagtttgctcatttgtaaaatggtgatcatcataatatatacctcttatagttattaggaaattaaatggtaatgtatatataaagcataagcataatgtttgatgtgtattaaatactcaaatgtagctcctgttattatcagaggactccttacactgtaaatacatgctacaaaaattttagaatgcactttatcaggcattttagtacaaataagcaaaacagttgatcttgtagactaattttgaagtttcatattggttccagttcaagcactgtatataaaatatccagaataattcactatattaattagtttaatactgtcttagtctattcaggctgctctaataaaatatcataaactggatggcttataaacaatagaaatttatttctcacagttcacatttaggaagtcccatntcaagaggctaacagatttggtgtctagtttggtgccctagtgagggtttgctcttctggttcatagatggtgctttcttgttgtgtcctcacatgatggatagcacaaacaagcncccttaggccccttttataagggcactaaccccgttcacaggggctctgccctcatatccaatcacctcctaaaggccccatctcttaatactgttgcattggggattaggtttcaatatatgacttttgagggaacacaaacattcagatcataacaaatgtgaaaatgaattaatctttaggaaaattggtggcactttttgtgtatcctagtaagaagtttggttactgggtaataagtctgttgaaaagattataatttaacaaaatgtgaaaattatggtaatatttatgaagatttttttaaagcagcatatcagattctttctcacattttatattggtgtggttggtgtttttcttatggggagaaatactagtaagtgaactatatagacatttaaaattaacatgagttaaatccattataaattttagaaaaccatttattctacagtagtttccaaaactggggtatacctatcccaagctatacactaagatttttcaggatatataaaggcacagagagctttaagggaatctgtttctagtcttcggagatcttgtttatgttttttgcattgtcttttccaaagtctcttacttgttaccttttgctgttatgtatttcccattatgcattgatccaagatgtaaaaacctctagggcaccaaacaggaaa

SEQ ID NO: 61806 - DNA, 503 bp, Homo sapiens
gataaccaagtttatacaaccctgcaatacttaagagactccactaaaaagtgtcacggaatgaccatggtcgtccatttatttattacatcatcatacatcttttggaagccaggtcctgatatcacttctctagtgataacaagcaaaaaagcaatttaaaagacatagcatgttttttttttttctacagaagaccatgtaaaatttatctgcttattggaattctgagtaaacttttctatttctaacatattccaggaaatcacacaagaatgtttgcttgtggaatttctgactcttgttcttggatgatatactgtgatgtcaataatatttgcagctaccgcatgagcatcttttcctccagattcttaagtaagaatctaaggataaggaaaaggtgtcttttctctgaccatataagcacatcaaaatgaagttgccacaatgagtttttcatccttaaaataaatgagtttttcaaacaaatcagcaagaaa

SEQ ID NO: 61807 - DNA, 1028 bp, Homo sapiens
tagtctccatcggccattttgtgcgagaagccgcagcgccgcctcttctctcgcgccctcgcctcttcctccgcctcctccttcgcctcttcctgcctcctcccggcttccgccgccgccactccagcctaatcccaaccccagggcgaagcgttttcttatttatttccgttttctcgccactacagcctcctgacaaggtgatccgggcgggccccgcaggaattttatcccctcaccggcctcacactagtatcgcatgtccactatccagaacctccaatctttcgacccctttgctgatgcaactaagggtgacgacttactcccggcagggactgaggattacattcatataagaatccagcaacggaacggcagaaagacactgactactgttcagggcattgcagatgattatgacaaaaagaaacttgtgaaagctttcaaaaagaaatttgcctgtaatggtactgtgattgaacatcctgaatacggagaggttattcagcttcaaggtgaccaaagaaaaaacatctgccagtttctcttggaggttggcattgtaaaggaggaacagcttaaggttcatggattctaaaatgaacctaaatacgtggagaatttcttgaatagttttgttctctaaacccggtttggctgccttgtgaaatgattccctgcagtaaacggacttttcatttatttaatcattcaaacttccattcacatctgcatgattacagaaaacatggggtatgtagactagtaacacataagaaaattgcagtaagatggtaacaaaacctcatattgtctttacatgtttccaatggaaaatgttttgagtgtttattgttcagtttattacgtttcacttgattaaattttttttgttgttgtattaaaccatgtacgttgcagcttaacaataaaaaaaaatctatgaatctttgtgagcaattatgctcccaaatctaagcaagtaaaatacacattttgtctttttgtctttcttaattggagtt

SEQ ID NO: 61808 - DNA, 615 bp, Homo sapiens
ggttttctaaatctttttctcattagaggaccatattgaacgataacattatttatctataacagcgtttttctacaatggacatagctgttcaaatgtttctctttttgtgagagtatcttgggggttttattaatactccacccccatctccattcctaccggcaaaaacagcaaaggcactagaaccttcattgatgactgtctggattggtagtataatgtatttctggaaagtacttcttaaaaaatatttttctactttggattttttttttttttttatccattcgcagacccctttgctgatgcaactaagggtgacgacttactcccggcagggactgaggattacattcatataagaatccagcaacggaacggcagaaagacactgactactgttcagggcattgcagatgattatgacaaaaagaaacttgtgaaagctttcaaaaaggtaaagggattaggaagaaaggattagagttactgatgcacacctctgaactggattatgattcacacctttatatcggcgtggatgaaaataactagaccaagaaagttgttctcatttttgtaattaacatgtaaatatttagttattctccc

SEQ ID NO: 61809 - DNA, 1076 bp, Homo sapiens
tacccgacgctctctctgacgctctctctgtgggggacgctctctctgtgggtgacgctctctctgtggggggagaagccgcagcgccgcctcttctctcgcgccctcgcctcttcctccgcctcctccttcgcctcttcctgcctcctcccggcttccgccgccgccactccagcctaatcccaaccccagggcgaagcgttttcttatttatttccgttttctcgccactacagcctcctgacaaggtgatccgggcgggccccgcaggaattttatcccctcaccggcctcacactagtatcgcatgtccactatccagaacctccaatctttcgacccctttgctgatgcaactaagggtgacgacttactcccggcagggactgaggattacattcatataagaatccagcaacggaacggcagaaagacactgactactgttcagggcattgcagatgattatgacaaaaagaaacttgtgaaagctttcaaaaagaaatttgcctgtaatggtactgtgattgaacatcctgaatacggagaggttattcagcttcaaggtgaccaaagaaaaaacatctgccagtttctcttggaggttggcattgtaaaggaggaacagcttaaggttcatggattctaaaatgaacctaaatacgtggagaatttcttgaatagttttgttctctaaacccggtttggctgccttgtgaaatgattccctgcagtaaacggacttttcatttatttaatcattcaaacttccattcacatctgcatgattacagaaaacatggggtatgtagactagtaacacataagaaaattgcagtaagatggtaacaaaacctcatattgtctttacatgtttccaatggaaaatgttttgagtgtttattgttcagtttattacgtttcacttgattaaattttttttgttgttgtattaaaccatgtacgttgcagcttaacaataaaaaaaaatctatgaatctttgtgagcaattatgctcccaaatctaagcaagtaaaatacacattttgtctttttgtctttcttaattggagtt

SEQ ID NO: 61810 - DNA, 1052 bp, Homo sapiens
tacccgacgctctctctgacgctctctctgtgggggacgctctctctgtgggtgacgctctctctgtggggggagaagccgcagcgccgcctcttctctcgcgccctcgcctcttcctgcctcctcccggcttccgccgccgccactccagcctaatcccaaccccagggcgaagcgttttcttatttatttccgttttctcgccactacagcctcctgacaaggtgatccgggcgggccccgcaggaattttatcccctcaccggcctcacactagtatcgcatgtccactatccagaacctccaatctttcgacccctttgctgatgcaactaagggtgacgacttactcccggcagggactgaggattacattcatataagaatccagcaacggaacggcagaaagacactgactactgttcagggcattgcagatgattatgacaaaaagaaacttgtgaaagctttcaaaaagaaatttgcctgtaatggtactgtgattgaacatcctgaatacggagaggttattcagcttcaaggtgaccaaagaaaaaacatctgccagtttctcttggaggttggcattgtaaaggaggaacagcttaaggttcatggattctaaaatgaacctaaatacgtggagaatttcttgaatagttttgttctctaaacccggtttggctgccttgtgaaatgattccctgcagtaaacggacttttcatttatttaatcattcaaacttccattcacatctgcatgattacagaaaacatggggtatgtagactagtaacacataagaaaattgcagtaagatggtaacaaaacctcatattgtctttacatgtttccaatggaaaatgttttgagtgtttattgttcagtttattacgtttcacttgattaaattttttttgttgttgtattaaaccatgtacgttgcagcttaacaataaaaaaaaatctatgaatctttgtgagcaattatgctcccaaatctaagcaagtaaaatacacattttgtctttttgtctttcttaattggagtt

SEQ ID NO: 61811 - DNA, 866 bp, Homo sapiens
  misc_feature (833)..(833): n is a, c, g, or t
tagtctccatcggccattttgtgcgagaagccgcagcgccgcctcttctctcgcgccctcgcctcttcctccgcctcctccttcgcctcttcctgcctcctcccggcttccgccgccgccactccagcctaatcccaaccccagggcgaagcgttttcttatttatttccgttttctcgccactacagcctcctgacaaggtgatccgggcgggccccgcaggaattttatcccctcaccggcctcacactagtatcgcatgtccactatccagaacctccaatctttcgacccctttgctgatgcaactaagggtgacgacttactcccggcagggactgaggattacattcatataagaatccagcaacggaacggcagaaagacactgactactgttcagggcattgcagatgattatgacaaaaagaaacttgtgaaagctttcaaaaagaaatttgcctgtaatggtactgtgattgaacatcctgaatacggagaggttattcagcttcaaggtgaccaaagaaaaaacatctgccagtttctcttggaggttggcattgtaaaggaggaacagcttaaggttcatggattctaaaatgaacctaaatacgtggagaatttcttgaatagttttgttctctaaacccggtttggctgccttgtgaaatgattccctgcagtaaacggacttttcatttatttaatcattcaaacttccattcacatctgcatgattacagaaaacatggggtatgtagactagtaacacataagaaaattgcagtaagatggtaacaaaacctcatattgtctttacatgtttccanggttttggtggtggatccatggacgttgcgctt

SEQ ID NO: 61812 - DNA, 974 bp, Homo sapiens
tagtctccatcggccattttgtgcgagaagccgcagcgccgcctcttctctcgcgccctcgcctcttcctccgcctcctccttcgcctcttcctgcctcctcccggcttccgccgccgccactccagcctaatcccaaccccagggcgaagcgttttcttatttatttccgttttctcgccactacagcctcctgacaaggtgatccgggcgggccccgcaggaattttatcccctcaccggcctcacactagtatcgcatgtccactatccagaacctccaatctttcgacccctttgctgatgcaactaagggtgacgacttactcccggcagggactgaggattacattcatataagaatccagcaacggaacggcagaaagacactgactactgttcagggcattgcagatgattatgacaaaaagaaacttgtgaaagctttcaaaaagaaatttgcctgtaatggtactgtgattgaacatcctgaatacggagaggttattcagcttcaaggtgaccaaagaaaaaacatctgccagtttctcttggaggttggcattgtaaaggaggaacagcttaaggttcatggattctaaaatgaacctaaatacgtggagaatttcttgaatagttttgttctctaaacccggtttggctgccttgtgaaatgattccctgcagtaaacggacttttcatttatttaatcattcaaacttccattcacatctgcatgattacagaaaacatggggtatgtagactagtaacacataatggaaaatgttttgagtgtttattgttcagtttattacgtttcacttgattaaattttttttgttgttgtattaaaccatgtacgttgcagcttaacaataaaaaaaaatctatgaatctttgtgagcaattatgctcccaaatctaagcaagtaaaatacacattttgtctttttgtctttcttaattggagtt

SEQ ID NO: 61813 - DNA, 1050 bp, Homo sapiens
ggattataggagacaaaatctgtttctctaaatatgatctagcttactgaaatggttaattctgttcatacggtgaaataaaacctcatagtagttgactaaattttgttgtatatttatgcacttttccagaaatttgcctgtaatggtactgtgattgaacatcctgaatacggagaggttattcagcttcaaggtgaccaaagaaaaaacatctgccagtttctcttggaggtgagtgattgggtgctttatgtgtaaccttgagattgcttttaaaattgtatttaaaggcaacatgatttgttttctactaagtaaaaagcaaagacctttatctggtttattttgtcattagagtattctgatcatttctgtatatacacacacaggctatttcttggcatgtaaagtattcaaatacgtgttgaattgttggctatcagcagtgcatgccacagacaacagtgttgcagtaagctgttgatagtgattctttttaattactcttccatgttttcttaatgaatttttatatttctcagagttattttgctaaattagattttattttacaggttggcattgtaaaggaggaacagcttaaggttcatggattctaaaatgaacctaaatacgtggagaatttcttgaatagttttgttctctaaacccggtttggctgccttgtgaaatgattccctgcagtaaacggacttttcatttatttaatcattcaaacttccattcacatctgcatgattacagaaaacatggggtatgtagactagtaacacataagaaaattgcagtaagatggtaacaaaacctcatattgtctttacatgtttccaatggaaaatgttttgagtgtttattgttcagtttattacgtttcacttgattaaattttttttgttgttgtattaaaccatgtacgttgcagcttaacaataaaaaaaaatctatgaatctttgtgagcaattatgctcccaaatctaagcaagtaaaatacacattttgtctttttgtctttcttaattggagtt

SEQ ID NO: 61814 - DNA, 519 bp, Homo sapiens
  misc_feature (169)..(169): n is a, c, g, or t
  misc_feature (171)..(171): n is a, c, g, or t
cgagggtgtctttctgccgttccgttgctggattcttatatgaatgtaatcctcagtcctgccgggagtaagtcgtcacccttagttgcatcagcaaaggggtcgaaagattggaggttctggatagtggacatgcgatactagtgtgaggccggtgaggggataaaantnctgcggtaaacggacttttcatttatttaatcattcaaacttccattcacatctgcatgattacagaaaacatggggtatgtagactagtaacacataagaaaattgcagtaagatggtaacaaaacctcatattgtctttacatgtttccaatggaaaatgttttgagtgtttattgttcagtttattacgtttcacttgattaaattttttttgttgttgtattaaaccatgtacgttgcagcttaacaataaaaaaaaatctatgaatctttgtgagcaattatgctcccaaatctaagcaagtaaaatacacattttgtctttttgtctttcttaattggagtt

SEQ ID NO: 61815 - DNA, 835 bp, Homo sapiens
tacccgacgctctctctgacgctctctctgtgggggacgctctctctgtgggtgacgctctctctgtggggggagaagccgcagcgccgcctcttctctcgcgccctcgcctcttcctccgcctcctccttcgcctcttcctgcctcctcccggcttccgccgccgccactccagcctaatcccaaccccagggcgaagcgttttcttatttatttccgttttctcgccactacagcctcctgacaaggtgatccgggcgggccccgcaggaattttatcccctcaccggcctcacactagtatcgcatgtccactatccagaacctccaatctttcggtaagatcccgtcgccgccgcctccctcccttgcccggcgcgcatctcggccttttgcccgcctggccaccgcccctaggggccccctttctgcccttcccgcacccctagtggggctttgtctcggcgcccagaaaatggcgacggggcccctggcgaccccttccccgaggacagcgccggactccgagccctcctctcggagccccggccgcgggccctgcgccaccccctgccccgtccttgacccggctctcgcctccgcttctgccccttgaaaccttggcgatcctatttcgtggactcctagatcggccctgctacttgcaaagggtatgccgggccagggaaaccagggatcggcgcccgttctctggcagctcctgggggcacttagggaaagatgcggatgcaagcctctgatctgtcactggccagtggttcagtcttctctgcttgcgtagcaatttgttaaattacgcctcttgatatatatg

SEQ ID NO: 61816 - DNA, 949 bp, Homo sapiens
tagtctccatcggccattttgtgcgagaagccgcagcgccgcctcttctctcgcgccctcgcctcttcctccgcctcctccttcgcctcttcctgcctcctcccggcttccgccgccgccactccagcctaatcccaaccccagggcgaagcgttttcttatttatttccgttttctcgccactacagcctcctgacaaggtgatccgggcgggccccgcaggaattttatcccctcaccggcctcacactagtatcgcatgtccactatccagaacctccaatctttcgacccctttgctgatgcaactaagggtgacgacttactcccggcagggactgaggattacattcatataagaatccagcaacggaacggcagaaagacactgactactgttcagggcattgcagatgattatgacaaaaagaaacttgtgaaagctttcaaaaagaaatttgcctgtaatggtactgtgattgaacatcctgaatacggagaggttattcagcttcaaggtgaccaaagaaaaaacatctgccagtttctcttggaggttggcattgtaaaggaggaacagcttaaggttcatggattctaaaatgaacctaaatacgtggagaatttcttgaatagttttgttctctaaacccggtttggctgccttgtgaaatgattccctgcagtaaacggacttttcatttatttaatcattcaaacttccattcacatctgcatgattacagaaaacatggggtatgtagactagtaacacataagaaaattgcagtaagatggtaacaaaacctcatattgtctttacatgtttccaatggaaaatgttttgagtgtttattgttcagtttattacgtttcacttgattaaattttttttgttgttgtattaaaccatgtacgttgcagcttaacaataaaaaaaaatctatga

SEQ ID NO: 61817 - DNA, 875 bp, Homo sapiens
tagtctccatcggccattttgtgcgagaagccgcagcgccgcctcttctctcgcgccctcgcctcttcctccgcctcctccttcgcctcttcctgcctcctcccggcttccgccgccgccactccagcctaatcccaaccccagggcgaagcgttttcttatttatttccgttttctcgccactacagcctcctgacaaggtgatccgggcgggccccgcaggaattttatcccctcaccggcctcacactagtatcgcatgtccactatccagaacctccaatctttcgacccctttgctgatgcaactaagggtgacgacttactcccggcagggactgaggattacattcatataagaatccagcaacggaacggcagaaagacactgactactgttcagggcattgcagatgattatgacaaaaagaaacttgtgaaagctttcaaaaagaaatttgcctgtaatggtactgtgattgaacatcctgaatacggagaggttattcagcttcaaggtgaccaaagaaaaaacatctgccagtttctcttggaggttggcattgtaaaggaggaacagcttaaggttcatggattctaaaatgaacctaaatacgtggagaatttcttgaatagttttgttctctaaacccggtttggctgccttgtgaaatgattccctgcagtaaacggacttttcatttatttaatcattcaaacttccattcacatctgcatgattacagaaaacatggggtatgtagactagtaacacataagaaaattgcagtaagatggtaacaaaacctcatattgtctttacatgtttccactggcttgtcgtgcataaaccatgtacgtggagcttaacataa

SEQ ID NO: 61818 - DNA, 1372 bp, Homo sapiens
tagtctccatcggccattttgtgcgagaagccgcagcgccgcctcttctctcgcgccctcgcctcttcctccgcctcctccttcgcctcttcctgcctcctcccggcttccgccgccgccactccagcctaatcccaaccccagggcgaagcgttttcttatttatttccgttttctcgccactacagcctcctgacaaggtgatccgggcgggccccgcaggaattttatcccctcaccggcctcacactagtatcgcatgtccactatccagaacctccaatctttcgacccctttgctgatgcaactaagggtgacgacttactcccggcagggactgaggattacattcatataagaatccagcaacggaacggcagaaagacactgactactgttcagggcattgcagatgattatgacaaaaagaaacttgtgaaagctttcaaaaagaaatttgcctgtaatggtactgtgattgaacatcctgaatacggagaggttattcagcttcaaggtgaccaaagaaaaaacatctgccagtttctcttggaggtgagtgattgggtgctttatgtgtaaccttgagattgcttttaaaattgtatttaaaggcaacatgatttgttttctactaagtaaaaagcaaagacctttatctggtttattttgtcattagagtattctgatcatttctgtatatacacacacaggctatttcttggcatgtaaagtattcaaatacgtgttgaattgttggctatcagcagtgcatgccacagacaacagtgttgcagtaagctgttgatagtgattctttttaattactcttccatgttttcttaatgaatttttatatttctcagagttattttgctaaattagattttattttacaggttggcattgtaaaggaggaacagcttaaggttcatggattctaaaatgaacctaaatacgtggagaatttcttgaatagttttgttctctaaacccggtttggctgccttgtgaaatgattccctgcagtaaacggacttttcatttatttaatcattcaaacttccattcacatctgcatgattacagaaaacatggggtatgtagactagtaacacataagaaaattgcagtaagatggtaacaaaacctcatattgtctttacatgtttccaatggaaaatgttttgagtgtttattgttcagtttattacgtttcacttgattaaattttttttgttgttgtattaaaccatgtacgttgcagcttaacaataaaaaaaaatctatgaatctttgtgagcaattatgctcccaaatctaagcaagtaaaatacacattttgtctttttgtctttcttaattggagtt

SEQ ID NO: 61819 - DNA, 417 bp, Homo sapiens
gtctactcccactgctttttccaggcacatacatcacaatcatggctgactcttaaagtcaagaaggaattcaataaagttacaggatataaaaatcagttgtgtttctatacgacaacaaaatagacaaaaagaaaattaatttcatttataatggcatcaaaaaatacttaggcataaacttaaacaagcaggtgaaagatttatacattgaaaactataaaacgttgatgaaagaaattaaaagacacaaatggaaacacatgctgtgttcatgaattagaagacttaatattgctaatatgtccatactagcaaagtaaaattccaacggcattttttacaaaaatagaaaaggcaatcccaaaattcatatggaaccacaaaagaccaagaatagccaaagctatctggagg

SEQ ID NO: 61820 - DNA, 9090 bp, Homo sapiens
cgagcccagtcgagccgcgctcacctcgggctcccgctccgtctccacctccgcctttgccctggcggcgcgaccccgtcccggcgcggcccccagcagtcgcgcgccgttagcctcgcgcccgccgcgcagtccgggcccggcgcgatgggggccgccgccggccggagcccccacctggggcccgcgcccgcccgccgcccgcagcgctctctgctcctgctgcagctgctgctgctcgtcgctgccccggggtccacgcaggcccaggccgccccgttccccgagctgtgcagttatacatgggaagctgttgataccaaaaataatgtactttataaaatcaacatctgtggaagtgtggatattgtccagtgcgggccatcaagtgctgtttgtatgcacgacttgaagacacgcacttatcattcagtgggtgactctgttttgagaagtgcaaccagatctctcctggaattcaacacaacagtgagctgtgaccagcaaggcacaaatcacagagtccagagcagcattgccttcctgtgtgggaaaaccctgggaactcctgaatttgtaactgcaacagaatgtgtgcactactttgagtggaggaccactgcagcctgcaagaaagacatatttaaagcaaataaggaggtgccatgctatgtgtttgatgaagagttgaggaagcatgatctcaatcctctgatcaagcttagtggtgcctacttggtggatgactccgatccggacacttctctattcatcaatgtttgtagagacatagacacactacgagacccaggttcacagctgcgggcctgtccccccggcactgccgcctgcctggtaagaggacaccaggcgtttgatgttggccagccccgggacggactgaagctggtgcgcaaggacaggcttgtcctgagttacgtgagggaagaggcaggaaagctagacttttgtgatggtcacagccctgcggtgactattacatttgtttgcccgtcggagcggagagagggcaccattcccaaactcacagctaaatccaactgccgctatgaaattgagtggattactgagtatgcctgccacagagattacctggaaagtaaaacttgttctctgagcggcgagcagcaggatgtctccatagacctcacaccacttgcccagagcggaggttcatcctatatttcagatggaaaagaatatttgttttatttgaatgtctgtggagaaactgaaatacagttctgtaataaaaaacaagctgcagtttgccaagtgaaaaagagcgatacctctcaagtcaaagcagcaggaagataccacaatcagaccctccgatattcggatggagacctcaccttgatatattttggaggtgatgaatgcagctcagggtttcagcggatgagcgtcataaactttgagtgcaataaaaccgcaggtaacgatgggaaaggaactcctgtattcacaggggaggttgactgcacctacttcttcacatgggacacggaatacgcctgtgttaaggagaaggaagacctcctctgcggtgccaccgacgggaagaagcgctatgacctgtccgcgctggtccgccatgcagaaccagagcagaattgggaagctgtggatggcagtcagacggaaacagagaagaagcattttttcattaatatttgtcacagagtgctgcaggaaggcaaggcacgagggtgtcccgaggacgcggcagtgtgtgcagtggataaaaatggaagtaaaaatctgggaaaatttatttcctctcccatgaaagagaaaggaaacattcaactctcttattcagatggtgatgattgtggtcatggcaagaaaattaaaactaatatcacacttgtatgcaagccaggtgatctggaaagtgcaccagtgttgagaacttctggggaaggcggttgcttttatgagtttgagtggcgcacagctgcggcctgtgtgctgtctaagacagaaggggagaactgcacggtctttgactcccaggcagggttttcttttgacttatcacctctcacaaagaaaaatggtgcctataaagttgagacaaagaagtatgacttttatataaatgtgtgtggcccggtgtctgtgagcccctgtcagccagactcaggagcctgccaggtggcaaaaagtgatgagaagacttggaacttgggtctgagtaatgcgaagctttcatattatgatgggatgatccaactgaactacagaggcggcacaccctataacaatgaaagacacacaccgagagctacgctcatcacctttctctgtgatcgagacgcgggagtgggcttccctgaatatcaggaagaggataactccacctacaacttccggtggtacaccagctatgcctgcccggaggagcccctggaatgcgtagtgaccgacccctccacgctggagcagtacgacctctccagtctggcaaaatctgaaggtggccttggaggaaactggtatgccatggacaactcaggggaacatgtcacgtggaggaaatactacattaacgtgtgtcggcctctgaatccagtgccgggctgcaaccgatatgcatcggcttgccagatgaagtatgaaaaagatcagggctccttcactgaagtggtttccatcagtaacttgggaatggcaaagaccggcccggtggttgaggacagcggcagcctccttctggaatacgtgaatgggtcggcctgcaccaccagcgatggcagacagaccacatataccacgaggatccatctcgtctgctccaggggcaggctgaacagccaccccatcttttctctcaactgggagtgtgtggtcagtttcctgtggaacacagaggctgcctgtcccattcagacaacgacggatacagaccaggcttgctctataagggatcccaacagtggatttgtgtttaatcttaatccgctaaacagttcgcaaggatataacgtctctggcattgggaagatttttatgtttaatgtctgcggcacaatgcctgtctgtgggaccatcctgggaaaacctgcttctggctgtgaggcagaaacccaaactgaagagctcaagaattggaagccagcaaggccagtcggaattgagaaaagcctccagctgtccacagagggcttcatcactctgacctacaaagggcctctctctgccaaaggtaccgctgatgcttttatcgtccgctttgtttgcaatgatgatgtttactcagggcccctcaaattcctgcatcaagatatcgactctgggcaagggatccgaaacacttactttgagtttgaaaccgcgttggcctgtgttccttctccagtggactgccaagtcaccgacctggctggaaatgagtacgacctgactggcctaagcacagtcaggaaaccttggacggctgttgacacctctgtcgatgggagaaagaggactttctatttgagcgtttgcaatcctctcccttacattcctggatgccagggcagcgcagtggggtcttgcttagtgtcagaaggcaatagctggaatctgggtgtggtgcagatgagtccccaagccgcggcgaatggatctttgagcatcatgtatgtcaacggtgacaagtgtgggaaccagcgcttctccaccaggatcacgtttgagtgtgctcagatatcgggctcaccagcatttcagcttcaggatggttgtgagtacgtgtttatctggagaactgtggaagcctgtcccgttgtcagagtggaaggggacaactgtgaggtgaaagacccaaggcatggcaacttgtatgacctgaagcccctgggcctcaacgacaccatcgtgagcgctggcgaatacacttattacttccgggtctgtgggaagctttcctcagacgtctgccccacaagtgacaagtccaaggtggtctcctcatgtcaggaaaagcgggaaccgcagggatttcacaaagtggcaggtctcctgactcagaagctaacttatgaaaatggcttgttaaaaatgaacttcacggggggggacacttgccataaggtttatcagcgctccacagccatcttcttctactgtgaccgcggcacccagcggccagtatttctaaaggagacttcagattgttcctacttgtttgagtggcgaacgcagtatgcctgcccacctttcgatctgactgaatgttcattcaaagatggggctggcaactccttcgacctctcgtccctgtcaaggtacagtgacaactgggaagccatcactgggacgggggacccggagcactacctcatcaatgtctgcaagtctctggccccgcaggctggcactgagccgtgccctccagaagcagccgcgtgtctgctgggtggctccaagcccgtgaacctcggcagggtaagggacggacctcagtggagagatggcataattgtcctgaaatacgttgatggcgacttatgtccagatgggattcggaaaaagtcaaccaccatccgattcacctgcagcgagagccaagtgaactccaggcccatgttcatcagcgccgtggaggactgtgagtacacctttgcctggcccacagccacagcctgtcccatgaagagcaacgagcatgatgactgccaggtcaccaacccaagcacaggacacctgtttgatctgagctccttaagtggcagggcgggattcacagctgcttacagcgagaaggggttggtttacatgagcatctgtggggagaatgaaaactgccctcctggcgtgggggcctgctttggacagaccaggattagcgtgggcaaggccaacaagaggctgagatacgtggaccaggtcctgcagctggtgtacaaggatgggtccccttgtccctccaaatccggcctgagctataagagtgtgatcagtttcgtgtgcaggcctgaggccgggccaaccaataggcccatgctcatctccctggacaagcagacatgcactctcttcttctcctggcacacgccgctggcctgcgagcaagcgaccgaatgttccgtgaggaatggaagctctattgttgacttgtctccccttattcatcgcactggtggttatgaggcttatgatgagagtgaggatgatgcctccgataccaaccctgatttctacatcaatatttgtcagccactaaatcccatgcacgcagtgccctgtcctgccggagccgctgtgtgcaaagttcctattgatggtccccccatagatatcggccgggtagcaggaccaccaatactcaatccaatagcaaatgagatttacttgaattttgaaagcagtactccttgcttagcggacaagcatttcaactacacctcgctcatcgcgtttcactgtaagagaggtgtgagcatgggaacgcctaagctgttaaggaccagcgagtgcgactttgtgttcgaatgggagactcctgtcgtctgtcctgatgaagtgaggatggatggctgtaccctgacagatgagcagctcctctacagcttcaacttgtccagcctttccacgagcacctttaaggtgactcgcgactcgcgcacctacagcgttggggtgtgcacctttgcagtcgggccagaacaaggaggctgtaaggacggaggagtctgtctgctctcaggcaccaagggggcatcctttggacggctgcaatcaatgaaactggattacaggcaccaggatgaagcggtcgttttaagttacgtgaatggtgatcgttgccctccagaaaccgatgacggcgtcccctgtgtcttccccttcatattcaatgggaagagctacgaggagtgcatcatagagagcagggcgaagctgtggtgtagcacaactgcggactacgacagagaccacgagtggggcttctgcagacactcaaacagctaccggacatccagcatcatatttaagtgtgatgaagatgaggacattgggaggccacaagtcttcagtgaagtgcgtgggtgtgatgtgacatttgagtggaaaacaaaagttgtctgccctccaaagaagttggagtgcaaattcgtccagaaacacaaaacctacgacctgcggctgctctcctctctcaccgggtcctggtccctggtccacaacggagtctcgtactatataaatctgtgccagaaaatatataaagggcccctgggctgctctgaaagggccagcatttgcagaaggaccacaactggtgacgtccaggtcctgggactcgttcacacgcagaagctgggtgtcataggtgacaaagttgttgtcacgtactccaaaggttatccgtgtggtggaaataagaccgcatcctccgtgatagaattgacctgtacaaagacggtgggcagacctgcattcaagaggtttgatatcgacagctgcacttactacttcagctgggactcccgggctgcctgcgccgtgaagcctcaggaggtgcagatggtgaatgggaccatcaccaaccctataaatggcaagagcttcagcctcggagatatttattttaagctgttcagagcctctggggacatgaggaccaatggggacaactacctgtatgagatccaactttcctccatcacaagctccagaaacccggcgtgctctggagccaacatatgccaggtgaagcccaacgatcagcacttcagtcggaaagttggaacctctgacaagaccaagtactaccttcaagacggcgatctcgatgtcgtgtttgcctcttcctctaagtgcggaaaggataagaccaagtctgtttcttccaccatcttcttccactgtgaccctctggtggaggacgggatccccgagttcagtcacgagactgccgactgccagtacctcttctcttggtacacctcagccgtgtgtcctctgggggtgggctttgacagcgagaatcccggggacgacgggcagatgcacaaggggctgtcagaacggagccaggcagtcggcgcggtgctcagcctgctgctggtggcgctcacctgctgcctgctggccctgttgctctacaagaaggagaggagggaaacagtgataagtaagctgaccacttgctgtaggagaagttccaacgtgtcctacaaatactcaaaggtgaataaggaagaagagacagatgagaatgaaacagagtggctgatggaagagatccagctgcctcctccacggcagggaaaggaagggcaggagaacggccatattaccaccaagtcagtgaaagccctcagctccctgcatggggatgaccaggacagtgaggatgaggttctgaccatcccagaggtgaaagttcactcgggcaggggagctggggcagagagctcccacccagtgagaaacgcacagagcaatgcccttcaggagcgtgaggacgatagggtggggctggtcaggggtgagaaggcgaggaaagggaagtccagctctgcacagcagaagacagtgagctccaccaagctggtgtccttccatgacgacagcgacgaggacctcttacacatctgactccgcagtgcctgcaggggagcacggagccgcgggacagccaagcacctccaaccaaataagacttccactcgatgatgcttctataattttgcctttaacagaaactttcaaaagggaagagtttttgtgatgggggagagggtgaaggaggtcaggccccactccttcctgattgtttacagtcattggaataaggcatggctcagatcggccacagggcggtaccttgtgcccagggttttgccccaagtcctcatttaaaagcataaggccggacgcatctcaaaacagagggctgcattcgaagaaacccttgctgctttagtcccgatagggtatttgaccccgatatattttagcattttaattctctccccctatttattgactttgacaattactcaggtttgagaaaaaggaaaaaaaaacagccaccgtttcttcctgccagcaggggtgtgatgtaccagtttgtccatcttgagatggtgaggctgtcagtgtatggggcagcttccggcgggatgttgaactggtcattaatgtgtcccctgagttggagctcattctgtctcttttctcttttgctttctgtttcttaagggcacacacacgtgcgtgcgagcacacacacacatacgtgcacagggtccccgagtgcctaggttttggagagtttgcctgttctatgcctttagtcaggaatggctgcacctttttgcatgatatcttcaagcctgggcgtacagagcacatttgtcagtatttttgccggctggtgaattcaaacaacctgcccaaagattgatttgtgtgtttgtgtgtgtgtgtgtgtgtgtgtgtgtgtgtgagtggagttgaggtgtcagagaaaatgaattttttccagatttggggtataggtctcatctcttcaggttctcatgataccacctttactgtgcttatttttttaagaaaaaagtgttgatcaaccattcgacctataagaagccttaatttgcacagtgtgtgacttacagaaactgcatgaaaaatcatgggccagagcctcggccctagcattgcacttggcctcatgctggagggaggctgggcgggtacagcgcggaggaggagggaggccaggcgggcatggcgtggaggaggagggaggccgggcggtcacagcatggaggaggagggaggcgctgctggtgttcttattctggcggcagcgcctttcctgccatgtttagtgaatgacttttctcgcattgtagaattgtatatagactctggtgttctattgctgagaagcaaaccgccctgcagcatccctcagcctgtaccggtttggctggcttgtttgatttcaacatgagtgtattttttaaaattgatttttctcttcatttttttttcaatcaactttactgtaatataaagtattcaacaatttcaataaaagataaattattaaaa

SEQ ID NO: 61821 - DNA, 8780 bp, Homo sapiens
cgagcccagtcgagccgcgctcacctcgggctcccgctccgtctccacctccgcctttgccctggcggcgcgaccccgtcccggcgcggcccccagcagtcgcgcgccgttagcctcgcgcccgccgcgcagtccgggcccggcgcgatgggggccgccgccggccggagcccccacctggggcccgcgcccgcccgccgcccgcagcgctctctgctcctgctgcagctgctgctgctcgtcgctgccccggggtccacgcaggcccaggccgccccgttccccgagctgtgcagttatacatgggaagctgttgataccaaaaataatgtactttataaaatcaacatctgtggaagtgtggatattgtccagtgcgggccatcaagtgctgtttgtatgcacgacttgaagacacgcacttatcattcagtgggtgactctgttttgagaagtgcaaccagatctctcctggaattcaacacaacagtgagctgtgaccagcaaggcacaaatcacagagtccagagcagcattgccttcctgtgtgggaaaaccctgggaactcctgaatttgtaactgcaacagaatgtgtgcactactttgagtggaggaccactgcagcctgcaagaaagacatatttaaagcaaataaggaggtgccatgctatgtgtttgatgaagagttgaggaagcatgatctcaatcctctgatcaagcttagtggtgcctacttggtggatgactccgatccggacacttctctattcatcaatgtttgtagagacatagacacactacgagacccaggttcacagctgcgggcctgtccccccggcactgccgcctgcctggtaagaggacaccaggcgtttgatgttggccagccccgggacggactgaagctggtgcgcaaggacaggcttgtcctgagttacgtgagggaagaggcaggaaagctagacttttgtgatggtcacagccctgcggtgactattacatttgtttgcccgtcggagcggagagagggcaccattcccaaactcacagctaaatccaactgccgctatgaaattgagtggattactgagtatgcctgccacagagattacctggaaagtaaaacttgttctctgagcggcgagcagcaggatgtctccatagacctcacaccacttgcccagagcggaggttcatcctatatttcagatggaaaagaatatttgttttatttgaatgtctgtggagaaactgaaatacagttctgtaataaaaaacaagctgcagtttgccaagtgaaaaagagcgatacctctcaagtcaaagcagcaggaagataccacaatcagaccctccgatattcggatggagacctcaccttgatatattttggaggtgatgaatgcagctcagggtttcagcggatgagcgtcataaactttgagtgcaataaaaccgcaggtaacgatgggaaaggaactcctgtattcacaggggaggttgactgcacctacttcttcacatgggacacggaatacgcctgtgttaaggagaaggaagacctcctctgcggtgccaccgacgggaagaagcgctatgacctgtccgcgctggtccgccatgcagaaccagagcagaattgggaagctgtggatggcagtcagacggaaacagagaagaagcattttttcattaatatttgtcacagagtgctgcaggaaggcaaggcacgagggtgtcccgaggacgcggcagtgtgtgcagtggataaaaatggaagtaaaaatctgggaaaatttatttcctctcccatgaaagagaaaggaaacattcaactctcttattcagatggtgatgattgtggtcatggcaagaaaattaaaactaatatcacacttgtatgcaagccaggtgatctggaaagtgcaccagtgttgagaacttctggggaaggcggttgcttttatgagtttgagtggcgcacagctgcggcctgtgtgctgtctaagacagaaggggagaactgcacggtctttgactcccaggcagggttttcttttgacttatcacctctcacaaagaaaaatggtgcctataaagttgagacaaagaagtatgacttttatataaatgtgtgtggcccggtgtctgtgagcccctgtcagccagactcaggagcctgccaggtggcaaaaagtgatgagaagacttggaacttgggtctgagtaatgcgaagctttcatattatgatgggatgatccaactgaactacagaggcggcacaccctataacaatgaaagacacacaccgagagctacgctcatcacctttctctgtgatcgagacgcgggagtgggcttccctgaatatcaggaagaggataactccacctacaacttccggtggtacaccagctatgcctgcccggaggagcccctggaatgcgtagtgaccgacccctccacgctggagcagtacgacctctccagtctggcaaaatctgaaggtggccttggaggaaactggtatgccatggacaactcaggggaacatgtcacgtggaggaaatactacattaacgtgtgtcggcctctgaatccagtgccgggctgcaaccgatatgcatcggcttgccagatgaagtatgaaaaagatcagggctccttcactgaagtggtttccatcagtaacttgggaatggcaaagaccggcccggtggttgaggacagcggcagcctccttctggaatacgtgaatgggtcggcctgcaccaccagcgatggcagacagaccacatataccacgaggatccatctcgtctgctccaggggcaggctgaacagccaccccatcttttctctcaactgggagtgtgtggtcagtttcctgtggaacacagaggctgcctgtcccattcagacaacgacggatacagaccaggcttgctctataagggatcccaacagtggatttgtgtttaatcttaatccgctaaacagttcgcaaggatataacgtctctggcattgggaagatttttatgtttaatgtctgcggcacaatgcctgtctgtgggaccatcctgggaaaacctgcttctggctgtgaggcagaaacccaaactgaagagctcaagaattggaagccagcaaggccagtcggaattgagaaaagcctccagctgtccacagagggcttcatcactctgacctacaaagggcctctctctgccaaaggtaccgctgatgcttttatcgtccgctttgtttgcaatgatgatgtttactcagggcccctcaaattcctgcatcaagatatcgactctgggcaagggatccgaaacacttactttgagtttgaaaccgcgttggcctgtgttccttctccagtggactgccaagtcaccgacctggctggaaatgagtacgacctgactggcctaagcacagtcaggaaaccttggacggctgttgacacctctgtcgatgggagaaagaggactttctatttgagcgtttgcaatcctctcccttacattcctggatgccagggcagcgcagtggggtcttgcttagtgtcagaaggcaatagctggaatctgggtgtggtgcagatgagtccccaagccgcggcgaatggatctttgagcatcatgtatgtcaacggtgacaagtgtgggaaccagcgcttctccaccaggatcacgtttgagtgtgctcagatatcgggctcaccagcatttcagcttcaggatggttgtgagtacgtgtttatctggagaactgtggaagcctgtcccgttgtcagagtggaaggggacaactgtgaggtgaaagacccaaggcatggcaacttgtatgacctgaagcccctgggcctcaacgacaccatcgtgagcgctggcgaatacacttattacttccgggtctgtgggaagctttcctcagacgtctgccccacaagtgacaagtccaaggtggtctcctcatgtcaggaaaagcgggaaccgcagggatttcacaaagtggcaggtctcctgactcagaagctaacttatgaaaatggcttgttaaaaatgaacttcacggggggggacacttgccataaggtttatcagcgctccacagccatcttcttctactgtgaccgcggcacccagcggccagtatttctaaaggagacttcagattgttcctacttgtttgagtggcgaacgcagtatgcctgcccacctttcgatctgactgaatgttcattcaaagatggggctggcaactccttcgacctctcgtccctgtcaaggtacagtgacaactgggaagccatcactgggacgggggacccggagcactacctcatcaatgtctgcaagtctctggccccgcaggctggcactgagccgtgccctccagaagcagccgcgtgtctgctgggtggctccaagcccgtgaacctcggcagggtaagggacggacctcagtggagagatggcataattgtcctgaaatacgttgatggcgacttatgtccagatgggattcggaaaaagtcaaccaccatccgattcacctgcagcgagagccaagtgaactccaggcccatgttcatcagcgccgtggaggactgtgagtacacctttgcctggcccacagccacagcctgtcccatgaagagcaacgagcatgatgactgccaggtcaccaacccaagcacaggacacctgtttgatctgagctccttaagtggcagggcgggattcacagctgcttacagcgagaaggggttggtttacatgagcatctgtggggagaatgaaaactgccctcctggcgtgggggcctgctttggacagaccaggattagcgtgggcaaggccaacaagaggctgagatacgtggaccaggtcctgcagctggtgtacaaggatgggtccccttgtccctccaaatccggcctgagctataagagtgtgatcagtttcgtgtgcaggcctgaggccgggccaaccaataggcccatgctcatctccctggacaagcagacatgcactctcttcttctcctggcacacgccgctggcctgcgagcaagcgaccgaatgttccgtgaggaatggaagctctattgttgacttgtctccccttattcatcgcactggtggttatgaggcttatgatgagagtgaggatgatgcctccgataccaaccctgatttctacatcaatatttgtcagccactaaatcccatgcacgcagtgccctgtcctgccggagccgctgtgtgcaaagttcctattgatggtccccccatagatatcggccgggtagcaggaccaccaatactcaatccaatagcaaatgagatttacttgaattttgaaagcagtactccttgcttagcggacaagcatttcaactacacctcgctcatcgcgtttcactgtaagagaggtgtgagcatgggaacgcctaagctgttaaggaccagcgagtgcgactttgtgttcgaatgggagactcctgtcgtctgtcctgatgaagtgaggatggatggctgtaccctgacagatgagcagctcctctacagcttcaacttgtccagcctttccacgagcacctttaaggtgactcgcgactcgcgcacctacagcgttggggtgtgcacctttgcagtcgggccagaacaaggaggctgtaaggacggaggagtctgtctgctctcaggcaccaagggggcatcctttggacggctgcaatcaatgaaactggattacaggcaccaggatgaagcggtcgttttaagttacgtgaatggtgatcgttgccctccagaaaccgatgacggcgtcccctgtgtcttccccttcatattcaatgggaagagctacgaggagtgcatcatagagagcagggcgaagctgtggtgtagcacaactgcggactacgacagagaccacgagtggggcttctgcagacactcaaacagctaccggacatccagcatcatatttaagtgtgatgaagatgaggacattgggaggccacaagtcttcagtgaagtgcgtgggtgtgatgtgacatttgagtggaaaacaaaagttgtctgccctccaaagaagttggagtgcaaattcgtccagaaacacaaaacctacgacctgcggctgctctcctctctcaccgggtcctggtccctggtccacaacggagtctcgtactatataaatctgtgccagaaaatatataaagggcccctgggctgctctgaaagggccagcatttgcagaaggaccacaactggtgacgtccaggtcctgggactcgttcacacgcagaagctgggtgtcataggtgacaaagttgttgtcacgtactccaaaggttatccgtgtggtggaaataagaccgcatcctccgtgatagaattgacctgtacaaagacggtgggcagacctgcattcaagaggtttgatatcgacagctgcacttactacttcagctgggactcccgggctgcctgcgccgtgaagcctcaggaggtgcagatggtgaatgggaccatcaccaaccctataaatggcaagagcttcagcctcggagatatttattttaagctgttcagagcctctggggacatgaggaccaatggggacaactacctgtatgagatccaactttcctccatcacaagctccagaaacccggcgtgctctggagccaacatatgccaggtgaagcccaacgatcagcacttcagtcggaaagttggaacctctgacaagaccaagtactaccttcaagacggcgatctcgatgtcgtgtttgcctcttcctctaagtgcggaaaggataagaccaagtctgtttcttccaccatcttcttccactgtgaccctctggtggaggacgggatccccgagttcagtcacgagactgccgactgccagtacctcttctcttggtacacctcagccgtgtgtcctctgggggtgggctttgacagcgagaatcccggggacgacgggcagatgcacaaggggctgtcagaacggagccaggcagtcggcgcggtgctcagcctgctgctggtggcgctcacctgctgcctgctggccctgttgctctacaagaaggagaggagggaaacagtgataagtaagctgaccacttgctgtaggagaagttccaacgtgtcctacaaatactcaaaggtgaataaggaagaagagacagatgagaatgaaacagagtggctgatggaagagatccagctgcctcctccacggcagggaaaggaagggcaggagaacggccatattaccaccaagtcagtgaaagccctcagctccctgcatggggatgaccaggacagtgaggatgaggttctgaccatcccagaggtgaaagttcactcgggcaggggagctggggcagagagctcccacccagtgagaaacgcacagagcaatgcccttcaggagcgtgaggacgatagggtggggctggtcaggggtgagaaggcgaggaaagggaagtccagctctgcacagcagaagacagtgagctccaccaagctggtgtccttccatgacgacagcgacgaggacctcttacacatctgactccgcagtgcctgcaggggagcacggagccgcgggacagccaagcacctccaaccaaataagacttccactcgatgatgcttctataattttgcctttaacagaaactttcaaaagggaagagtttttgtgatgggggagagggtgaaggaggtcaggccccactccttcctgattgtttacagtcattggaataaggcatggctcagatcggccacagggcggtaccttgtgcccagggttttgccccaagtcctcatttaaaagcataaggccggacgcatctcaaaacagagggctgcattcgaagaaacccttgctgctttagtcccgatagggtatttgaccccgatatattttagcattttaattctctccccctatttattgactttgacaattactcaggtttgagaaaaaggaaaaaaaaacagccaccgtttcttcctgccagcaggggtgtgatgtaccagtttgtccatcttgagatggtgaggctgtcagtgtatggggcagcttccggcgggatgttgaactggtcattaatgtgtcccctgagttggagctcattctgtctcttttctcttttgctttctgtttcttaagggcacacacacgtgcgtgcgagcacacacacacatacgtgcacagggtccccgagtgcctaggttttggagagtttgcctgttctatgcctttagtcaggaatggctgcacctttttgcatgatatcttcaagcctgggcgtacagagcacatttgtcagtatttttgccggctggtgaattcaaacaacctgcccaaagattgatttgtgtgtttgtgtgtgtgtgtgtgtgtgtgtgtgtgtgtgagtggagttgaggtgtcagagaaaatgaattttttccagatttggggtataggtctcatctcttcaggttctcatgataccacctttactgtgcttatttttttaagaaaaaagtgttgatcaaccattcgacctataagaagccttaatttgcacagtgtgtgacttacagaaactgcatgaaaaatcatgggccagagcctcggccctagcattgcacttggcctcatgctggagggaggctgggcgggtacagcgcgtttagggtgagtgtacgcggttagggtgtagttatcacgattag

SEQ ID NO: 61822 - DNA, 1048 bp, Homo sapiens
gccagaactttcctggcatttcctttcacatgaatcttgaaacaaaaaccaactaagtataaattagtctctctttcacctcctgcagtctttattcaatccagacccattatttctgcctctccaagtacacacccacatattttatgtttgctaaaacatttgaagacaatctttaataaagtacaggtatacctcgtcttactgttcttgacattattacacttcacagatattgtggtttttataaattgaaggtttatggcaaccctgcattgatcaagtctattagcaccatttttcctacagcatatgctcactttatgtctctggacactggaagaagatgccatctagaactttcatagctagagaggagaaggtcaatgcctagcttcaaaggacaggctgactcttttgttaggagctaacaaattgccacagcaattttgataattctcataatatttcaaaactttatattgttattaactgctatggtgggctttgatcagtgatctttgttattactgtaatcatttcagggcaccacaaactgtacccatgtaggacaacagacttaactgatcaatgtcgtgtgcgttctgactgctccactgaccatctattccctcatctctcttcctctcctcaggctcccctattccctgagatacaacaagattgaaattaggtcagttaataaccctacagtggcttttaaatgttcaagtgaatgggagagttacacatctctcagtttattttaaaaactagaaatgagccaggtatcatggctcattcctgcgaccccagcactttgggaagttaaagcgggaggattgcttgaggccaggagttccagaccaaggtctgcgcaacatagtgagactccatctctacaaaaaaatttaaaagttagtcaagcatggtggtgcacacctgtagtctgtagtcccagctacttaagaggctgaattcaaggctgcagtgagcgatgatcgtgccactgcacttcaacctgggtgacagaacaagaccttgtctc

SEQ ID NO: 61823 - DNA, 357 bp, Homo sapiens
tgcaatggcatgatcatagctcataactctggggctcaaacaatcctcccgcattggcctttcaaagtgctgggattacaggtgtgagccaccatgcccagcttgtgttagatttttttattctttggaaatttttgatttccagaatgaaattgctgatcatttaaaaaatatatatatacatatatgtgtgtgtgtgtgtgtgtgtgtgtgtgtgtgtttataagagtgaaatgtaggcatctataaagatgatcaagatatgatcaaggtcaaaattgttgactttctggagaattcatacaaagcccttttacataccacatcacattgcatttcactgaaagatggagggta

SEQ ID NO: 61824 - DNA, 754 bp, Homo sapiens
tagcgttctgaggatcccctcatgtctgacccacccgcggaggaaggagtgtaggaggaagcagatttttaaatattataaacattgaatagtgtaatttgccatcacttaagtaagttttccagctgatgataaactttacttggtaagacaagttttttgcattggccttcagtaaaatctttcacttagttgaaagcatttttatatggggaggagatgtaactaaggcaatctaggtttgtgattttctattacagtttgatccaagaaaaaatatcagtaagtgtgtcaatattatcttgtttagatcagtgttttgaaacttgtgtgttcgtaagaactgcctggggcccttgttaaaatacagattccaatgccagctgcagatttactgaatcagagtctctaggcaaggggcctgggtgtgtatttatcaaaggcaccaagtgatttcttatgctcaaacaggtttaaggaacactgctgtagatggttctccttgactgttttttttcctctcagctgggctttgtagcagtcattttgagtataaattgtgataggagcctgaggcaatagcattaaaagtgagttggcaaagcccagcagagccagtttaattagctagtttggataactgtaatgtcatttccccttctcaagctgtggtgcttcaggatgctgcccatcaagttccttcatccttccagtcttttcatctgttattccattgatccttacaccatctctg

SEQ ID NO: 61825 - DNA, 234 bp, Homo sapiens
gcagcagtttctttgaaaatttggaccagaaggtgcataacaagttgttctgcagaagttcttatctgatattcttagggagctatcctgcatgtaatcttcattttttttttctctaccatcatgtaggcatactcagtgtagactaccacaatcctggatacctctctgcttagatttacaatctctgctaagatttgccactgcagaaagtgtagtagtttcactacatat

SEQ ID NO: 61826 - DNA, 767 bp, Homo sapiens
  misc_feature (4)..(4): n is a, c, g, or t
gganccccactagcccacggttggctagtctgttatgttaaggctttctgggaagccagccactctgcgcaggagtgaaacatgaagttgttttctgaggacctgttttggtgggattgtttgggcagaggactgtgtttatgcagggcaaatcccagaaagataagaggaagctagagaaacttaatgtacctgaattcttcatggtgtatttgcaaactaacttaacatagattcttttgactatggtaagtttgaatctctccttgccaaacaacattataagtttagttttcttcttcctcttgcagccggtacagaaaggtgtaagtggtggctgaaaattgaggaagcttcatctgaccaatgtgggtgctggtttcttgtgaaatgtgtccctaagcctccttctccttgcaggcagccacccacccaggtgtctaagataggacatgctcctttctttctctaatcccatcctgaggttgccggcaaagccaatatgaccactactgagaaatagtaatgacttctacaaatgcaagggtcttaccctcctctttcccttaaacaccctcccttttccttagaccccgtttttgccatcccccaaatgtgtggtatggtgaaactaatcccctgaatgtgaattgctatccttattgccctattaaagaagagccagctggtatattgtcaggaagcactatttaaaatgtgaactgttatagagtaaataaataaatactctacaggaataaaaaagt

SEQ ID NO: 61827 - DNA, 577 bp, Homo sapiens
  misc_feature (11)..(11): n is a, c, g, or t
  misc_feature (27)..(27): n is a, c, g, or t
  misc_feature (30)..(30): n is a, c, g, or t
ccccccccccnccttcactttgttgcncanccaattaacatagattcttttgactatggtaagtttgaatctctccttgccaaacaacattataagtttagttttcttcttcctcttgcagccggtacagaaaggtgtaagtggtggctgaaaattgaggaagcttcatctgaccaatgtgggtgctggtttcttgtgaaatgtgtccctaagcctccttctccttgcaggcagccacccacccaggtgtctaagataggacatgctcctttctttctctaatcccatcctgaggttgccggcaaagccaatatgaccactactgagaaatagtaatgacttctacaaatgcaagggtcttaccctcctctttcccttaaacaccctcccttttccttagaccccgtttttgccatcccccaaatgtgtggtatggtgaaactaatcccctgaatgtgaattgctatccttattgccctattaaagaagagccagctggtatattgtcaggaagcactatttaaaatgtgaactgttatagagtaaataaataaatactctacaggaataaaaaagt

SEQ ID NO: 61828 - DNA, 4712 bp, Homo sapiens
accggggcctcagccatggcgaccgtgctgtccagggcgctcaagctgccggggaagaagagcccagacctaggggagtatgatccacttacccaggctgacagtgatgagagcgaagacgatctggtgcttaacctgcagaagaatggaggggtcaaaaatgggaagagtcctttgggagaagcgccagaacccgactcagatgctgaggttgcagaggctgcaaagccacatctttcagaagtcaccacggagggctacccctcagaaccccttgggggcctggaacagaaggcggcctcctccctggtgtcatatgtgcgcacgtctgtcttcctgctgactttggggatctcgatgatcctggtgctcctgtgtgctttcctgatcccctgtcctcccagagatctgcacagcacctggagccgccacttgggctcccagggagaggtggggacctgtctccattggaattggctgatgtgaatggagatggcctgcgtgatgtgcttctctcctttgtgatgtcaaggaacgggagtgcagtaggtgtctcaagaccagctgctaatcttgtatgcctttcggggatgaatggcagcacactgtggtctagtcttctccctgaggaggctcgagatatcacatgtttggagctgatgccaggaagcttggctgaaaccatctgccttgtgacagggacacacaagatgctcagcgcattcaatgcaacgtcagggaaagccatttggactttaaacccaaactacttgtccaacggtaccttggctgccccagttgtggtactgccagacttggatgaagacggtgttcgagaccttgtggttctggccattggggaattgcagccagatctgtgctttctgctggtgtctggccggaccggaaatccagtgggtcgacctgtgaagtacaacatcgttggagttgggaatctgattggtcctcaggtttacatcaccacaaatggggctgtctacatcctgtttggctttggaaatatacaagctgtcgcactgcgggacatttttgttcaggcccaaaatcgagacagctcaccaccttctctgcagatagaagagccagaatgggaaaagcgaagatccatcaacctgtctgagctcattgatgtttacagtgatggtgttgaactactccagatggtgaaggcaccagattccaactgcagcaaccttctgattacaaccagacaaagccttgtgctgcttcgggggcaaaatctgacaccttactgggcattgagacttcaaggcctgcgcagccagcctactcctggatatttcactgatgatcagacattagacttccttctgcagatacaggatggagttgggatgaaaaagatgatggttgtggatggtgactctggctccattgtttggagttaccgtgctccgtgtcacatgaaagaaacgccagccacctcagcagttacttcagaccagaagtctgtcttcctcttctgggccgaagggctgtcagctgcatctcccaattccgatatcatcctaggaactgagccgcccagccttcaccacctttacctcctgcatcctgcgttcccctccatccttctggatctggccaacaccaccggcacagtgacggcttcagaggttggaattaacgacctctggaaagatgccttttatgttaccaggacaacagggccaagctccgaaggccatccagcagccctggtggtcagcaagcttagtctacggtgggcactaatggagggccagatggctcagctacaggagtccacccccaaaattggccgtggggagctgcgaagatttctctctaggataaagtttgttgaagctccctacgagatctaatctgatggaatcttcagttgcagaagaagtgaacagagtggataccctctctactctcctgtcactgtaaaatcagttctatggagagaagacttcttcgtcctcatttaccacctccctgatggttgcaaaggcttgggaaggcatgttggagtctttgacggcagcatgatctatttggctggggcatcttacctaccttttcagtccctgcattaatcccctctaggaactctgcgtggatcgtttggaaatgtgaatctcttaagtatttaatttttttggtatgtctaatttatgaagtcttgctgggaaagccagtgaagtctatgactaggaaacattttgttgtacattgtgctgtgtgtgtgtatattttagtgttgtggtgaagttattttccaggtatgtcctaagcttcagggatccagtttcttgtccttctgaaatatatctggtttgtttggtcattttgagacttccagatgccctacctctgatgttgagggccacttatttctctccttattctttcccacctgtaccttggctacttccaaattgtagacagaatgagaaagatttatagtggaagactgagttagccatccaagcattttcatctctcttgttttatatcctatttccttagattttccatccatgtctattaagtgaccacaagaataactatattcctatcacaaggggagcaagaggatgtagtctcagtgacccatctctgaccaagtccacatgttgtgttatatgtggctctgatggttctgccagtcatgatcttttttctgtggcgacatcagaagtgtatgtttgcatgctgtcttcaacttagaggagaactggaagtcaggagcctttgatgtccttatcctgctgtatgtcttctctgcatctttttctatagggcaccctccttagctcccctcactctgttttctcttctattcagggatatgtttctggactttttcttctgctacttgagtccaggatgcaaccattttgtcctgcatctcttctttcctgtagagcctttgaagcattgtattttgggaaaattcttctgtaaatactataacttttataaatggttaagttatttagaattatctccagtgcttacttctcccttcttctgtataaatctgctacttcaattaagttctcctctaaacttttaggtcattgtttatatagcagaaaattcaatgttagcggatggaaaactgcttcttgaataaccttgataggtcatccctgagtgcacctcaggttctctctttacctgggcttgtatcttttttttttttttttttttttttgagacagagttttgctcttgtcgcccaggctggagtgcagtggcacaatctcggctcactgcaaccttcgcctcctgggttcaagcgattctccagccttagcctcccaagtagctgggactacaggtgcccgctaccatgcctggctaatttttttttttgtatttttagtagagacggggtttcaccatgttggccaggctggtcacgaactcctgacctcagataatccacctgcttctgcctcccaaagtgctgggattacaggcgtgagccaccatgcccggctgggcttgtatcttttagcttgtgttagtaaaaggattctagaaaattatgaagtccagattcaaagggatctctgttaattacccactgacaggcattatgacctaacaggaggttggtagcagtagatccaagcatgcatgttgcctggcctgtagattggccttatcaggtttctgggtgcctctgccttaagatcctgaaggcaaattttgtttcaacagtttggaagtcatctgtgggtccagcttgactttggaggaataagaagatacttctagagtatgggaatgattccagataatttctgggatttgaatctacttgagtttaagggcctgggacctaatttggtttagtatagaatttgaagaattaatttataggcagctgaatacccaaaacttgggtggtggtcctgtggtttggctgagctgtccgggcataacctggttctctgttatgttaaggctttctgggaagccagccactctgcgcaggagtgaaacatgaagttgttttctgaggacctgttttggtgggattgtttgggcagaggactgtgtttatgcagggcaaatcccagaaagataagaggaagctagagaaacttaatgtacctgaattcttcatggtgtatttgcaaactaacttaacatagattcttttgactatggtaagtttgaatctctccttgccaaacaacattataagtttagttttcttcttcctcttgcagccggtacagaaaggtgtaagtggtggctgaaaattgaggaagcttcatctgaccaatgtgggtgctggtttcttgtgaaatgtgtccctaagcctccttctccttgcaggcagccacccacccaggtgtctaagataggacatgctcctttctttctctaatcccatcctgaggttgccggcaaagccaatatgaccactactgagaaatagtaatgacttctacaaatgcaagggtcttaccctcctctttcccttaaacaccctcccttttccttagaccccgtttttgccatcccccaaatgtgtggtatggtgaaactaatcccctgaatgtgaattgctatccttattgccctattaaagaagagccagctggtatattgtcaggaagcactatttaaaatgtgaactgttatagagtaaataaataaatactctacaggaataaaaaagt

SEQ ID NO: 61829 - DNA, 734 bp, Homo sapiens
agcgcgcgcccggggtgcgcaaccggcccaacaggcaggcccggggctcgtgtgaagaacacagtggaagcatcctccaagccagccaacaaatttccgttttctactgccctttcgggccaggggttattttatgagcatctccgatgttgcacacgtggcgtgtgaaccgagagaaagaagatggagagatcaccctccagacgtcgtcgcctggaagaggccccaaaattgccatataagaacccaacacaccttgctcagcagcaggaaccctggagtcggctcaactcaacccccacaattacttccatgaggcgggatgcctactattttgatcccgagataccaaaggatgacctggacttccgcttagcagccttgtacaaccaccacactgggacattcaagaacaaaagtgagatactgttaaaccagaaaaccacgcaggatacctatagaaccaagatccaattccctggagaatttttaacccctcccactccacccatcactttcctggctaacatcagacactggatcaaccctaaaaaggagtccatccacagcatccaaggatccatagtgtcccctcacactgcagccaccaatggaggctactcccgaaagaaagatggtggcttcttctccacctagtgttgacagatccctgaactaattatagtgaaacatactgcggcccacttccattaaatagatttgtgcaagaaaaa

SEQ ID NO: 61830 - DNA, 501 bp, Homo sapiens
agcgcgcgcccggggtgcgcaaccggcccaacaggcaggcccggggctcgtgtgaagaacacagtggaagcatcctccaagccagccaacaaatttccgttttctactgccctttcgggccaggggttattttatgagcatctccgatgttgcacacgtggcgtgtgaaccgagagaaagaagatggagagatcaccctccagacgtcgtcgcctggaagaggccccaaaccaagatccaattccctggagaatttttaacccctcccactccacccatcactttcctggctaacatcagacactggatcaaccctaaaaaggagtccatccacagcatccaaggatccatagtgtcccctcacactgcagccaccaatggaggctactcccgaaagaaagatggtggcttcttctccacctagtgttgacagatccctgaactaattatagtgaaacatactgcggcccacttccattaaatagatttgtgcaagaaaaa

SEQ ID NO: 61831 - DNA, 427 bp, Homo sapiens
atcttatgccagtgaggctgtgctgcggctgagcgggcctcccatccctcttaaaagagttaggcatttagccatgcctcccacccgggaccctttccagcagcctacattagataacgatgattcctacttaggagaactgcgggcttccaagaaccaagatccaattccctggagaatttttaacccctcccactccacccatcactttcctggctaacatcagacactggatcaaccctaaaaaggagtccatccacagcatccaaggatccatagtgtcccctcacactgcagccaccaatggaggctactcccgaaagaaagatggtggcttcttctccacctagtgttgacagatccctgaactaattatagtgaaacatactgcggcccacttccattaaatagatttgtgcaagaaaaa

SEQ ID NO: 61832 - DNA, 432 bp, Homo sapiens
accccgttcttgagttaaaagtctatttatttacttccttgttggagaagggcaggagagtacctgggaatcattacgatccctagcagctcatcctgccctttgaataccctcaatttacaggcttggctcagaatataccctgttgattgcctgtcgtgaggggtttgaatacaggggggaatttttaacccctcccactccacccatcactttcctggctaacatcagacactggatcaaccctaaaaaggagtccatccacagcatccaaggatccatagtgtcccctcacactgcagccaccaatggaggctactcccgaaagaaagatggtggcttcttctccacctagtgttgacagatccctgaactaattatagtgaaacatactgcggcccacttccattaaatagatttgtgcaagaaaaa

SEQ ID NO: 61833 - DNA, 1081 bp, Homo sapiens
agcgcgcgcccggggtgcgcaaccggcccaacaggcaggcccggggctcgtgtgaagaacacagtggaagcatcctccaagccagccaacaaatttccgttttctactgccctttcgggccaggggttattttatgagcatctccgatgttgcacacgtggcgtgtgaaccgagagaaagaagatggagagatcaccctccagacgtcgtcgcctggaagaggccccaaaattgccatataagaacccaacacaccttgctcagcagcaggaaccctggagtcggctcaactcaacccccacaattacttccatgaggcgggatgcctactattttgatcccgagataccaaaggatgacctggacttccgcttagcagccttgtacaaccaccacactgggacattcaagaacaaaagtgagatactgttaaaccagaaaaccacgcaggatacctataggtaagtggtagaggcagagcctctccagcctaaacatgctgccatccagtcatataaggtaaaatgtcacctggaaaatgataatcactaggtactcatttgtatacaaatttctgtatttttacatctgtgtctataatatagtttctgtattttcactgtctaagatgaacagaaatctcccaagattgtgctcatctgtataaacaaaatctttggttaatcccacagaggtaaaaagagtctttggctgctttattcttgagatcacattcaactaccttgccttcctcacctttctctgattgatttcactctccacttttcttccctatgccttcttctagaaccaagatccaattccctggagaatttttaacccctcccactccacccatcactttcctggctaacatcagacactggatcaaccctaaaaaggagtccatccacagcatccaaggatccatagtgtcccctcacactgcagccaccaatggaggctactcccgaaagaaagatggtggcttcttctccacctagtgttgacagatccctgaactaattatagtgaaacatactgcggcccacttccattaaatagatttgtgcaagaaaaa

SEQ ID NO: 61834 - DNA, 543 bp, Homo sapiens
atcttatgccagtgaggctgtgctgcggctgagcgggcctcccatccctcttaaaagagttaggcatttagccatgcctcccacccgggaccctttccagcagcctacattagataacgatgattcctacttaggagaactgcgggcttccaagataccaaaggatgacctggacttccgcttagcagccttgtacaaccaccacactgggacattcaagaacaaaagtgagatactgttaaaccagaaaaccacgcaggatacctatagaaccaagatccaattccctggagaatttttaacccctcccactccacccatcactttcctggctaacatcagacactggatcaaccctaaaaaggagtccatccacagcatccaaggatccatagtgtcccctcacactgcagccaccaatggaggctactcccgaaagaaagatggtggcttcttctccacctagtgttgacagatccctgaactaattatagtgaaacatactgcggcccacttccattaaatagatttgtgcaagaaaaa

SEQ ID NO: 61835 - DNA, 534 bp, Homo sapiens
atcctttaagataattttctgtaaaataggctgggtttttgttgttgttgttgttttatttttataatattcctaggagaagcacttgatgagtgtttatatcattgagaacatttggcaagagaaagacaaacagtagaaccacaataccccaacatttaaggaaatgagaaagaaaacctggtattttcaccatcctctctgaaaataaatactttgacttgcactgattactacttcatcagcattcaactccgctccgtggcactctgtgtgaataattttaaaggcagattaagcattctaaaaataaattctattggtaaattaggatatcagatgcttccattataaaagcctatcctattctgtactctcagctggcagtcatatccagatctcaagctactctggctcttattgaacaagaacctattccaggagtgaggttttgaagagggatctctcatggttaactagagacagaaagaggcagaattgcccacatactctggcaggagttaaaataacaat

SEQ ID NO: 61836 - DNA, 283 bp, Homo sapiens
tatgatttctttcagcagtgttttgtaattcttcttacagagatctttcacctccttggttagataagttagatgtattcctaggaatttattttttgtgtggccatctatttggatactttctatttccttttcttgcatcattgctctggcaagaaattcagtactatgttgaataggagtggtgaaagtgagcatccttgtcttgttgcagttttcaaggggaatggttccatcttttgcccattcagtataatgttggctatgggtttgtcattgatgt

SEQ ID NO: 61837 - DNA, 262 bp, Homo sapiens
tgttttgtagagatggtgttttgccatgttgtccaggctggtggtcttctcatctataagttgaaaacacagtccttgtggggttgcttgagacacccagaggggcttcaatgcccctggtgactcagaggctttcaatgaaagtcctgggctcagggagcagacaactcccagtttgagacttgattctgccgtgcacttgctggctgacctcagaggaactggtcctctctatgccccagtttcctcacctgtaaaatgg

SEQ ID NO: 61838 - DNA, 2982 bp, Homo sapiens
  misc_feature (2120)..(2122): n is a, c, g, or t
  misc_feature (2242)..(2242): n is a, c, g, or t
  misc_feature (2934)..(2935): n is a, c, g, or t
gtggggttttgggggggcagtgggtgcaaggagtttggtttgtgtctgccggccggcaggcaaacgcaaccacgcggtgggggaggcggctagcgtggtggacggcccgcgtggccctgtggcagccgagccatggtttctaaactgagccagctgcagacggagctcctggcggccctgctcgagtcagggctgagcaaagaggcactgatccaggcactgggtgagccggggccctacctcctggctggagaagccccctggacaagggggagtcctgcggcggcggtcgaggggagctggctgagctgcccaatgggctgggggagactcggggctccgaggacgagacggacgacgatggggaagacttcacgccacccatcctcaaagagctggagaacctcagccctgaggaggcggcccaccagaaagccgtggtggagacccttctgcaggaggacccgtggcgtgtggcgaagatggtcaagtcctacctgcagcagcacaacatcccacagcgggaggtggtcgataccactggcctcaaccagtcccacctgtcccaacacctcaacaagggcactcccatgaagacgcagaagcgggccgccctgtacacctggtacgtccgcaagcagcgagaggtggcgcagcagttcacccatgcagggcagggagggctgattgaagagcccacaggtgatgagctaccaaccaagaaggggcggaggaaccgtttcaagtggggcccagcatcccagcagatcctgttccaggcctatgagaggcagaagaaccctagcaaggaggagcgagagacgctagtggaggagtgcaatagggcggaatgcatccagagaggggtgtccccatcacaggcacaggggctgggctccaacctcgtcacggaggtgcgtgtctacaactggtttgccaaccggcgcaaagaagaagccttccggcacaagctggccatggacacgtacagcgggccccccccagggccaggcccgggacctgcgctgcccgctcacagctcccctggcctgcctccacctgccctctcccccagtaaggtccacggtgtgcgctatggacagcctgcgaccagtgagactgcagaagtaccctcaagcagcggcggtcccttagtgacagtgtctacacccctccaccaagtgtcccccacgggcctggagcccagccacagcctgctgagtacagaagccaagctggtctcagcagctgggggccccctcccccctgtcagcaccctgacagcactgcacagcttggagcagacatccccaggcctcaaccagcagccccagaacctcatcatggcctcacttcctggggtcatgaccatcgggcctggtgagcctgcctccctgggtcctacgttcaccaacacaggtgcctccaccctggtcatcggtaagctggtggggatgggtgggcacctgggtgggaggctcatggggcaaccgcagaatccaggagctggaagagccactgggactcattcattcattcattcattcatacaacatgtatttatccagtgcctactctggaccagtcactgtgctacatcagtgatacctgggtgaaccaaacagaccaaaatctcagcaactcaagcagggaggcaggcactaagcataatacatcaattctgtggtacctcagaaggtgaagggtctatgggcaaattacagcagggtaagggagactgatgttttctaagtttttgttttatgaagaaaaattaagcccagaaagcccttatttgcaggtacaattatgcagaagcccagtacataagatagataaggagctgctaggagaggggagcagagaactgaccccatggcctttgcactgctgtggaaccccagggctccagggaaccgcagtttgacaacttttgaacaagtcaccgcctgcctctcccactagcctagacaaagagctaaaggctcagagagggggaatgacttgccagagccacttaaattagtggcaggtcccagtggagggctgtttcctgaccaccctgccccctcctccaaaccacgggctctgggaaggagaggtggtgttgggaggtcttnnncaggggtgggatataactggggggcccagctgattccctccccttccactccaggcctggcctccacgcaggcacagagtgtgccggtcatcaacagcatgggcagcagcctgaccaccntgcagcccgtccagttctcccagccgctgcacccctcctaccagcagccgctcatgccacctgtgcagagccatgtgacccagaaccccttcatggccaccatggctcagctgcagagcccccacggtgagcaccctgtgccccacacagcaggagatgatgatagaggttggctgtcaatggatgcaggggaaaggggtgcctggcaggcattgcagtctgcatgtgtctctgggacaagtgtttttccgtgattgagggtgtctgcaggccagtgtgttcccatgtgaatgcacgtatctgtgtgtgtgcacgactgcttgtgtgagcagatccctagtgcgtgtctgggtgtgtatcggttgtgcatgcatttgtgtgcatgcctgtgtttctctgaaactcttagggccatatgaatttctaaaatctattcagattttagaaaggtaatctggggccaggcgtggtggctcatgcctgtaatcccagcactttggaaggccgaggtgggcagatcacttgaggtcaggagttcaagaccagcctggccaacacggtgaaaccccgtctctactaaaagtacaaaaattagccaggcgtggagcacgtgcctgtagtcccagctacttgggaggctgaggcagaatcgcttgaacctgggaggcggaggttgcagtgagctgagattnngccactgcactgcactccagcctgggcaacagagtgagtactctgcc

SEQ ID NO: 61839 - DNA, 3246 bp, Homo sapiens
  misc_feature (1506)..(1506): n is a, c, g, or t
gtggggttttgggggggcagtgggtgcaaggagtttggtttgtgtctgccggccggcaggcaaacgcaaccacgcggtgggggaggcggctagcgtggtggacggcccgcgtggccctgtggcagccgagccatggtttctaaactgagccagctgcagacggagctcctggcggccctgctcgagtcagggctgagcaaagaggcactgatccaggcactgggtgagccggggccctacctcctggctggagaagccccctggacaagggggagtcctgcggcggcggtcgaggggagctggctgagctgcccaatgggctgggggagactcggggctccgaggacgagacggacgacgatggggaagacttcacgccacccatcctcaaagagctggagaacctcagccctgaggaggcggcccaccagaaagccgtggtggagacccttctgcaggaggacccgtggcgtgtggcgaagatggtcaagtcctacctgcagcagcacaacatcccacagcgggaggtggtcgataccactggcctcaaccagtcccacctgtcccaacacctcaacaagggcactcccatgaagacgcagaagcgggccgccctgtacacctggtacgtccgcaagcagcgagaggtggcgcagcagttcacccatgcagggcagggagggctgattgaagagcccacaggtgatgagctaccaaccaagaaggggcggaggaaccgtttcaagtggggcccagcatcccagcagatcctgttccaggcctatgagaggcagaagaaccctagcaaggaggagcgagagacgctagtggaggagtgcaatagggcggaatgcatccagagaggggtgtccccatcacaggcacaggggctgggctccaacctcgtcacggaggtgcgtgtctacaactggtttgccaaccggcgcaaagaagaagccttccggcacaagctggccatggacacgtacagcgggccccccccagggccaggcccgggacctgcgctgcccgctcacagctcccctggcctgcctccacctgccctctcccccagtaaggtccacggtgtgcgctatggacagcctgcgaccagtgagactgcagaagtaccctcaagcagcggcggtcccttagtgacagtgtctacacccctccaccaagtgtcccccacgggcctggagcccagccacagcctgctgagtacagaagccaagctggtctcagcagctgggggccccctcccccctgtcagcaccctgacagcactgcacagcttggagcagacatccccaggcctcaaccagcagccccagaacctcatcatggcctcacttcctggggtcatgaccatcgggcctggtgagcctgcctccctgggtcctacgttcaccaacacaggtgcctccaccctggtcatcggcctggcctccacgcaggcacagagtgtgccggtcatcaacagcatgggcagcagcctgaccaccntgcagcccgtccagttctcccagccgctgcacccctcctaccagcagccgctcatgccacctgtgcagagccatgtgacccagaaccccttcatggccaccatggctcagctgcagagcccccacgccctctacagccacaagcccgaggtggcccagtacacccacacgggcctgctcccgcagactatgctcatcaccgacaccaccaacctgagcgccctggccagcctcacgcccaccaagcaggtcttcacctcagacactgaggcctccagtgagtccgggcttcacacgccggcatctcaggccaccaccctccacgtccccagccaggaccctgccggcatccagcacctgcagccggcccaccggctcagcgccagccccacagtgtcctccagcagcctggtgctgtaccagagctcagactccagcaatggccagagccacctgctgccatccaaccacagcgtcatcgagaccttcatctccacccagatggcctcttcctcccagtaaccacggcacctgggccctggggcctgtactgcctgcttggggggtgatgagggcagcagccagccctgcctggaggacctgagcctgccgagcaaccgtggcccttcctggacagctgtgcctcgctccccactctgctctgatgcatcagaaagggagggctctgaggcgccccaacccgtggaggctgctcgggttgcacaggagggggtcgtggagagctaggagcaaagcctgttcatggcagatgtaggagggactgtcgctgcttcgtgggatacagtcttcttacttggaactgaagggggcggcctatgacttgggcacccccagcctgggcctatggagagccctgggaccgctacaccactctggcagccacacttctcaggacacaggcctgtgtagctgtgacctgctgagctctgagaggccctagatcagcgtggccttgttctgtcaccaatgtacccaccgggccactccttcctgccccaactccttccagctagtgacccacatgccatttgtactgaccccatcacctactcacacaggcatttcctgggtggctactctgtgccagagcctggggctctaacgcctgagcccagggaggccgaagctaacagggaaggcaggcagggctctcctggcttcccatccccagcgattccctctcccaggccccatgacctccagctttcctgtatttgttcccaagagcatcatgcctctgaggccagcctggcctcctgcctctactgggaaggctacttcggggctgggaagtcgtccttactcctgtgggagcctcgcaacccgtgccaagtccaggtcctggtggggcagctcctctgtctcgagcgccctgcagaccctgcccttgtttggggcaggagtagctgagctcacaaggcagcaaggcccgagcagctgagcagggccggggaactggccaagctgaggtgcccaggagaagaaagaggtgaccccagggcacaggagctacctgtgtggacaggactaacactcagaagcctgggggcctggctggctgagggcagttcgcagccaccctgaggagtctgaggtcctgagcactgccaggagggacaaaggagcctgtgaacccaggacaagcatggtcccacatccctgggcctgctgctgagaacctggccttcagtgtaccgcgtctaccctgggattcaggaaa

SEQ ID NO: 61840 - DNA, 392 bp, Homo sapiens
ggccactgcctctaggtctgaggcaaagttaacaaggatggaataaatctggatgatggccagcccaccagcttcaaggctgagattcagatcttgttggagaaggtgtggtccactggatgctggaaacatctgaggtggggcaggcttttgctggcaattaaaaaatgcccccctggggtgccaataaaagtcagtaggatggtgagtccctcatctctacgaaaaataaaaatattagctggacatactggtgtgcacctatggtcccagctacttgagaggctgaggtggaaggattgcttgaggccaggagatcaaggctgcagtgcactcactgtgtttgtaccactgcactccagcctgggcaacagaggatactgtgtctcaaa

SEQ ID NO: 61841 - DNA, 454 bp, Homo sapiens
gagacagacagcagccaagggttgaaaaactacctattgggtactatgttcactacctgggtgatggcatcggttgttcctccaaagctcagcatcacacacaacacccatgtgagaaacttgcctatgtatcccctgaaactaaaacaaaagttgaagtttaaaaaattaatacaagaaatgagctctccattcccagacacacacaaacacacgcacacacacgcaaaattttgacaccagtaagccatcatggaggaaaggatataagagggtttgaggatgctcaagtgagataaccttcttgccgattccagcccagccctcagggcctttccatggttcagcccctgcaggggtcttcttgttgggttccctgttgctccataacagtcaccaggaagcgattcagactctgagtccgtgttggcttagatgagtcatgatgagtgat

SEQ ID NO: 61842 - DNA, 475 bp, Homo sapiens
atgcctgtagcctcagctacttgggatgctgaggtgggaggatcacctgagcctggggagttcaaggctccagtgagccgtgatgtgccactacacactccagtctgggtgacagaattaaataaaattagtttcattatttaagtcaacagaaattatccaacccatcattaatcataccaagtactgaaaagaaaaaaaatgccccaatatatctagcaggtagttaagttaaaagttaccttattgcaagcaaaagttaaaagttttttaaagaagcctgagcaatatagggagaccctgtctctataaaaaatttaaagatttaaaaaaaaatggtagtgcacatctctagtctcagctacttcggaggttgaggcaggaggattgcttgaacccggcagtttgaggccgcagtgagcagtgattgtgccactgcattctagcctgagtgatagagtgagacactatatcc

SEQ ID NO: 61843 - DNA, 812 bp, Homo sapiens
tacggctaggtagcgaggctgggtgtcgagaagacgagcagaggctgaaggattatatccagcagctcaagaatgacagggctgcggtcaagctgaccatgctggagctggaaagcatccacatcgatcctctcagctatgacgtcaagcctcggggagacagccagaggctggatctggaaaacgcagtgcttatgcaggagctcatggccatgaaggaggagatggccgagttgaaggcccagctctacctactggagaaagagaagaaggccctggagctgaagctgagcacgcgggaggcccaggagcaggcctacctggtgcacattgagcacctgaagtccgaggtggaggagcagaaggagcagcggatgcgatccctcagctccaccagcagcggcagcaaagataaacctggcaaggagtgtgctgatgctgcctccccagctctgtccctagctgaactcaggacaacgtgcagcgagaatgagctggctgcggagttcaccaacgccattcgtcgagaaaagaagttgaaggccagagttcaagagctggtgagtgccttggagagactcaccaagagcagtgaaatccgacatcagcaatctgcagagttcgtgaatgatctaaagcgggccaacagcaacctggtggctgcctatgagaaagcaaagaaaaagcatcaaaacaaactgaagaagttagagtcgcagatgatggccatggtggagagacatgagacccgttggggtgctcagcagaatgctgtaaggggacccggccaccaggatcgtattacccccccg

SEQ ID NO: 61844 - DNA, 8538 bp, Homo sapiens
  misc_feature (1)..(1): n is a, c, g, or t
  misc_feature (4)..(4): n is a, c, g, or t
nganggggaaacttcggcgtgaagtgcagctccgctccggctccctctagctttctttccttctctggaatccgaggcgcggatcttcctcgccccaccgccctagttttttcgggagctcgccggtgccctctagggtgtcggctcgtgctgggaagtgccctccatcctggtaatggggggcggcgaggcaccgtaggagtggcgaggcggcgcccagggtggcactgccccggaacggggcgctgggtgcgcgcgggagggtccccgcgcgggctccgccgctgccgcagctgcgagcgcgccgcgccaccgagcctcctgcagcaatggctcgtccgtgaaacgcgagccacggctgctctttttaagagtgcctgcatcctccgtttgcgcttcgcaactgtcctgggtgaaaatggctgtctagactaaaatgtggcagaagggaccaagcagtggatattgagcctgtgaagtccaactcttaagctccgagacctgggggactgagagcccagctctgaaaagtgcatcatgaattccggagttgccatgaaatatggaaacgactcctcggccgagctgagtgagctccattcagcagccctggcatcactaaagggagatatagtggaacttaataaacgtctccagcaaacagagagggaacgggaccttctggaaaagaaattggccaaggcacagtgcgagcagtcccacctcatgagagagcatgaggatgtccaggagcgaacgacgcttcgctatgaggaacgcatcacagagctccacagcgtcattgcggagctcaacaagaagatagaccgtctgcaaggcaccaccatcagggaggaagatgagtactcagaactgcgatcagaactcagccagagccaacacgaggtcaacgaggactctcgaagcatggaccaagaccagacctctgtctctatccccgaaaaccagtctaccatggttactgctgacatggacaactgcagtgacctgaactcagaactgcagagggtgctgacagggctggagaatgttgtctgcggcaggaagaagagcagctgcagcctctccgtggccgaggtggacaggcacattgagcagctcaccacagccagcgagcactgtgacctggctattaagacagtcgaggagattgagggggtgcttggccgggacctgtatcccaacctggctgaagagaggtctcggtgggagaaggagctggctgggctgagggaagagaatgagagcctgactgccatgctgtgcagcaaagaggaagaactgaaccggactaaggccaccatgaatgccatccgggaagagcgggaccggctccggaggcgggtcagagagcttcaaactcgactacagagcgtgcaggccacaggtccctccagccctggccgcctcacttccaccaaccgcccgattaaccccagcactggggagctgagcacaagcagcagcagcaatgacattcccatcgccaagattgctgagagggtgaagctatcaaagacaaggtccgaatcgtcatcatctgatcggccagtcctgggctcagaaatcagtagcataggggtatccagcagtgtggctgaacacctggcccactcacttcaggactgctccaatatccaagagattttccaaacactctactcacacggatctgccatctcagaaagcaagattagagagtttgaggtggaaacagaacggctgaatagccggattgagcacctcaaatcccaaaatgacctcctgaccataaccttggaggaatgtaaaagcaatgctgagaggatgagcatgctggtgggaaaatacgaatccaatgccacagcgctgaggctggccttgcagtacagcgagcagtgcatcgaagcctacgaactcctcctggcgctggcagagagtgagcagagcctcatcctggggcagttccgagcggcgggcgtggggtcctcccctggagaccagtcgggggatgaaaacatcactcagatgctcaagcgagctcatgactgccggaagacagctgagaacgctgccaaggccctgctcatgaagctggacggcagctgtgggggagcctttgccgtggccggctgcagcgtgcagccctgggagagcctttcctccaacagccacaccagcacaaccagctccacagccagtagttgcgacaccgagttcactaaagaagacgagcagaggctgaaggattatatccagcagctcaagaatgacagggctgcggtcaagctgaccatgctggagctggaaagcatccacatcgatcctctcagctatgacgtcaagcctcggggagacagccagaggctggatctggaaaacgcagtgcttatgcaggagctcatggccatgaaggaggagatggccgagttgaaggcccagctctacctactggagaaagagaagaaggccctggagctgaagctgagcacgcgggaggcccaggagcaggcctacctggtgcacattgagcacctgaagtccgaggtggaggagcagaaggagcagcggatgcgatccctcagctccaccagcagcggcagcaaagataaacctggcaaggagtgtgctgatgctgcctccccagctctgtccctagctgaactcaggacaacgtgcagcgagaatgagctggctgcggagttcaccaacgccattcgtcgagaaaagaagttgaaggccagagttcaagagctggtgagtgccttggagagactcaccaagagcagtgaaatccgacatcagcaatctgcagagttcgtgaatgatctaaagcgggccaacagcaacctggtggctgcctatgagaaagcaaagaaaaagcatcaaaacaaactgaagaagttagagtcgcagatgatggccatggtggagagacatgagacccaagtgaggatgctcaagcaaagaatagctctgctagaggaggagaactccaggccacacaccaatgaaacttcgctttaatcagcactcacgcaccggagttctgcccatgggaagtaaactgcagcaggccactggggacagaagggcccatgtacttgttgggaggaggaggaaagggaaggctggcaggtaggtcggcacttggacaatggagtgccccaactcaacccttggggtgactggccatggtgacattgtggactgtatccagaggtgcccgctcttccctcctgggcccacaacagcgtgtaaacacatgttctgtgcctgctcagcagagcctcgtttctgctttcagcactcactctccccctcctcttctggtctggcggctgtgcatcagtgggatcccagacatttgtttctgtaagattttccattgtatcctctttttggtagatgctgggctcatcttctagaatctcgtttctcctctttcctcctgcttcatgggaaaacagacctgtgtgtgcctccagcatttaaaaggactgctgatttgtttactacagcaaggctttggtttccaagtcccgggtctcaactttaagatagaggcggccataagaggtgatctctgggagttataggtcatgggaagagcgtagacaggtgttacttacagtcccagatacactaaagttacaaacagaccaccaccaggactgtgcctgaacaattttgtattgagagaataaaaacttccttcaatcttcattttggaggcagggctgggaagggagcgctctcttgattctgggatttctccctctcagtggagccttattaatatccaagacttagagctgggaatctttttgatacctgtagtggaactaaaattctgtcaggggtttcttcaagagctgagaaacattattagcacttcccgccccagggcactacataattgctgttctgctgaatcaaatctcttccacatgggtgcatttgtagctctggacctgtctctacctaaggacaagacactgaggagatactgaacattttgcaaaacttatcacgcctacttaagagtgctgtgtaacccccagttcaagacttagctcctgttgtcatgacggggacagagtgagggaatggtagttaaggcttcttttttgcccccagatacatggtgatggttagcatatggtgcttaaaaggttaaatttcaagcaaaatgcttacagggctaggcagtaccaaagtaactgaattatttcaggaaggtcttcaatcttaaaacaaattcattattctttttcagttttacctcttctctctcagttctacactgatacacttgaaggaccatttactgtttttttctgtagcaccagagaatccatccaaagttccctatgaaaaatgtgttccattgccatagctgactacaaattaaagttgaggaggtttctgcatagagtctttatgtccataagctacgggtaggtctattttcagagcatgatacaaattccacagccttctgttcgctggaggatactccagccaccagttcggagggcagacagctgtatcctaaaagcaaccactgagaggccagcagtgaggctgcccatctccaaaacgaaacaacagatcaactggtatcagtctagaaggaccagctttggggtgctttgatcactatgaaaatgttcactggtttctgtcaatcacttggtcaaagttagttcctgtgattttttttttttttttttgagatggagttttgctcttgtcaccaggctgaagtgcagtggcgtgatcttggctcactgcaacctctgcctcctgagtagctggaattacaggtgcccgccaccatacccagctagtttttttgtatttttagtagagacagggtttcaccatgttggccaggctggtctcgaactcctgaccactgatccacccacctcggcctcccaaagtgctgggattacaggcatgagccaatgtgcctggccattcctgtgattttttagaatttttcacttttcatataaagttgcattttatcatgaggaaaatgttttggctgaaaaacatatgccccaaaaaaaaaaaaatcagttttcactatttttccagcttgcctagggaaacgtcctcccctgagcaaagtgggatgtgcatggctcttttttgtgattaagcaggcatcaaatgggcagttttcattttcactgacacagaaacatgtggctgaagcaggaataaaatcctgcctactgacttctgtctccattcttgctccaggtaaaatcagagaacctccccttcttggccctttaattcccccaggcagaggcggctccagctcctgttaagggccccagttttactcatgctacctgaccttagttttagtactttcaaatgtgatttgggtaaaaactattttgcaggcaaaagtgttaattttttataaatatgtataataaaaaagctataaaagtttttccttttcttgtatttttcaaatactccccaagacacaatccttgaaggtgaactaggtggcacttgattatgctaattgtgggagctactgaactatactgattaaattaaatgcttgcaggttcctgggtaattttcctttgtgaataacctggcgctacctgaatttttctctaacaaacatctccaatgagggtaaacaatgatcttgattctaatttatatgaggttaaaaaccttcagatttcgtattttgaattgttctccctagtttcctcagtggttacccccttttagtcagtaaccatctctgttcagaattcagtcttggcttttgaagaaatgggcacagagccaaaggacccatttcacagttcccttggaatatatttcccattgttggactgaggcaaacaaaaccaactgtgcaaatcacaagcaaaagagacttctgtccgtagttgcgagtgccatcagtgtgagcttaccagctacaaaaatctgtcatggactggggaacagtatgattccttattgaaactttcatcctcatcggctggcttgtcagcgttctgaagttaatatccatgctgcctgaaacaaatgttatgtttaactagcacttaacttttaaaattgcttaattctcctttcagatgcatgcactaagtcttctctgagcctgcagcaatattttagagggacctcttctaagtcagagccttgacattctactccaaaaggaagtccaaattagagcccataggctttttcttaaaagctgttaaggagtagtaagaaagttaccactctaaggaaaacatgaaactatctgaaagtcttctggttcctaactggatacagattagattattttaaatgagaaaaaagtgcaccgtagttacccgatcaagattggactgcctgtgtccctggcatgaattaaagaacctccatagttgcttgttcccttctgaaggtgtttcctatggcccacgagaattataaagcaatcactttttaagtctatcagtcaaccttaatagctctcaagagtttcgattatcaagctttaaagtgataacatatcaagatgactattaaaaaataaacatctctgaaagtgtcctttcctccataaggctttaaacaatttgcaaattcttaattgggagtatgtcccaatcattctattaaactatttacagctctacctacttctagattcagcaaacagagctactagttagagtattttgagagccaaaatagtaagagacttctgtaatggttgagatttctgcactgaccttaattagggtaccgccatagggctaccaaagtttttagtgagggctggggaggtggagcataagtaacattttttttctgcagaaggtgatggctttgtagaacactataaaatttttcaggaaaacatacagcaaattttcttatccagtgggaacagcctatttgacaaggaatgatatacaagtttgattcacctttgagcactcttatagagtttacagaagaggcgtaactggttacaaaacaaaagttacgccttcactatccagttcttaaagtttatccacatcctacaaatcttatgttcatgtaggtcaggttaaagtaagctccaaacttgtggccttcagaagcatctcctgtttaacacacctgaaattactctaacttaatacatttgtattctctaagaaataatgctgactgctgtcaccacagcatcactgatctctcagtggctgttaaaatataaacaagtggaaaaaaagtatacaagttgatagcagctgttcatgtattcttgttttgctaatacctgtgtagagaaagacagtttcacatgcagatcaccatacatttttgcttaaaggttacactgggtaaactgtttgtttatcacattacatctgggtgagattttgcatgtgaccaagaggaagaaatcattcagtcccggaaatagcaactgctatgtaaaaccacatccttgactagtacttcatctttccacagtcattcatctgctaatcaggtgaaatatcagctcagcagaacaaagcaagttatacacaaatttcccccacattcacactgatgccgtacttagtaattctggttctaccattcccttttgcactttttgcaagtcaaattcatgtggaaaaatgttctgtttgtagaactcatagtattcacttatagtgctcatgtcaggaatggcaagtgagtaagagcccctgataatctgcttttgttagaacgtaatgcaaagataataaaacatgtccacttcttttctagttctaatcagtttttagacatcaagatttatttactttgcatgagatttgtttcctattatttgaatatgtgctatacacttgaattagaaaaacctgcttgaatgtattgtcagttattaaagcacatgtgactaagtttgcatttgtcagtattgttctactgtttgtactgaaagtctcattttaaaattgctacttaacactgtactataccttgtaattttttagattctccacttgtattctttaaatgtttccagatgcctttagttttagctgctgtaagatagctactttgcgttatttgatatagaattgttttttaaaaactccatttatttatacagagacatttataatattttacaaacattcttatattctgaataaatatttctaattccacagtgtaccttaactgtgttatttaaagggtaaggctatccttctgtagaactgtgatatacatgcaggcaaatatcaaatccatgatgcttacatgaaatcaagagccctagtcaaagcaggggtctagaagtaagactattattagatcaaaatggccaaagaaccctcatttatagcccatttttagttggctttttaaaatttggcataaataggaagttatctattgaagagagtcttttcccctcttaaagaaagatcattaaaatggaatgtaatcaaggactggaaatgcaaggaagtcatataggac

SEQ ID NO: 61845 - DNA, 8222 bp, Homo sapiens
  misc_feature (1)..(1): n is a, c, g, or t
  misc_feature (4)..(4): n is a, c, g, or t
nganggggaaacttcggcgtgaagtgcagctccgctccggctccctctagctttctttccttctctggaatccgaggcgcggatcttcctcgccccaccgccctagttttttcgggagctcgccggtgccctctagggtgtcggctcgtgctgggaagtgccctccatcctggtaatggggggcggcgaggcaccgtaggagtggcgaggcggcgcccagggtggcactgccccggaacggggcgctgggtgcgcgcgggagggtccccgcgcgggctccgccgctgccgcagctgcgagcgcgccgcgccaccgagcctcctgcagcaatggctcgtccgtgaaacgcgagccacggctgctctttttaagagtgcctgcatcctccgtttgcgcttcgcaactgtcctgggtgaaaatggctgtctagactaaaatgtggcagaagggaccaagcagtggatattgagcctgtgaagtccaactcttaagctccgagacctgggggactgagagcccagctctgaaaagtgcatcatgaattccggagttgccatgaaatatggaaacgactcctcggccgagctgagtgagctccattcagcagccctggcatcactaaagggagatatagtggaacttaataaacgtctccagcaaacagagagggaacgggaccttctggaaaagaaattggccaaggcacagtgcgagcagtcccacctcatgagagagcatgaggatgtccaggagcgaacgacgcttcgctatgaggaacgcatcacagagctccacagcgtcattgcggagctcaacaagaagatagaccgtctgcaaggcaccaccatcagggaggaagatgagtactcagaactgcgatcagaactcagccagagccaacacgaggtcaacgaggactctcgaagcatggaccaagaccagacctctgtctctatccccgaaaaccagtctaccatggttactgctgacatggacaactgcagtgacctgaactcagaactgcagagggtgctgacagggctggagaatgttgtctgcggcaggaagaagagcagctgcagcctctccgtggccgaggtggacaggcacattgagcagctcaccacagccagcgagcactgtgacctggctattaagacagtcgaggagattgagggggtgcttggccgggacctgtatcccaacctggctgaagagaggtctcggtgggagaaggagctggctgggctgagggaagagaatgagagcctgactgccatgctgtgcagcaaagaggaagaactgaaccggactaaggccaccatgaatgccatccgggaagagcgggaccggctccggaggcgggtcagagagcttcaaactcgactacagagcgtgcaggccacaggtccctccagccctggccgcctcacttccaccaaccgcccgattaaccccagcactggggagctgagcacaagcagcagcagcaatgacattcccatcgccaagattgctgagagggtgaagctatcaaagacaaggtccgaatcgtcatcatctgatcggccagtcctgggctcagaaatcagtagcataggggtatccagcagtgtggctgaacacctggcccactcacttcaggactgctccaatatccaagagattttccaaacactctactcacacggatctgccatctcagaaagcaagattagagagtttgaggtggaaacagaacggctgaatagccggattgagcacctcaaatcccaaaatgacctcctgaccataaccttggaggaatgtaaaagcaatgctgagaggatgagcatgctggtgggaaaatacgaatccaatgccacagcgctgaggctggccttgcagtacagcgagcagtgcatcgaagcctacgaactcctcctggcgctggcagagagtgagcagagcctcatcctggggcagttccgagcggcgggcgtggggtcctcccctggagaccagtcgggggatgaaaacatcactcagatgctcaagcgagctcatgactgccggaagacagctgagaacgctgccaaggccctgctcatgaagctggacggcagctgtgggggagcctttgccgtggccggctgcagcgtgcagccctgggagagcctttcctccaacagccacaccagcacaaccagctccacagccagtagttgcgacaccgagttcactaaagaagacgagcagaggctgaaggattatatccagcagctcaagaatgacagggctgcggtcaagctgaccatgctggagctggaaagcatccacatcgatcctctcagctatgacgtcaagcctcggggagacagccagaggctggatctggaaaacgcagtgcttatgcaggagctcatggccatgaaggaggagatggccgagttgaaggcccagctctacctactggagaaagagaagaaggccctggagctgaagctgagcacgcgggaggcccaggagcaggcctacctggtgcacattgagcacctgaagtccgaggtggaggagcagaaggagcagcggatgcgatccctcagctccaccagcagcggcagcaaagataaacctggcaaggagtgtgctgatgctgcctccccagctctgtccctagctgaactcaggacaacgtgcagcgagaatgagctggctgcggagttcaccaacgccattcgtcgagaaaagaagttgaaggccagagttcaagagctggtgagtgccttggagagactcaccaagagcagtgaaatccgacatcagcaatctgcagagttcgtgaatgatctaaagcgggccaacagcaacctggtggctgcctatgagaaagcaaagaaaaagcatcaaaacaaactgaagaagttagagtcgcagatgatggccatggtggagagacatgagacccaagtgaggatgctcaagcaaagaatagctctgctagaggaggagaactccaggccacacaccaatgaaacttcgctttaatcagcactcacgcaccggagttctgcccatgggaagtaaactgcagcaggccactggggacagaagggcccatgtacttgttgggaggaggaggaaagggaaggctggcaggtaggtcggcacttggacaatggagtgccccaactcaacccttggggtgactggccatggtgacattgtggactgtatccagaggtgcccgctcttccctcctgggcccacaacagcgtgtaaacacatgttctgtgcctgctcagcagagcctcgtttctgctttcagcactcactctccccctcctcttctggtctggcggctgtgcatcagtgggatcccagacatttgtttctgtaagattttccattgtatcctctttttggtagatgctgggctcatcttctagaatctcgtttctcctctttcctcctgcttcatgggaaaacagacctgtgtgtgcctccagcatttaaaaggactgctgatttgtttactacagcaaggctttggtttccaagtcccgggtctcaactttaagatagaggcggccataagaggtgatctctgggagttataggtcatgggaagagcgtagacaggtgttacttacagtcccagatacactaaagttacaaacagaccaccaccaggactgtgcctgaacaattttgtattgagagaataaaaacttccttcaatcttcattttggaggcagggctgggaagggagcgctctcttgattctgggatttctccctctcagtggagccttattaatatccaagacttagagctgggaatctttttgatacctgtagtggaactaaaattctgtcaggggtttcttcaagagctgagaaacattattagcacttcccgccccagggcactacataattgctgttctgctgaatcaaatctcttccacatgggtgcatttgtagctctggacctgtctctacctaaggacaagacactgaggagatactgaacattttgcaaaacttatcacgcctacttaagagtgctgtgtaacccccagttcaagacttagctcctgttgtcatgacggggacagagtgagggaatggtagttaaggcttcttttttgcccccagatacatggtgatggttagcatatggtgcttaaaaggttaaatttcaagcaaaatgcttacagggctaggcagtaccaaagtaactgaattatttcaggaaggtcttcaatcttaaaacaaattcattattctttttcagttttacctcttctctctcagttctacactgatacacttgaaggaccatttactgtttttttctgtagcaccagagaatccatccaaagttccctatgaaaaatgtgttccattgccatagctgactacaaattaaagttgaggaggtttctgcatagagtctttatgtccataagctacgggtaggtctattttcagagcatgatacaaattccacagccttctgttcgctggaggatactccagccaccagttcggagggcagacagctgtatcctaaaagcaaccactgagaggccagcagtgaggctgcccatctccaaaacgaaacaacagatcaactggtatcagtctagaaggaccagctttggggtgctttgatcactatgaaaatgttcactggtttctgtcaatcacttggtcaaagttagttcctgtgattttttttttttttttttgagatggagttttgctcttgtcaccaggctgaagtgcagtggcgtgatcttggctcactgcaacctctgcctcctgagtagctggaattacaggtgcccgccaccatacccagctagtttttttgtatttttagtagagacagggtttcaccatgttggccaggctggtctcgaactcctgaccactgatccacccacctcggcctcccaaagtgctgggattacaggcatgagccaatgtgcctggccattcctgtgattttttagaatttttcacttttcatataaagttgcattttatcatgaggaaaatgttttggctgaaaaacatatgccccaaaaaaaaaaaaatcagttttcactatttttccagcttgcctagggaaacgtcctcccctgagcaaagtgggatgtgcatggctcttttttgtgattaagcaggcatcaaatgggcagttttcattttcactgacacagaaacatgtggctgaagcaggaataaaatcctgcctactgacttctgtctccattcttgctccaggtaaaatcagagaacctccccttcttggccctttaattcccccaggcagaggcggctccagctcctgttaagggccccagttttactcatgctacctgaccttagttttagtactttcaaatgtgatttgggtaaaaactattttgcaggcaaaagtgttaattttttataaatatgtataataaaaaagctataaaagtttttccttttcttgtatttttcaaatactccccaagacacaatccttgaaggtgaactaggtggcacttgattatgctaattgtgggagctactgaactatactgattaaattaaatgcttgcaggttcctgggtaattttcctttgtgaataacctggcgctacctgaatttttctctaacaaacatctccaatgagggtaaacaatgatcttgattctaatttatatgaggttaaaaaccttcagatttcgtattttgaattgttctccctagtttcctcagtggttacccccttttagtcagtaaccatctctgttcagaattcagtcttggcttttgaagaaatgggcacagagccaaaggacccatttcacagttcccttggaatatatttcccattgttggactgaggcaaacaaaaccaactgtgcaaatcacaagcaaaagagacttctgtccgtagttgcgagtgccatcagtgtgagcttaccagctacaaaaatctgtcatggactggggaacagtatgattccttattgaaactttcatcctcatcggctggcttgtcagcgttctgaagttaatatccatgctgcctgaaacaaatgttatgtttaactagcacttaacttttaaaattgcttaattctcctttcagatgcatgcactaagtcttctctgagcctgcagcaatattttagagggacctcttctaagtcagagccttgacattctactccaaaaggaagtccaaattagagcccataggctttttcttaaaagctgttaaggagtagtaagaaagttaccactctaaggaaaacatgaaactatctgaaagtcttctggttcctaactggatacagattagattattttaaatgagaaaaaagtgcaccgtagttacccgatcaagattggactgcctgtgtccctggcatgaattaaagaacctccatagttgcttgttcccttctgaaggtgtttcctatggcccacgagaattataaagcaatcactttttaagtctatcagtcaaccttaatagctctcaagagtttcgattatcaagctttaaagtgataacatatcaagatgactattaaaaaataaacatctctgaaagtgtcctttcctccataaggctttaaacaatttgcaaattcttaattgggagtatgtcccaatcattctattaaactatttacagctctacctacttctagattcagcaaacagagctactagttagagtattttgagagccaaaatagtaagagacttctgtaatggttgagatttctgcactgaccttaattagggtaccgccatagggctaccaaagtttttagtgagggctggggaggtggagcataagtaacattttttttctgcagaaggtgatggctttgtagaacactataaaatttttcaggaaaacatacagcaaattttcttatccagtgggaacagcctatttgacaaggaatgatatacaagtttgattcacctttgagcactcttatagagtttacagaagaggcgtaactggttacaaaacaaaagttacgccttcactatccagttcttaaagtttatccacatcctacaaatcttatgttcatgtaggtcaggttaaagtaagctccaaacttgtggccttcagaagcatctcctgtttaacacacctgaaattactctaacttaatacatttgtattctctaagaaataatgctgactgctgtcaccacagcatcactgatctctcagtggctgttaaaatataaacaagtggaaaaaaagtatacaagttgatagcagctgttcatgtattcttgttttgctaatacctgtgtagagaaagacagtttcacatgcagatcaccatacatttttgcttaaaggttacactgggtaaactgtttgtttatcacattacatctgggtgagattttgcatgtgaccaagaggaagaaatcattcagtcccggaaatagcaactgctatgtaaaaccacatccttgactagtacttcatctttccacagtcattcatctgctaatcaggtgaaatatcagctcagcagaacaaagcaagttatacacaaatttcccccacattcacactgatgccgtacttagtaattctggttctaccattcccttttgcactttttgcaagtcaaattcatgtggaaaaatgttctgtttgtagaactcatagtattcacttatagtgctcatgtcaggaatggcaagtgagtaagagcccctgataatctgcttttgttagaacgtaatgcaaagataataaaacatgtccacttcttttctagttctaatcagtttttagacatcaagatttatttactttgcatgagatttgtttcctattatttgaatatgtgctatacacttgaattagaaaaacctgcttgaatgtattgtcagttattaaagcacatgtgactaagtttgcatttgtcagtattgttctactgtttgtactgaaagtctcattttaaaattgctacttaacactgtactataccttgtaattttttagattctccacttgtattctttaaatgtttccagatgcctttagttttagctgctgtaagatagctactttgcgttatttgatatagaattgttttttaaaaactccatttatttatacagagacatttataatattttacaaacattcttatattctgaataaatatttctaattcca

SEQ ID NO: 61846 - DNA, 8168 bp, Homo sapiens
  misc_feature (1)..(1): n is a, c, g, or t
  misc_feature (4)..(4): n is a, c, g, or t
nganggggaaacttcggcgtgaagtgcagctccgctccggctccctctagctttctttccttctctggaatccgaggcgcggatcttcctcgccccaccgccctagttttttcgggagctcgccggtgccctctagggtgtcggctcgtgctgggaagtgccctccatcctggtaatggggggcggcgaggcaccgtaggagtggcgaggcggcgcccagggtggcactgccccggaacggggcgctgggtgcgcgcgggagggtccccgcgcgggctccgccgctgccgcagctgcgagcgcgccgcgccaccgagcctcctgcagcaatggctcgtccgtgaaacgcgagccacggctgctctttttaagagtgcctgcatcctccgtttgcgcttcgcaactgtcctgggtgaaaatggctgtctagactaaaatgtggcagaagggaccaagcagtggatattgagcctgtgaagtccaactcttaagctccgagacctgggggactgagagcccagctctgaaaagtgcatcatgaattccggagttgccatgaaatatggaaacgactcctcggccgagctgagtgagctccattcagcagccctggcatcactaaagggagatatagtggaacttaataaacgtctccagcaaacagagagggaacgggaccttctggaaaagaaattggccaaggcacagtgcgagcagtcccacctcatgagagagcatgaggatgtccaggagcgaacgacgcttcgctatgaggaacgcatcacagagctccacagcgtcattgcggagctcaacaagaagatagaccgtctgcaaggcaccaccatcagggaggaagatgagtactcagaactgcgatcagaactcagccagagccaacacgaggtcaacgaggactctcgaagcatggaccaagaccagacctctgtctctatccccgaaaaccagtctaccatggttactgctgacatggacaactgcagtgacctgaactcagaactgcagagggtgctgacagggctggagaatgttgtctgcggcaggaagaagagcagctgcagcctctccgtggccgaggtggacaggcacattgagcagctcaccacagccagcgagcactgtgacctggctattaagacagtcgaggagattgagggggtgcttggccgggacctgtatcccaacctggctgaagagaggtctcggtgggagaaggagctggctgggctgagggaagagaatgagagcctgactgccatgctgtgcagcaaagaggaagaactgaaccggactaaggccaccatgaatgccatccgggaagagcgggaccggctccggaggcgggtcagagagcttcaaactcgactacagagcgtgcaggccacaggtccctccagccctggccgcctcacttccaccaaccgcccgattaaccccagcactggggagctgagcacaagcagcagcagcaatgacattcccatcgccaagattgctgagagggtgaagctatcaaagacaaggtccgaatcgtcatcatctgatcggccagtcctgggctcagaaatcagtagcataggggtatccagcagtgtggctgaacacctggcccactcacttcaggactgctccaatatccaagagattttccaaacactctactcacacggatctgccatctcagaaagcaagattagagagtttgaggtggaaacagaacggctgaatagccggattgagcacctcaaatcccaaaatgacctcctgaccataaccttggaggaatgtaaaagcaatgctgagaggatgagcatgctggtgggaaaatacgaatccaatgccacagcgctgaggctggccttgcagtacagcgagcagtgcatcgaagcctacgaactcctcctggcgctggcagagagtgagcagagcctcatcctggggcagttccgagcggcgggcgtggggtcctcccctggagaccagtcgggggatgaaaacatcactcagatgctcaagcgagctcatgactgccggaagacagctgagaacgctgccaaggccctgctcatgaagctggacggcagctgtgggggagcctttgccgtggccggctgcagcgtgcagccctgggagagcctttcctccaacagccacaccagcacaaccagctccacagccagtagttgcgacaccgagttcactaaagaagacgagcagaggctgaaggattatatccagcagctcaagaatgacagggctgcggtcaagctgaccatgctggagctggaaagcatccacatcgatcctctcagctatgacgtcaagcctcggggagacagccagaggctggatctggaaaacgcagtgcttatgcaggagctcatggccatgaaggaggagatggccgagttgaaggcccagctctacctactggagaaagagaagaaggccctggagctgaagctgagcacgcgggaggcccaggagcaggcctacctggtgcacattgagcacctgaagtccgaggtggaggagcagaaggagcagcggatgcgatccctcagctccaccagcagcggcagcaaagataaacctggcaaggagtgtgctgatgctgcctccccagctctgtccctagctgaactcaggacaacgtgcagcgagaatgagctggctgcggagttcaccaacgccattcgtcgagaaaagaagttgaaggccagagttcaagagctggtgagtgccttggagagactcaccaagagcagtgaaatccgacatcagcaatctgcagagttcgtgaatgatctaaagcgggccaacagcaacctggtggctgcctatgagaaagcaaagaaaaagcatcaaaacaaactgaagaagttagagtcgcagatgatggccatggtggagagacatgagacccaagtgaggatgctcaagcaaagaatagctctgctagaggaggagaactccaggccacacaccaatgaaacttcgctttaatcagcactcacgcaccggagttctgcccatgggaagtaaactgcagcaggccactggggacagaagggcccatgtacttgttgggaggaggaggaaagggaaggctggcaggtaggtcggcacttggacaatggagtgccccaactcaacccttggggtgactggccatggtgacattgtggactgtatccagaggtgcccgctcttccctcctgggcccacaacagcgtgtaaacacatgttctgtgcctgctcagcagagcctcgtttctgctttcagcactcactctccccctcctcttctggtctggcggctgtgcatcagtgggatcccagacatttgtttctgtaagattttccattgtatcctctttttggtagatgctgggctcatcttctagaatctcgtttctcctctttcctcctgcttcatgggaaaacagacctgtgtgtgcctccagcatttaaaaggactgctgatttgtttactacagcaaggctttggtttccaagtcccgggtctcaactttaagatagaggcggccataagaggtgatctctgggagttataggtcatgggaagagcgtagacaggtgttacttacagtcccagatacactaaagttacaaacagaccaccaccaggactgtgcctgaacaattttgtattgagagaataaaaacttccttcaatcttcattttggaggcagggctgggaagggagcgctctcttgattctgggatttctccctctcagtggagccttattaatatccaagacttagagctgggaatctttttgatacctgtagtggaactaaaattctgtcaggggtttcttcaagagctgagaaacattattagcacttcccgccccagggcactacataattgctgttctgctgaatcaaatctcttccacatgggtgcatttgtagctctggacctgtctctacctaaggacaagacactgaggagatactgaacattttgcaaaacttatcacgcctacttaagagtgctgtgtaacccccagttcaagacttagctcctgttgtcatgacggggacagagtgagggaatggtagttaaggcttcttttttgcccccagatacatggtgatggttagcatatggtgcttaaaaggttaaatttcaagcaaaatgcttacagggctaggcagtaccaaagtaactgaattatttcaggaaggtcttcaatcttaaaacaaattcattattctttttcagttttacctcttctctctcagttctacactgatacacttgaaggaccatttactgtttttttctgtagcaccagagaatccatccaaagttccctatgaaaaatgtgttccattgccatagctgactacaaattaaagttgaggaggtttctgcatagagtctttatgtccataagctacgggtaggtctattttcagagcatgatacaaattccacagccttctgttcgctggaggatactccagccaccagttcggagggcagacagctgtatcctaaaagcaaccactgagaggccagcagtgaggctgcccatctccaaaacgaaacaacagatcaactggtatcagtctagaaggaccagctttggggtgctttgatcactatgaaaatgttcactggtttctgtcaatcacttggtcaaagttagttcctgtgattttttttttttttttttgagatggagttttgctcttgtcaccaggctgaagtgcagtggcgtgatcttggctcactgcaacctctgcctcctgagtagctggaattacaggtgcccgccaccatacccagctagtttttttgtatttttagtagagacagggtttcaccatgttggccaggctggtctcgaactcctgaccactgatccacccacctcggcctcccaaagtgctgggattacaggcatgagccaatgtgcctggccattcctgtgattttttagaatttttcacttttcatataaagttgcattttatcatgaggaaaatgttttggctgaaaaacatatgccccaaaaaaaaaaaaatcagttttcactatttttccagcttgcctagggaaacgtcctcccctgagcaaagtgggatgtgcatggctcttttttgtgattaagcaggcatcaaatgggcagttttcattttcactgacacagaaacatgtggctgaagcaggaataaaatcctgcctactgacttctgtctccattcttgctccaggtaaaatcagagaacctccccttcttggccctttaattcccccaggcagaggcggctccagctcctgttaagggccccagttttactcatgctacctgaccttagttttagtactttcaaatgtgatttgggtaaaaactattttgcaggcaaaagtgttaattttttataaatatgtataataaaaaagctataaaagtttttccttttcttgtatttttcaaatactccccaagacacaatccttgaaggtgaactaggtggcacttgattatgctaattgtgggagctactgaactatactgattaaattaaatgcttgcaggttcctgggtaattttcctttgtgaataacctggcgctacctgaatttttctctaacaaacatctccaatgagggtaaacaatgatcttgattctaatttatatgaggttaaaaaccttcagatttcgtattttgaattgttctccctagtttcctcagtggttacccccttttagtcagtaaccatctctgttcagaattcagtcttggcttttgaagaaatgggcacagagccaaaggacccatttcacagttcccttggaatatatttcccattgttggactgaggcaaacaaaaccaactgtgcaaatcacaagcaaaagagacttctgtccgtagttgcgagtgccatcagtgtgagcttaccagctacaaaaatctgtcatggactggggaacagtatgattccttattgaaactttcatcctcatcggctggcttgtcagcgttctgaagttaatatccatgctgcctgaaacaaatgttatgtttaactagcacttaacttttaaaattgcttaattctcctttcagatgcatgcactaagtcttctctgagcctgcagcaatattttagagggacctcttctaagtcagagccttgacattctactccaaaaggaagtccaaattagagcccataggctttttcttaaaagctgttaaggagtagtaagaaagttaccactctaaggaaaacatgaaactatctgaaagtcttctggttcctaactggatacagattagattattttaaatgagaaaaaagtgcaccgtagttacccgatcaagattggactgcctgtgtccctggcatgaattaaagaacctccatagttgcttgttcccttctgaaggtgtttcctatggcccacgagaattataaagcaatcactttttaagtctatcagtcaaccttaatagctctcaagagtttcgattatcaagctttaaagtgataacatatcaagatgactattaaaaaataaacatctctgaaagtgtcctttcctccataaggctttaaacaatttgcaaattcttaattgggagtatgtcccaatcattctattaaactatttacagctctacctacttctagattcagcaaacagagctactagttagagtattttgagagccaaaatagtaagagacttctgtaatggttgagatttctgcactgaccttaattagggtaccgccatagggctaccaaagtttttagtgagggctggggaggtggagcataagtaacattttttttctgcagaaggtgatggctttgtagaacactataaaatttttcaggaaaacatacagcaaattttcttatccagtgggaacagcctatttgacaaggaatgatatacaagtttgattcacctttgagcactcttatagagtttacagaagaggcgtaactggttacaaaacaaaagttacgccttcactatccagttcttaaagtttatccacatcctacaaatcttatgttcatgtaggtcaggttaaagtaagctccaaacttgtggccttcagaagcatctcctgtttaacacacctgaaattactctaacttaatacatttgtattctctaagaaataatgctgactgctgtcaccacagcatcactgatctctcagtggctgttaaaatataaacaagtggaaaaaaagtatacaagttgatagcagctgttcatgtattcttgttttgctaatacctgtgtagagaaagacagtttcacatgcagatcaccatacatttttgcttaaaggttacactgggtaaactgtttgtttatcacattacatctgggtgagattttgcatgtgaccaagaggaagaaatcattcagtcccggaaatagcaactgctatatcaggtgaaatatcagctcagcagaacaaagcaagttatacacaaatttcccccacattcacactgatgccgtacttagtaattctggttctaccattcccttttgcactttttgcaagtcaaattcatgtggaaaaatgttctgtttgtagaactcatagtattcacttatagtgctcatgtcaggaatggcaagtgagtaagagcccctgataatctgcttttgttagaacgtaatgcaaagataataaaacatgtccacttcttttctagttctaatcagtttttagacatcaagatttatttactttgcatgagatttgtttcctattatttgaatatgtgctatacacttgaattagaaaaacctgcttgaatgtattgtcagttattaaagcacatgtgactaagtttgcatttgtcagtattgttctactgtttgtactgaaagtctcattttaaaattgctacttaacactgtactataccttgtaattttttagattctccacttgtattctttaaatgtttccagatgcctttagttttagctgctgtaagatagctactttgcgttatttgatatagaattgttttttaaaaactccatttatttatacagagacatttataatattttacaaacattcttatattctgaataaatatttctaattcca

SEQ ID NO: 61847 - DNA, 6815 bp, Homo sapiens
  misc_feature (1)..(1): n is a, c, g, or t
  misc_feature (4)..(4): n is a, c, g, or t
nganggggaaacttcggcgtgaagtgcagctccgctccggctccctctagctttctttccttctctggaatccgaggcgcggatcttcctcgccccaccgccctagttttttcgggagctcgccggtgccctctagggtgtcggctcgtgctgggaagtgccctccatcctggtaatggggggcggcgaggcaccgtaggagtggcgaggcggcgcccagggtggcactgccccggaacggggcgctgggtgcgcgcgggagggtccccgcgcgggctccgccgctgccgcagctgcgagcgcgccgcgccaccgagcctcctgcagcaatggctcgtccgtgaaacgcgagccacggctgctctttttaagagtgcctgcatcctccgtttgcgcttcgcaactgtcctgggtgaaaatggctgtctagactaaaatgtggcagaagggaccaagcagtggatattgagcctgtgaagtccaactcttaagctccgagacctgggggactgagagcccagctctgaaaagtgcatcatgaattccggagttgccatgaaatatggaaacgactcctcggccgagctgagtgagctccattcagcagccctggcatcactaaagggagatatagtggaacttaataaacgtctccagcaaacagagagggaacgggaccttctggaaaagaaattggccaaggcacagtgcgagcagtcccacctcatgagagagcatgaggatgtccaggagcgaacgacgcttcgctatgaggaacgcatcacagagctccacagcgtcattgcggagctcaacaagaagatagaccgtctgcaaggcaccaccatcagggaggaagatgagtactcagaactgcgatcagaactcagccagagccaacacgaggtcaacgaggactctcgaagcatggaccaagaccagacctctgtctctatccccgaaaaccagtctaccatggttactgctgacatggacaactgcagtgacctgaactcagaactgcagagggtgctgacagggctggagaatgttgtctgcggcaggaagaagagcagctgcagcctctccgtggccgaggtggacaggcacattgagcagctcaccacagccagcgagcactgtgacctggctattaagacagtcgaggagattgagggggtgcttggccgggacctgtatcccaacctggctgaagagaggtctcggtgggagaaggagctggctgggctgagggaagagaatgagagcctgactgccatgctgtgcagcaaagaggaagaactgaaccggactaaggccaccatgaatgccatccgggaagagcgggaccggctccggaggcgggtcagagagcttcaaactcgactacagagcgtgcaggccacaggtccctccagccctggccgcctcacttccaccaaccgcccgattaaccccagcactggggagctgagcacaagcagcagcagcaatgacattcccatcgccaagattgctgagagggtgaagctatcaaagacaaggtccgaatcgtcatcatctgatcggccagtcctgggctcagaaatcagtagcataggggtatccagcagtgtggctgaacacctggcccactcacttcaggactgctccaatatccaagagattttccaaacactctactcacacggatctgccatctcagaaagcaagattagagagtttgaggtggaaacagaacggctgaatagccggattgagcacctcaaatcccaaaatgacctcctgaccataaccttggaggaatgtaaaagcaatgctgagaggatgagcatgctggtgggaaaatacgaatccaatgccacagcgctgaggctggccttgcagtacagcgagcagtgcatcgaagcctacgaactcctcctggcgctggcagagagtgagcagagcctcatcctggggcagttccgagcggcgggcgtggggtcctcccctggagaccagtcgggggatgaaaacatcactcagatgctcaagcgagctcatgactgccggaagacagctgagaacgctgccaaggccctgctcatgaagctggacggcagctgtgggggagcctttgccgtggccggctgcagcgtgcagccctgggagagcctttcctccaacagccacaccagcacaaccagctccacagccagtagttgcgacaccgagttcactaaagaagacgagcagaggctgaaggattatatccagcagctcaagaatgacagggctgcggtcaagctgaccatgctggagctggaaagcatccacatcgatcctctcagctatgacgtcaagcctcggggagacagccagaggctggatctggaaaacgcagtgcttatgcaggagctcatggccatgaaggaggagatggccgagttgaaggcccagctctacctactggagaaagagaagaaggccctggagctgaagctgagcacgcgggaggcccaggagcaggcctacctggtgcacattgagcacctgaagtccgaggtggaggagcagaaggagcagcggatgcgatccctcagctccaccagcagcggcagcaaagataaacctggcaaggagtgtgctgatgctgcctccccagctctgtccctagctgaactcaggacaacgtgcagcgagaatgagctggctgcggagttcaccaacgccattcgtcgagaaaagaagttgaaggccagagttcaagagctggtgagtgccttggagagactcaccaagagcagtgaaatccgacatcagcaatctgcagagttcgtgaatgatctaaagcgggccaacagcaacctggtggctgcctatgagaaagcaaagaaaaagcatcaaaacaaactgaagaagttagagtcgcagatgatggccatggtggagagacatgagacccaagtgaggatgctcaagcaaagaatagctctgctagaggaggagaactccaggccacacaccaatgaaacttcgctttaatcagcactcacgcaccggagttctgcccatgggaagtaaactgcagcaggccactggggacagaagggcccatgtacttgttgggaggaggaggaaagggaaggctggcaggtaggtcggcacttggacaatggagtgccccaactcaacccttggggtgactggccatggtgacattgtggactgtatccagaggtgcccgctcttccctcctgggcccacaacagcgtgtaaacacatgttctgtgcctgctcagcagagcctcgtttctgctttcagcactcactctccccctcctcttctggtctggcggctgtgcatcagtgggatcccagacatttgtttctgtaagattttccattgtatcctctttttggtagatgctgggctcatcttctagaatctcgtttctcctctttcctcctgcttcatgggaaaacagacctgtgtgtgcctccagcatttaaaaggactgctgatttgtttactacagcaaggctttggtttccaagtcccgggtctcaactttaagatagaggcggccataagaggtgatctctgggagttataggtcatgggaagagcgtagacaggtgttacttacagtcccagatacactaaagttacaaacagaccaccaccaggactgtgcctgaacaattttgtattgagagaataaaaacttccttcaatcttcattttggaggcagggctgggaagggagcgctctcttgattctgggatttctccctctcagtggagccttattaatatccaagacttagagctgggaatctttttgatacctgtagtggaactaaaattctgtcaggggtttcttcaagagctgagaaacattattagcacttcccgccccagggcactacataattgctgttctgctgaatcaaatctcttccacatgggtgcatttgtagctctggacctgtctctacctaaggacaagacactgaggagatactgaacattttgcaaaacttatcacgcctacttaagagtgctgtgtaacccccagttcaagacttagctcctgttgtcatgacggggacagagtgagggaatggtagttaaggcttcttttttgcccccagatacatggtgatggttagcatatggtgcttaaaaggttaaatttcaagcaaaatgcttacagggctaggcagtaccaaagtaactgaattatttcaggaaggtcttcaatcttaaaacaaattcattattctttttcagttttacctcttctctctcagttctacactgatacacttgaaggaccatttactgtttttttctgtagcaccagagaatccatccaaagttccctatgaaaaatgtgttccattgccatagctgactacaaattaaagttgaggaggtttctgcatagagtctttatgtccataagctacgggtaggtctattttcagagcatgatacaaattccacagccttctgttcgctggaggatactccagccaccagttcggagggcagacagctgtatcctaaaagcaaccactgagaggccagcagtgaggctgcccatctccaaaacgaaacaacagatcaactggtatcagtctagaaggaccagctttggggtgctttgatcactatgaaaatgttcactggtttctgtcaatcacttggtcaaagttagttcctgtgattttttttttttttttttgagatggagttttgctcttgtcaccaggctgaagtgcagtggcgtgatcttggctcactgcaacctctgcctcctgagtagctggaattacaggtgcccgccaccatacccagctagtttttttgtatttttagtagagacagggtttcaccatgttggccaggctggtctcgaactcctgaccactgatccacccacctcggcctcccaaagtgctgggattacaggcatgagccaatgtgcctggccattcctgtgattttttagaatttttcacttttcatataaagttgcattttatcatgaggaaaatgttttggctgaaaaacatatgccccaaaaaaaaaaaaatcagttttcactatttttccagcttgcctagggaaacgtcctcccctgagcaaagtgggatgtgcatggctcttttttgtgattaagcaggcatcaaatgggcagttttcattttcactgacacagaaacatgtggctgaagcaggaataaaatcctgcctactgacttctgtctccattcttgctccaggtaaaatcagagaacctccccttcttggccctttaattcccccaggcagaggcggctccagctcctgttaagggccccagttttactcatgctacctgaccttagttttagtactttcaaatgtgatttgggtaaaaactattttgcaggcaaaagtgttaattttttataaatatgtataataaaaaagctataaaagtttttccttttcttgtatttttcaaatactccccaagacacaatccttgaaggtgaactaggtggcacttgattatgctaattgtgggagctactgaactatactgattaaattaaatgcttgcaggttcctgggtaattttcctttgtgaataacctggcgctacctgaatttttctctaacaaacatctccaatgagggtaaacaatgatcttgattctaatttatatgaggttaaaaaccttcagatttcgtattttgaattgttctccctagtttcctcagtggttacccccttttagtcagtaaccatctctgttcagaattcagtcttggcttttgaagaaatgggcacagagccaaaggacccatttcacagttcccttggaatatatttcccattgttggactgaggcaaacaaaaccaactgtgcaaatcacaagcaaaagagacttctgtccgtagttgcgagtgccatcagtgtgagcttaccagctacaaaaatctgtcatggactggggaacagtatgattccttattgaaactttcatcctcatcggctggcttgtcagcgttctgaagttaatatccatgctgcctgaaacaaatgttatgtttaactagcacttaacttttaaaattgcttaattctcctttcagatgcatgcactaagtcttctctgagcctgcagcaatattttagagggacctcttctaagtcagagccttgacattctactccaaaaggaagtccaaattagagcccataggctttttcttaaaagctgttaaggagtagtaagaaagttaccactctaaggaaaacatgaaactatctgaaagtcttctggttcctaactggatacagattagattattttaaatgagaaaaaagtgcaccgtagttacccgatcaagattggactgcctgtgtccctggcatgaattaaagaacctccatagttgcttgttcccttctgaaggtgtttcctatggcccacgagaattataaagcaatcactttttaagtctatcagtcaaccttaatagctctcaagagtttcgattatcaagctttaaagtgataacatatcaagatgactattaaaaaataaacatctctgaaagtgtcctttcctccataaggctttaaacaatttgcaaattcttaattgggagtatgtcccaatcattctattaaactatttacagctctacctacttctagattcagcaaacagagctactagttagagtattttgagagccaaaatagtaggactcttaatgtgagatccgcactcctcatagggacccatagctccaagttgagtagcc

SEQ ID NO: 61848 - DNA, 6628 bp, Homo sapiens
atttaaagtttttattatttcatttacaaaaaaaaaaatggcatttttatgaaaaactattttccaagaaataattagaaaagtggcactggtcttacaattctgcaaatctttaatgtctggcttaatagaagacagctaggttctcacatttgcttctgtagtcaacattatgtggatgtatattgagaacacctggcatcatccagctctatagttggaaataaaagctcaagacctcacagacctcctgaatgggttttacaaatctctggggtgagtcctcagactatctgggagaactgcagctgtaagggtaatgactgtacatggaatggacctacctgggctcactgtataccctaccaccaggctctggtgggaacagttcaaaggcctgtatattccatgtttggctttgcagcattggcttatggcctaatttaatattccgagtcccaccagcccaaagcataaagggaaggtggaacaagaacaacctctctgctctcgtcccaggtatggtcactttgattgcagtgccttaggagtactctcctgtaagatacacttgactatggtgcaagcaaccatggagcaacaaatagacccactatttgtatttatccgttttggactgggccaatttggattgctggtttgactcttagaaccccttctaatatgtgagagtgaccagcctctagcaatccggctggattcatcagggttaagccagtaggtgactggccgttgagtgttgacatcctggtgctgtccctcctctgaccactagatttcagattcttaccgaagaggatgagtgatctttcttcagagcagtgctcactagatctggttatccagtggacaggatggtgtcacgatgctacttaggatgaatcttaataccaatttcccttcattcccacctagcaacctggtggctgcctatgagaaagcaaagaaaaagcatcaaaacaaactgaagaagttagagtcgcagatgatggccatggtggagagacatgagacccaagtgaggatgctcaagcaaagaatagctctgctagaggaggagaactccaggccacacaccaatgaaacttcgctttaatcagcactcacgcaccggagttctgcccatgggaagtaaactgcagcaggccactggggacagaagggcccatgtacttgttgggaggaggaggaaagggaaggctggcaggtaggtcggcacttggacaatggagtgccccaactcaacccttggggtgactggccatggtgacattgtggactgtatccagaggtgcccgctcttccctcctgggcccacaacagcgtgtaaacacatgttctgtgcctgctcagcagagcctcgtttctgctttcagcactcactctccccctcctcttctggtctggcggctgtgcatcagtgggatcccagacatttgtttctgtaagattttccattgtatcctctttttggtagatgctgggctcatcttctagaatctcgtttctcctctttcctcctgcttcatgggaaaacagacctgtgtgtgcctccagcatttaaaaggactgctgatttgtttactacagcaaggctttggtttccaagtcccgggtctcaactttaagatagaggcggccataagaggtgatctctgggagttataggtcatgggaagagcgtagacaggtgttacttacagtcccagatacactaaagttacaaacagaccaccaccaggactgtgcctgaacaattttgtattgagagaataaaaacttccttcaatcttcattttggaggcagggctgggaagggagcgctctcttgattctgggatttctccctctcagtggagccttattaatatccaagacttagagctgggaatctttttgatacctgtagtggaactaaaattctgtcaggggtttcttcaagagctgagaaacattattagcacttcccgccccagggcactacataattgctgttctgctgaatcaaatctcttccacatgggtgcatttgtagctctggacctgtctctacctaaggacaagacactgaggagatactgaacattttgcaaaacttatcacgcctacttaagagtgctgtgtaacccccagttcaagacttagctcctgttgtcatgacggggacagagtgagggaatggtagttaaggcttcttttttgcccccagatacatggtgatggttagcatatggtgcttaaaaggttaaatttcaagcaaaatgcttacagggctaggcagtaccaaagtaactgaattatttcaggaaggtcttcaatcttaaaacaaattcattattctttttcagttttacctcttctctctcagttctacactgatacacttgaaggaccatttactgtttttttctgtagcaccagagaatccatccaaagttccctatgaaaaatgtgttccattgccatagctgactacaaattaaagttgaggaggtttctgcatagagtctttatgtccataagctacgggtaggtctattttcagagcatgatacaaattccacagccttctgttcgctggaggatactccagccaccagttcggagggcagacagctgtatcctaaaagcaaccactgagaggccagcagtgaggctgcccatctccaaaacgaaacaacagatcaactggtatcagtctagaaggaccagctttggggtgctttgatcactatgaaaatgttcactggtttctgtcaatcacttggtcaaagttagttcctgtgattttttttttttttttttgagatggagttttgctcttgtcaccaggctgaagtgcagtggcgtgatcttggctcactgcaacctctgcctcctgagtagctggaattacaggtgcccgccaccatacccagctagtttttttgtatttttagtagagacagggtttcaccatgttggccaggctggtctcgaactcctgaccactgatccacccacctcggcctcccaaagtgctgggattacaggcatgagccaatgtgcctggccattcctgtgattttttagaatttttcacttttcatataaagttgcattttatcatgaggaaaatgttttggctgaaaaacatatgccccaaaaaaaaaaaaatcagttttcactatttttccagcttgcctagggaaacgtcctcccctgagcaaagtgggatgtgcatggctcttttttgtgattaagcaggcatcaaatgggcagttttcattttcactgacacagaaacatgtggctgaagcaggaataaaatcctgcctactgacttctgtctccattcttgctccaggtaaaatcagagaacctccccttcttggccctttaattcccccaggcagaggcggctccagctcctgttaagggccccagttttactcatgctacctgaccttagttttagtactttcaaatgtgatttgggtaaaaactattttgcaggcaaaagtgttaattttttataaatatgtataataaaaaagctataaaagtttttccttttcttgtatttttcaaatactccccaagacacaatccttgaaggtgaactaggtggcacttgattatgctaattgtgggagctactgaactatactgattaaattaaatgcttgcaggttcctgggtaattttcctttgtgaataacctggcgctacctgaatttttctctaacaaacatctccaatgagggtaaacaatgatcttgattctaatttatatgaggttaaaaaccttcagatttcgtattttgaattgttctccctagtttcctcagtggttacccccttttagtcagtaaccatctctgttcagaattcagtcttggcttttgaagaaatgggcacagagccaaaggacccatttcacagttcccttggaatatatttcccattgttggactgaggcaaacaaaaccaactgtgcaaatcacaagcaaaagagacttctgtccgtagttgcgagtgccatcagtgtgagcttaccagctacaaaaatctgtcatggactggggaacagtatgattccttattgaaactttcatcctcatcggctggcttgtcagcgttctgaagttaatatccatgctgcctgaaacaaatgttatgtttaactagcacttaacttttaaaattgcttaattctcctttcagatgcatgcactaagtcttctctgagcctgcagcaatattttagagggacctcttctaagtcagagccttgacattctactccaaaaggaagtccaaattagagcccataggctttttcttaaaagctgttaaggagtagtaagaaagttaccactctaaggaaaacatgaaactatctgaaagtcttctggttcctaactggatacagattagattattttaaatgagaaaaaagtgcaccgtagttacccgatcaagattggactgcctgtgtccctggcatgaattaaagaacctccatagttgcttgttcccttctgaaggtgtttcctatggcccacgagaattataaagcaatcactttttaagtctatcagtcaaccttaatagctctcaagagtttcgattatcaagctttaaagtgataacatatcaagatgactattaaaaaataaacatctctgaaagtgtcctttcctccataaggctttaaacaatttgcaaattcttaattgggagtatgtcccaatcattctattaaactatttacagctctacctacttctagattcagcaaacagagctactagttagagtattttgagagccaaaatagtaagagacttctgtaatggttgagatttctgcactgaccttaattagggtaccgccatagggctaccaaagtttttagtgagggctggggaggtggagcataagtaacattttttttctgcagaaggtgatggctttgtagaacactataaaatttttcaggaaaacatacagcaaattttcttatccagtgggaacagcctatttgacaaggaatgatatacaagtttgattcacctttgagcactcttatagagtttacagaagaggcgtaactggttacaaaacaaaagttacgccttcactatccagttcttaaagtttatccacatcctacaaatcttatgttcatgtaggtcaggttaaagtaagctccaaacttgtggccttcagaagcatctcctgtttaacacacctgaaattactctaacttaatacatttgtattctctaagaaataatgctgactgctgtcaccacagcatcactgatctctcagtggctgttaaaatataaacaagtggaaaaaaagtatacaagttgatagcagctgttcatgtattcttgttttgctaatacctgtgtagagaaagacagtttcacatgcagatcaccatacatttttgcttaaaggttacactgggtaaactgtttgtttatcacattacatctgggtgagattttgcatgtgaccaagaggaagaaatcattcagtcccggaaatagcaactgctatgtaaaaccacatccttgactagtacttcatctttccacagtcattcatctgctaatcaggtgaaatatcagctcagcagaacaaagcaagttatacacaaatttcccccacattcacactgatgccgtacttagtaattctggttctaccattcccttttgcactttttgcaagtcaaattcatgtggaaaaatgttctgtttgtagaactcatagtattcacttatagtgctcatgtcaggaatggcaagtgagtaagagcccctgataatctgcttttgttagaacgtaatgcaaagataataaaacatgtccacttcttttctagttctaatcagtttttagacatcaagatttatttactttgcatgagatttgtttcctattatttgaatatgtgctatacacttgaattagaaaaacctgcttgaatgtattgtcagttattaaagcacatgtgactaagtttgcatttgtcagtattgttctactgtttgtactgaaagtctcattttaaaattgctacttaacactgtactataccttgtaattttttagattctccacttgtattctttaaatgtttccagatgcctttagttttagctgctgtaagatagctactttgcgttatttgatatagaattgttttttaaaaactccatttatttatacagagacatttataatattttacaaacattcttatattctgaataaatatttctaattccacagtgtaccttaactgtgttatttaaagggtaaggctatccttctgtagaactgtgatatacatgcaggcaaatatcaaatccatgatgcttacatgaaatcaagagccctagtcaaagcaggggtctagaagtaagactattattagatcaaaatggccaaagaaccctcatttatagcccatttttagttggctttttaaaatttggcataaataggaagttatctattgaagagagtcttttcccctcttaaagaaagatcattaaaatggaatgtaatcaaggactggaaatgcaaggaagtcatataggac

SEQ ID NO: 61849 - DNA, 8022 bp, Homo sapiens
gcaggccgggggtatcagatctgctaacgtgcgtcgaacagagacgagagaacagagacttgatgaaatgagcatcagctccattcagcagccctggcatcactaaagggagatatagtggaacttaataaacgtctccagcaaacagagagggaacgggaccttctggaaaagaaattggccaaggcacagtgcgagcagtcccacctcatgagagagcatgaggatgtccaggagcgaacgacgcttcgctatgaggaacgcatcacagagctccacagcgtcattgcggagctcaacaagaagatagaccgtctgcaaggcaccaccatcagggaggaagatgagtactcagaactgcgatcagaactcagccagagccaacacgaggtcaacgaggactctcgaagcatggaccaagaccagacctctgtctctatccccgaaaaccagtctaccatggttactgctgacatggacaactgcagtgacctgaactcagaactgcagagggtgctgacagggctggagaatgttgtctgcggcaggaagaagagcagctgcagcctctccgtggccgaggtggacaggcacattgagcagctcaccacagccagcgagcactgtgacctggctattaagacagtcgaggagattgagggggtgcttggccgggacctgtatcccaacctggctgaagagaggtctcggtgggagaaggagctggctgggctgagggaagagaatgagagcctgactgccatgctgtgcagcaaagaggaagaactgaaccggactaaggccaccatgaatgccatccgggaagagcgggaccggctccggaggcgggtcagagagcttcaaactcgactacagagcgtgcaggccacaggtccctccagccctggccgcctcacttccaccaaccgcccgattaaccccagcactggggagctgagcacaagcagcagcagcaatgacattcccatcgccaagattgctgagagggtgaagctatcaaagacaaggtccgaatcgtcatcatctgatcggccagtcctgggctcagaaatcagtagcataggggtatccagcagtgtggctgaacacctggcccactcacttcaggactgctccaatatccaagagattttccaaacactctactcacacggatctgccatctcagaaagcaagattagagagtttgaggtggaaacagaacggctgaatagccggattgagcacctcaaatcccaaaatgacctcctgaccataaccttggaggaatgtaaaagcaatgctgagaggatgagcatgctggtgggaaaatacgaatccaatgccacagcgctgaggctggccttgcagtacagcgagcagtgcatcgaagcctacgaactcctcctggcgctggcagagagtgagcagagcctcatcctggggcagttccgagcggcgggcgtggggtcctcccctggagaccagtcgggggatgaaaacatcactcagatgctcaagcgagctcatgactgccggaagacagctgagaacgctgccaaggccctgctcatgaagctggacggcagctgtgggggagcctttgccgtggccggctgcagcgtgcagccctgggagagcctttcctccaacagccacaccagcacaaccagctccacagccagtagttgcgacaccgagttcactaaagaagacgagcagaggctgaaggattatatccagcagctcaagaatgacagggctgcggtcaagctgaccatgctggagctggaaagcatccacatcgatcctctcagctatgacgtcaagcctcggggagacagccagaggctggatctggaaaacgcagtgcttatgcaggagctcatggccatgaaggaggagatggccgagttgaaggcccagctctacctactggagaaagagaagaaggccctggagctgaagctgagcacgcgggaggcccaggagcaggcctacctggtgcacattgagcacctgaagtccgaggtggaggagcagaaggagcagcggatgcgatccctcagctccaccagcagcggcagcaaagataaacctggcaaggagtgtgctgatgctgcctccccagctctgtccctagctgaactcaggacaacgtgcagcgagaatgagctggctgcggagttcaccaacgccattcgtcgagaaaagaagttgaaggccagagttcaagagctggtgagtgccttggagagactcaccaagagcagtgaaatccgacatcagcaatctgcagagttcgtgaatgatctaaagcgggccaacagcaacctggtggctgcctatgagaaagcaaagaaaaagcatcaaaacaaactgaagaagttagagtcgcagatgatggccatggtggagagacatgagacccaagtgaggatgctcaagcaaagaatagctctgctagaggaggagaactccaggccacacaccaatgaaacttcgctttaatcagcactcacgcaccggagttctgcccatgggaagtaaactgcagcaggccactggggacagaagggcccatgtacttgttgggaggaggaggaaagggaaggctggcaggtaggtcggcacttggacaatggagtgccccaactcaacccttggggtgactggccatggtgacattgtggactgtatccagaggtgcccgctcttccctcctgggcccacaacagcgtgtaaacacatgttctgtgcctgctcagcagagcctcgtttctgctttcagcactcactctccccctcctcttctggtctggcggctgtgcatcagtgggatcccagacatttgtttctgtaagattttccattgtatcctctttttggtagatgctgggctcatcttctagaatctcgtttctcctctttcctcctgcttcatgggaaaacagacctgtgtgtgcctccagcatttaaaaggactgctgatttgtttactacagcaaggctttggtttccaagtcccgggtctcaactttaagatagaggcggccataagaggtgatctctgggagttataggtcatgggaagagcgtagacaggtgttacttacagtcccagatacactaaagttacaaacagaccaccaccaggactgtgcctgaacaattttgtattgagagaataaaaacttccttcaatcttcattttggaggcagggctgggaagggagcgctctcttgattctgggatttctccctctcagtggagccttattaatatccaagacttagagctgggaatctttttgatacctgtagtggaactaaaattctgtcaggggtttcttcaagagctgagaaacattattagcacttcccgccccagggcactacataattgctgttctgctgaatcaaatctcttccacatgggtgcatttgtagctctggacctgtctctacctaaggacaagacactgaggagatactgaacattttgcaaaacttatcacgcctacttaagagtgctgtgtaacccccagttcaagacttagctcctgttgtcatgacggggacagagtgagggaatggtagttaaggcttcttttttgcccccagatacatggtgatggttagcatatggtgcttaaaaggttaaatttcaagcaaaatgcttacagggctaggcagtaccaaagtaactgaattatttcaggaaggtcttcaatcttaaaacaaattcattattctttttcagttttacctcttctctctcagttctacactgatacacttgaaggaccatttactgtttttttctgtagcaccagagaatccatccaaagttccctatgaaaaatgtgttccattgccatagctgactacaaattaaagttgaggaggtttctgcatagagtctttatgtccataagctacgggtaggtctattttcagagcatgatacaaattccacagccttctgttcgctggaggatactccagccaccagttcggagggcagacagctgtatcctaaaagcaaccactgagaggccagcagtgaggctgcccatctccaaaacgaaacaacagatcaactggtatcagtctagaaggaccagctttggggtgctttgatcactatgaaaatgttcactggtttctgtcaatcacttggtcaaagttagttcctgtgattttttttttttttttttgagatggagttttgctcttgtcaccaggctgaagtgcagtggcgtgatcttggctcactgcaacctctgcctcctgagtagctggaattacaggtgcccgccaccatacccagctagtttttttgtatttttagtagagacagggtttcaccatgttggccaggctggtctcgaactcctgaccactgatccacccacctcggcctcccaaagtgctgggattacaggcatgagccaatgtgcctggccattcctgtgattttttagaatttttcacttttcatataaagttgcattttatcatgaggaaaatgttttggctgaaaaacatatgccccaaaaaaaaaaaaatcagttttcactatttttccagcttgcctagggaaacgtcctcccctgagcaaagtgggatgtgcatggctcttttttgtgattaagcaggcatcaaatgggcagttttcattttcactgacacagaaacatgtggctgaagcaggaataaaatcctgcctactgacttctgtctccattcttgctccaggtaaaatcagagaacctccccttcttggccctttaattcccccaggcagaggcggctccagctcctgttaagggccccagttttactcatgctacctgaccttagttttagtactttcaaatgtgatttgggtaaaaactattttgcaggcaaaagtgttaattttttataaatatgtataataaaaaagctataaaagtttttccttttcttgtatttttcaaatactccccaagacacaatccttgaaggtgaactaggtggcacttgattatgctaattgtgggagctactgaactatactgattaaattaaatgcttgcaggttcctgggtaattttcctttgtgaataacctggcgctacctgaatttttctctaacaaacatctccaatgagggtaaacaatgatcttgattctaatttatatgaggttaaaaaccttcagatttcgtattttgaattgttctccctagtttcctcagtggttacccccttttagtcagtaaccatctctgttcagaattcagtcttggcttttgaagaaatgggcacagagccaaaggacccatttcacagttcccttggaatatatttcccattgttggactgaggcaaacaaaaccaactgtgcaaatcacaagcaaaagagacttctgtccgtagttgcgagtgccatcagtgtgagcttaccagctacaaaaatctgtcatggactggggaacagtatgattccttattgaaactttcatcctcatcggctggcttgtcagcgttctgaagttaatatccatgctgcctgaaacaaatgttatgtttaactagcacttaacttttaaaattgcttaattctcctttcagatgcatgcactaagtcttctctgagcctgcagcaatattttagagggacctcttctaagtcagagccttgacattctactccaaaaggaagtccaaattagagcccataggctttttcttaaaagctgttaaggagtagtaagaaagttaccactctaaggaaaacatgaaactatctgaaagtcttctggttcctaactggatacagattagattattttaaatgagaaaaaagtgcaccgtagttacccgatcaagattggactgcctgtgtccctggcatgaattaaagaacctccatagttgcttgttcccttctgaaggtgtttcctatggcccacgagaattataaagcaatcactttttaagtctatcagtcaaccttaatagctctcaagagtttcgattatcaagctttaaagtgataacatatcaagatgactattaaaaaataaacatctctgaaagtgtcctttcctccataaggctttaaacaatttgcaaattcttaattgggagtatgtcccaatcattctattaaactatttacagctctacctacttctagattcagcaaacagagctactagttagagtattttgagagccaaaatagtaagagacttctgtaatggttgagatttctgcactgaccttaattagggtaccgccatagggctaccaaagtttttagtgagggctggggaggtggagcataagtaacattttttttctgcagaaggtgatggctttgtagaacactataaaatttttcaggaaaacatacagcaaattttcttatccagtgggaacagcctatttgacaaggaatgatatacaagtttgattcacctttgagcactcttatagagtttacagaagaggcgtaactggttacaaaacaaaagttacgccttcactatccagttcttaaagtttatccacatcctacaaatcttatgttcatgtaggtcaggttaaagtaagctccaaacttgtggccttcagaagcatctcctgtttaacacacctgaaattactctaacttaatacatttgtattctctaagaaataatgctgactgctgtcaccacagcatcactgatctctcagtggctgttaaaatataaacaagtggaaaaaaagtatacaagttgatagcagctgttcatgtattcttgttttgctaatacctgtgtagagaaagacagtttcacatgcagatcaccatacatttttgcttaaaggttacactgggtaaactgtttgtttatcacattacatctgggtgagattttgcatgtgaccaagaggaagaaatcattcagtcccggaaatagcaactgctatgtaaaaccacatccttgactagtacttcatctttccacagtcattcatctgctaatcaggtgaaatatcagctcagcagaacaaagcaagttatacacaaatttcccccacattcacactgatgccgtacttagtaattctggttctaccattcccttttgcactttttgcaagtcaaattcatgtggaaaaatgttctgtttgtagaactcatagtattcacttatagtgctcatgtcaggaatggcaagtgagtaagagcccctgataatctgcttttgttagaacgtaatgcaaagataataaaacatgtccacttcttttctagttctaatcagtttttagacatcaagatttatttactttgcatgagatttgtttcctattatttgaatatgtgctatacacttgaattagaaaaacctgcttgaatgtattgtcagttattaaagcacatgtgactaagtttgcatttgtcagtattgttctactgtttgtactgaaagtctcattttaaaattgctacttaacactgtactataccttgtaattttttagattctccacttgtattctttaaatgtttccagatgcctttagttttagctgctgtaagatagctactttgcgttatttgatatagaattgttttttaaaaactccatttatttatacagagacatttataatattttacaaacattcttatattctgaataaatatttctaattccacagtgtaccttaactgtgttatttaaagggtaaggctatccttctgtagaactgtgatatacatgcaggcaaatatcaaatccatgatgcttacatgaaatcaagagccctagtcaaagcaggggtctagaagtaagactattattagatcaaaatggccaaagaaccctcatttatagcccatttttagttggctttttaaaatttggcataaataggaagttatctattgaagagagtcttttcccctcttaaagaaagatcattaaaatggaatgtaatcaaggactggaaatgcaaggaagtcatataggac

SEQ ID NO: 61850 - DNA, 6139 bp, Homo sapiens
ccccaccgcactggccagtctgcaaaaggagccagcggtctgggagcagaggggcctctttggcttgctgccaggctttcccctttggcgtgacctgagggcgccacccggtgcccacactgctgccatcactgcacgagccacctaccgcgctctgctgcaggcttccagggtgctgccggcttggattcaggcctaactggaatgtgtttgctgttgtcaggagtgtgctgatgctgcctccccagctctgtccctagctgaactcaggacaacgtgcagcgagaatgagctggctgcggagttcaccaacgccattcgtcgagaaaagaagttgaaggccagagttcaagagctggtgagtgccttggagagactcaccaagagcagtgaaatccgacatcagcaatctgcagagttcgtgaatgatctaaagcgggccaacagcaacctggtggctgcctatgagaaagcaaagaaaaagcatcaaaacaaactgaagaagttagagtcgcagatgatggccatggtggagagacatgagacccaagtgaggatgctcaagcaaagaatagctctgctagaggaggagaactccaggccacacaccaatgaaacttcgctttaatcagcactcacgcaccggagttctgcccatgggaagtaaactgcagcaggccactggggacagaagggcccatgtacttgttgggaggaggaggaaagggaaggctggcaggtaggtcggcacttggacaatggagtgccccaactcaacccttggggtgactggccatggtgacattgtggactgtatccagaggtgcccgctcttccctcctgggcccacaacagcgtgtaaacacatgttctgtgcctgctcagcagagcctcgtttctgctttcagcactcactctccccctcctcttctggtctggcggctgtgcatcagtgggatcccagacatttgtttctgtaagattttccattgtatcctctttttggtagatgctgggctcatcttctagaatctcgtttctcctctttcctcctgcttcatgggaaaacagacctgtgtgtgcctccagcatttaaaaggactgctgatttgtttactacagcaaggctttggtttccaagtcccgggtctcaactttaagatagaggcggccataagaggtgatctctgggagttataggtcatgggaagagcgtagacaggtgttacttacagtcccagatacactaaagttacaaacagaccaccaccaggactgtgcctgaacaattttgtattgagagaataaaaacttccttcaatcttcattttggaggcagggctgggaagggagcgctctcttgattctgggatttctccctctcagtggagccttattaatatccaagacttagagctgggaatctttttgatacctgtagtggaactaaaattctgtcaggggtttcttcaagagctgagaaacattattagcacttcccgccccagggcactacataattgctgttctgctgaatcaaatctcttccacatgggtgcatttgtagctctggacctgtctctacctaaggacaagacactgaggagatactgaacattttgcaaaacttatcacgcctacttaagagtgctgtgtaacccccagttcaagacttagctcctgttgtcatgacggggacagagtgagggaatggtagttaaggcttcttttttgcccccagatacatggtgatggttagcatatggtgcttaaaaggttaaatttcaagcaaaatgcttacagggctaggcagtaccaaagtaactgaattatttcaggaaggtcttcaatcttaaaacaaattcattattctttttcagttttacctcttctctctcagttctacactgatacacttgaaggaccatttactgtttttttctgtagcaccagagaatccatccaaagttccctatgaaaaatgtgttccattgccatagctgactacaaattaaagttgaggaggtttctgcatagagtctttatgtccataagctacgggtaggtctattttcagagcatgatacaaattccacagccttctgttcgctggaggatactccagccaccagttcggagggcagacagctgtatcctaaaagcaaccactgagaggccagcagtgaggctgcccatctccaaaacgaaacaacagatcaactggtatcagtctagaaggaccagctttggggtgctttgatcactatgaaaatgttcactggtttctgtcaatcacttggtcaaagttagttcctgtgattttttttttttttttttgagatggagttttgctcttgtcaccaggctgaagtgcagtggcgtgatcttggctcactgcaacctctgcctcctgagtagctggaattacaggtgcccgccaccatacccagctagtttttttgtatttttagtagagacagggtttcaccatgttggccaggctggtctcgaactcctgaccactgatccacccacctcggcctcccaaagtgctgggattacaggcatgagccaatgtgcctggccattcctgtgattttttagaatttttcacttttcatataaagttgcattttatcatgaggaaaatgttttggctgaaaaacatatgccccaaaaaaaaaaaaatcagttttcactatttttccagcttgcctagggaaacgtcctcccctgagcaaagtgggatgtgcatggctcttttttgtgattaagcaggcatcaaatgggcagttttcattttcactgacacagaaacatgtggctgaagcaggaataaaatcctgcctactgacttctgtctccattcttgctccaggtaaaatcagagaacctccccttcttggccctttaattcccccaggcagaggcggctccagctcctgttaagggccccagttttactcatgctacctgaccttagttttagtactttcaaatgtgatttgggtaaaaactattttgcaggcaaaagtgttaattttttataaatatgtataataaaaaagctataaaagtttttccttttcttgtatttttcaaatactccccaagacacaatccttgaaggtgaactaggtggcacttgattatgctaattgtgggagctactgaactatactgattaaattaaatgcttgcaggttcctgggtaattttcctttgtgaataacctggcgctacctgaatttttctctaacaaacatctccaatgagggtaaacaatgatcttgattctaatttatatgaggttaaaaaccttcagatttcgtattttgaattgttctccctagtttcctcagtggttacccccttttagtcagtaaccatctctgttcagaattcagtcttggcttttgaagaaatgggcacagagccaaaggacccatttcacagttcccttggaatatatttcccattgttggactgaggcaaacaaaaccaactgtgcaaatcacaagcaaaagagacttctgtccgtagttgcgagtgccatcagtgtgagcttaccagctacaaaaatctgtcatggactggggaacagtatgattccttattgaaactttcatcctcatcggctggcttgtcagcgttctgaagttaatatccatgctgcctgaaacaaatgttatgtttaactagcacttaacttttaaaattgcttaattctcctttcagatgcatgcactaagtcttctctgagcctgcagcaatattttagagggacctcttctaagtcagagccttgacattctactccaaaaggaagtccaaattagagcccataggctttttcttaaaagctgttaaggagtagtaagaaagttaccactctaaggaaaacatgaaactatctgaaagtcttctggttcctaactggatacagattagattattttaaatgagaaaaaagtgcaccgtagttacccgatcaagattggactgcctgtgtccctggcatgaattaaagaacctccatagttgcttgttcccttctgaaggtgtttcctatggcccacgagaattataaagcaatcactttttaagtctatcagtcaaccttaatagctctcaagagtttcgattatcaagctttaaagtgataacatatcaagatgactattaaaaaataaacatctctgaaagtgtcctttcctccataaggctttaaacaatttgcaaattcttaattgggagtatgtcccaatcattctattaaactatttacagctctacctacttctagattcagcaaacagagctactagttagagtattttgagagccaaaatagtaagagacttctgtaatggttgagatttctgcactgaccttaattagggtaccgccatagggctaccaaagtttttagtgagggctggggaggtggagcataagtaacattttttttctgcagaaggtgatggctttgtagaacactataaaatttttcaggaaaacatacagcaaattttcttatccagtgggaacagcctatttgacaaggaatgatatacaagtttgattcacctttgagcactcttatagagtttacagaagaggcgtaactggttacaaaacaaaagttacgccttcactatccagttcttaaagtttatccacatcctacaaatcttatgttcatgtaggtcaggttaaagtaagctccaaacttgtggccttcagaagcatctcctgtttaacacacctgaaattactctaacttaatacatttgtattctctaagaaataatgctgactgctgtcaccacagcatcactgatctctcagtggctgttaaaatataaacaagtggaaaaaaagtatacaagttgatagcagctgttcatgtattcttgttttgctaatacctgtgtagagaaagacagtttcacatgcagatcaccatacatttttgcttaaaggttacactgggtaaactgtttgtttatcacattacatctgggtgagattttgcatgtgaccaagaggaagaaatcattcagtcccggaaatagcaactgctatgtaaaaccacatccttgactagtacttcatctttccacagtcattcatctgctaatcaggtgaaatatcagctcagcagaacaaagcaagttatacacaaatttcccccacattcacactgatgccgtacttagtaattctggttctaccattcccttttgcactttttgcaagtcaaattcatgtggaaaaatgttctgtttgtagaactcatagtattcacttatagtgctcatgtcaggaatggcaagtgagtaagagcccctgataatctgcttttgttagaacgtaatgcaaagataataaaacatgtccacttcttttctagttctaatcagtttttagacatcaagatttatttactttgcatgagatttgtttcctattatttgaatatgtgctatacacttgaattagaaaaacctgcttgaatgtattgtcagttattaaagcacatgtgactaagtttgcatttgtcagtattgttctactgtttgtactgaaagtctcattttaaaattgctacttaacactgtactataccttgtaattttttagattctccacttgtattctttaaatgtttccagatgcctttagttttagctgctgtaagatagctactttgcgttatttgatatagaattgttttttaaaaactccatttatttatacagagacatttataatattttacaaacattcttatattctgaataaatatttctaattccacagtgtaccttaactgtgttatttaaagggtaaggctatccttctgtagaactgtgatatacatgcaggcaaatatcaaatccatgatgcttacatgaaatcaagagccctagtcaaagcaggggtctagaagtaagactattattagatcaaaatggccaaagaaccctcatttatagcccatttttagttggctttttaaaatttggcataaataggaagttatctattgaagagagtcttttcccctcttaaagaaagatcattaaaatggaatgtaatcaaggactggaaatgcaaggaagtcatataggac

SEQ ID NO: 61851 - DNA, 2261 bp, Homo sapiens
ctagttacaataagtctgtcatgcactgcagaactaaattaacttcctttttggtaacggtcatcctcactacatctgagtcgtaatcgtagctgaagcttctatacacgctctctaacactaatgttatgtactcgtagcacttaacttttaaaattgcttaattctcctttcagatgcatgcactaagtcttctctgagcctgcagcaatattttagagggacctcttctaagtcagagccttgacattctactccaaaaggaagtccaaattagagcccataggctttttcttaaaagctgttaaggagtagtaagaaagttaccactctaaggaaaacatgaaactatctgaaagtcttctggttcctaactggatacagattagattattttaaatgagaaaaaagtgcaccgtagttacccgatcaagattggactgcctgtgtccctggcatgaattaaagaacctccatagttgcttgttcccttctgaaggtgtttcctatggcccacgagaattataaagcaatcactttttaagtctatcagtcaaccttaatagctctcaagagtttcgattatcaagctttaaagtgataacatatcaagatgactattaaaaaataaacatctctgaaagtgtcctttcctccataaggctttaaacaatttgcaaattcttaattgggagtatgtcccaatcattctattaaactatttacagctctacctacttctagattcagcaaacagagctactagttagagtattttgagagccaaaatagtaagagacttctgtaatggttgagatttctgcactgaccttaattagggtaccgccatagggctaccaaagtttttagtgagggctggggaggtggagcataagtaacattttttttctgcagaaggtgatggctttgtagaacactataaaatttttcaggaaaacatacagcaaattttcttatccagtgggaacagcctatttgacaaggaatgatatacaagtttgattcacctttgagcactcttatagagtttacagaagaggcgtaactggttacaaaacaaaagttacgccttcactatccagttcttaaagtttatccacatcctacaaatcttatgttcatgtaggtcaggttaaagtaagctccaaacttgtggccttcagaagcatctcctgtttaacacacctgaaattactctaacttaatacatttgtattctctaagaaataatgctgactgctgtcaccacagcatcactgatctctcagtggctgttaaaatataaacaagtggaaaaaaagtatacaagttgatagcagctgttcatgtattcttgttttgctaatacctgtgtagagaaagacagtttcacatgcagatcaccatacatttttgcttaaaggttacactgggtaaactgtttgtttatcacattacatctgggtgagattttgcatgtgaccaagaggaagaaatcattcagtcccggaaatagcaactgctatgtaaaaccacatccttgactagtacttcatctttccacagtcattcatctgctaatcaggtgaaatatcagctcagcagaacaaagcaagttatacacaaatttcccccacattcacactgatgccgtacttagtaattctggttctaccattcccttttgcactttttgcaagtcaaattcatgtggaaaaatgttctgtttgtagaactcatagtattcacttatagtgctcatgtcaggaatggcaagtgagtaagagcccctgataatctgcttttgttagaacgtaatgcaaagataataaaacatgtccacttcttttctagttctaatcagtttttagacatcaagatttatttactttgcatgagatttgtttcctattatttgaatatgtgctatacacttgaattagaaaaacctgcttgaatgtattgtcagttattaaagcacatgtgactaagtttgcatttgtcagtattgttctactgtttgtactgaaagtctcattttaaaattgctacttaacactgtactataccttgtaattttttagattctccacttgtattctttaaatgtttccagatgcctttagttttagctgctgtaagatagctactttgcgttatttgatatagaattgttttttaaaaactccatttatttatacagagacatttataatattttacaaacattcttatattctgaataaatatttctaattcca

SEQ ID NO: 61852 - DNA, 585 bp, Homo sapiens
aaagaagtggacatgttttattatctttgcattacgttctaacaaaagcagattatcaggggctcgtattcacttatagtgctcatgtcaggaatggcaagtgagtaagagcccctgataatctgcttttgttagaacgtaatgcaaagataataaaacatgtccacttcttttctagttctaatcagtttttagacatcaagatttatttactttgcatgagatttgtttcctattatttgaatatgtgctatacacttgaattagaaaaacctgcttgaatgtattgtcagttattaaagcacatgtgactaagtttgcatttgtcagtattgttctactgtttgtactgaaagtctcattttaaaattgctacttaacactgtactataccttgtaattttttagattctccacttgtattctttaaatgtttccagatgcctttagttttagctgctgtaagatagctactttgcgttatttgatatagaattgttttttaaaaactccatttatttatacagagacatttataatattttacaaacattcttatattctgaataaatatttctaattcca

SEQ ID NO: 61853 - DNA, 8168 bp, Homo sapiens
  misc_feature (1)..(1): n is a, c, g, or t
  misc_feature (4)..(4): n is a, c, g, or t
nganggggaaacttcggcgtgaagtgcagctccgctccggctccctctagctttctttccttctctggaatccgaggcgcggatcttcctcgccccaccgccctagttttttcgggagctcgccggtgccctctagggtgtcggctcgtgctgggaagtgccctccatcctggtaatggggggcggcgaggcaccgtaggagtggcgaggcggcgcccagggtggcactgccccggaacggggcgctgggtgcgcgcgggagggtccccgcgcgggctccgccgctgccgcagctgcgagcgcgccgcgccaccgagcctcctgcagcaatggctcgtccgtgaaacgcgagccacggctgctctttttaagagtgcctgcatcctccgtttgcgcttcgcaactgtcctgggtgaaaatggctgtctagactaaaatgtggcagaagggaccaagcagtggatattgagcctgtgaagtccaactcttaagctccgagacctgggggactgagagcccagctctgaaaagtgcatcatgaattccggagttgccatgaaatatggaaacgactcctcggccgagctgagtgagctccattcagcagccctggcatcactaaagggagatatagtggaacttaataaacgtctccagcaaacagagagggaacgggaccttctggaaaagaaattggccaaggcacagtgcgagcagtcccacctcatgagagagcatgaggatgtccaggagcgaacgacgcttcgctatgaggaacgcatcacagagctccacagcgtcattgcggagctcaacaagaagatagaccgtctgcaaggcaccaccatcagggaggaagatgagtactcagaactgcgatcagaactcagccagagccaacacgaggtcaacgaggactctcgaagcatggaccaagaccagacctctgtctctatccccgaaaaccagtctaccatggttactgctgacatggacaactgcagtgacctgaactcagaactgcagagggtgctgacagggctggagaatgttgtctgcggcaggaagaagagcagctgcagcctctccgtggccgaggtggacaggcacattgagcagctcaccacagccagcgagcactgtgacctggctattaagacagtcgaggagattgagggggtgcttggccgggacctgtatcccaacctggctgaagagaggtctcggtgggagaaggagctggctgggctgagggaagagaatgagagcctgactgccatgctgtgcagcaaagaggaagaactgaaccggactaaggccaccatgaatgccatccgggaagagcgggaccggctccggaggcgggtcagagagcttcaaactcgactacagagcgtgcaggccacaggtccctccagccctggccgcctcacttccaccaaccgcccgattaaccccagcactggggagctgagcacaagcagcagcagcaatgacattcccatcgccaagattgctgagagggtgaagctatcaaagacaaggtccgaatcgtcatcatctgatcggccagtcctgggctcagaaatcagtagcataggggtatccagcagtgtggctgaacacctggcccactcacttcaggactgctccaatatccaagagattttccaaacactctactcacacggatctgccatctcagaaagcaagattagagagtttgaggtggaaacagaacggctgaatagccggattgagcacctcaaatcccaaaatgacctcctgaccataaccttggaggaatgtaaaagcaatgctgagaggatgagcatgctggtgggaaaatacgaatccaatgccacagcgctgaggctggccttgcagtacagcgagcagtgcatcgaagcctacgaactcctcctggcgctggcagagagtgagcagagcctcatcctggggcagttccgagcggcgggcgtggggtcctcccctggagaccagtcgggggatgaaaacatcactcagatgctcaagcgagctcatgactgccggaagacagctgagaacgctgccaaggccctgctcatgaagctggacggcagctgtgggggagcctttgccgtggccggctgcagcgtgcagccctgggagagcctttcctccaacagccacaccagcacaaccagctccacagccagtagttgcgacaccgagttcactaaagaagacgagcagaggctgaaggattatatccagcagctcaagaatgacagggctgcggtcaagctgaccatgctggagctggaaagcatccacatcgatcctctcagctatgacgtcaagcctcggggagacagccagaggctggatctggaaaacgcagtgcttatgcaggagctcatggccatgaaggaggagatggccgagttgaaggcccagctctacctactggagaaagagaagaaggccctggagctgaagctgagcacgcgggaggcccaggagcaggcctacctggtgcacattgagcacctgaagtccgaggtggaggagcagaaggagcagcggatgcgatccctcagctccaccagcagcggcagcaaagataaacctggcaaggagtgtgctgatgctgcctccccagctctgtccctagctgaactcaggacaacgtgcagcgagaatgagctggctgcggagttcaccaacgccattcgtcgagaaaagaagttgaaggccagagttcaagagctggtgagtgccttggagagactcaccaagagcagtgaaatccgacatcagcaatctgcagagttcgtgaatgatctaaagcgggccaacagcaacctggtggctgcctatgagaaagcaaagaaaaagcatcaaaacaaactgaagaagttagagtcgcagatgatggccatggtggagagacatgagacccaagtgaggatgctcaagcaaagaatagctctgctagaggaggagaactccaggccacacaccaatgaaacttcgctttaatcagcactcacgcaccggagttctgcccatgggaagtaaactgcagcaggccactggggacagaagggcccatgtacttgttgggaggaggaggaaagggaaggctggcaggtaggtcggcacttggacaatggagtgccccaactcaacccttggggtgactggccatggtgacattgtggactgtatccagaggtgcccgctcttccctcctgggcccacaacagcgtgtaaacacatgttctgtgcctgctcagcagagcctcgtttctgctttcagcactcactctccccctcctcttctggtctggcggctgtgcatcagtgggatcccagacatttgtttctgtaagattttccattgtatcctctttttggtagatgctgggctcatcttctagaatctcgtttctcctctttcctcctgcttcatgggaaaacagacctgtgtgtgcctccagcatttaaaaggactgctgatttgtttactacagcaaggctttggtttccaagtcccgggtctcaactttaagatagaggcggccataagaggtgatctctgggagttataggtcatgggaagagcgtagacaggtgttacttacagtcccagatacactaaagttacaaacagaccaccaccaggactgtgcctgaacaattttgtattgagagaataaaaacttccttcaatcttcattttggaggcagggctgggaagggagcgctctcttgattctgggatttctccctctcagtggagccttattaatatccaagacttagagctgggaatctttttgatacctgtagtggaactaaaattctgtcaggggtttcttcaagagctgagaaacattattagcacttcccgccccagggcactacataattgctgttctgctgaatcaaatctcttccacatgggtgcatttgtagctctggacctgtctctacctaaggacaagacactgaggagatactgaacattttgcaaaacttatcacgcctacttaagagtgctgtgtaacccccagttcaagacttagctcctgttgtcatgacggggacagagtgagggaatggtagttaaggcttcttttttgcccccagatacatggtgatggttagcatatggtgcttaaaaggttaaatttcaagcaaaatgcttacagggctaggcagtaccaaagtaactgaattatttcaggaaggtcttcaatcttaaaacaaattcattattctttttcagttttacctcttctctctcagttctacactgatacacttgaaggaccatttactgtttttttctgtagcaccagagaatccatccaaagttccctatgaaaaatgtgttccattgccatagctgactacaaattaaagttgaggaggtttctgcatagagtctttatgtccataagctacgggtaggtctattttcagagcatgatacaaattccacagccttctgttcgctggaggatactccagccaccagttcggagggcagacagctgtatcctaaaagcaaccactgagaggccagcagtgaggctgcccatctccaaaacgaaacaacagatcaactggtatcagtctagaaggaccagctttggggtgctttgatcactatgaaaatgttcactggtttctgtcaatcacttggtcaaagttagttcctgtgattttttttttttttttttgagatggagttttgctcttgtcaccaggctgaagtgcagtggcgtgatcttggctcactgcaacctctgcctcctgagtagctggaattacaggtgcccgccaccatacccagctagtttttttgtatttttagtagagacagggtttcaccatgttggccaggctggtctcgaactcctgaccactgatccacccacctcggcctcccaaagtgctgggattacaggcatgagccaatgtgcctggccattcctgtgattttttagaatttttcacttttcatataaagttgcattttatcatgaggaaaatgttttggctgaaaaacatatgccccaaaaaaaaaaaaatcagttttcactatttttccagcttgcctagggaaacgtcctcccctgagcaaagtgggatgtgcatggctcttttttgtgattaagcaggcatcaaatgggcagttttcattttcactgacacagaaacatgtggctgaagcaggaataaaatcctgcctactgacttctgtctccattcttgctccaggtaaaatcagagaacctccccttcttggccctttaattcccccaggcagaggcggctccagctcctgttaagggccccagttttactcatgctacctgaccttagttttagtactttcaaatgtgatttgggtaaaaactattttgcaggcaaaagtgttaattttttataaatatgtataataaaaaagctataaaagtttttccttttcttgtatttttcaaatactccccaagacacaatccttgaaggtgaactaggtggcacttgattatgctaattgtgggagctactgaactatactgattaaattaaatgcttgcaggttcctgggtaattttcctttgtgaataacctggcgctacctgaatttttctctaacaaacatctccaatgagggtaaacaatgatcttgattctaatttatatgaggttaaaaaccttcagatttcgtattttgaattgttctccctagtttcctcagtggttacccccttttagtcagtaaccatctctgttcagaattcagtcttggcttttgaagaaatgggcacagagccaaaggacccatttcacagttcccttggaatatatttcccattgttggactgaggcaaacaaaaccaactgtgcaaatcacaagcaaaagagacttctgtccgtagttgcgagtgccatcagtgtgagcttaccagctacaaaaatctgtcatggactggggaacagtatgattccttattgaaactttcatcctcatcggctggcttgtcagcgttctgaagttaatatccatgctgcctgaaacaaatgttatgtttaactagcacttaacttttaaaattgcttaattctcctttcagatgcatgcactaagtcttctctgagcctgcagcaatattttagagggacctcttctaagtcagagccttgacattctactccaaaaggaagtccaaattagagcccataggctttttcttaaaagctgttaaggagtagtaagaaagttaccactctaaggaaaacatgaaactatctgaaagtcttctggttcctaactggatacagattagattattttaaatgagaaaaaagtgcaccgtagttacccgatcaagattggactgcctgtgtccctggcatgaattaaagaacctccatagttgcttgttcccttctgaaggtgtttcctatggcccacgagaattataaagcaatcactttttaagtctatcagtcaaccttaatagctctcaagagtttcgattatcaagctttaaagtgataacatatcaagatgactattaaaaaataaacatctctgaaagtgtcctttcctccataaggctttaaacaatttgcaaattcttaattgggagtatgtcccaatcattctattaaactatttacagctctacctacttctagattcagcaaacagagctactagttagagtattttgagagccaaaatagtaagagacttctgtaatggttgagatttctgcactgaccttaattagggtaccgccatagggctaccaaagtttttagtgagggctggggaggtggagcataagtaacattttttttctgcagaaggtgatggctttgtagaacactataaaatttttcagggatatacaagtttgattcacctttgagcactcttatagagtttacagaagaggcgtaactggttacaaaacaaaagttacgccttcactatccagttcttaaagtttatccacatcctacaaatcttatgttcatgtaggtcaggttaaagtaagctccaaacttgtggccttcagaagcatctcctgtttaacacacctgaaattactctaacttaatacatttgtattctctaagaaataatgctgactgctgtcaccacagcatcactgatctctcagtggctgttaaaatataaacaagtggaaaaaaagtatacaagttgatagcagctgttcatgtattcttgttttgctaatacctgtgtagagaaagacagtttcacatgcagatcaccatacatttttgcttaaaggttacactgggtaaactgtttgtttatcacattacatctgggtgagattttgcatgtgaccaagaggaagaaatcattcagtcccggaaatagcaactgctatgtaaaaccacatccttgactagtacttcatctttccacagtcattcatctgctaatcaggtgaaatatcagctcagcagaacaaagcaagttatacacaaatttcccccacattcacactgatgccgtacttagtaattctggttctaccattcccttttgcactttttgcaagtcaaattcatgtggaaaaatgttctgtttgtagaactcatagtattcacttatagtgctcatgtcaggaatggcaagtgagtaagagcccctgataatctgcttttgttagaacgtaatgcaaagataataaaacatgtccacttcttttctagttctaatcagtttttagacatcaagatttatttactttgcatgagatttgtttcctattatttgaatatgtgctatacacttgaattagaaaaacctgcttgaatgtattgtcagttattaaagcacatgtgactaagtttgcatttgtcagtattgttctactgtttgtactgaaagtctcattttaaaattgctacttaacactgtactataccttgtaattttttagattctccacttgtattctttaaatgtttccagatgcctttagttttagctgctgtaagatagctactttgcgttatttgatatagaattgttttttaaaaactccatttatttatacagagacatttataatattttacaaacattcttatattctgaataaatatttctaattcca

SEQ ID NO: 61854 - DNA, 6810 bp, Homo sapiens
  misc_feature (1)..(1): n is a, c, g, or t
  misc_feature (4)..(4): n is a, c, g, or t
nganggggaaacttcggcgtgaagtgcagctccgctccggctccctctagctttctttccttctctggaatccgaggcgcggatcttcctcgccccaccgccctagttttttcgggagctcgccggtgccctctagggtgtcggctcgtgctgggaagtgccctccatcctggtaatggggggcggcgaggcaccgtaggagtggcgaggcggcgcccagggtggcactgccccggaacggggcgctgggtgcgcgcgggagggtccccgcgcgggctccgccgctgccgcagctgcgagcgcgccgcgccaccgagcctcctgcagcaatggctcgtccgtgaaacgcgagccacggctgctctttttaagagtgcctgcatcctccgtttgcgcttcgcaactgtcctgggtgaaaatggctgtctagactaaaatgtggcagaagggaccaagcagtggatattgagcctgtgaagtccaactcttaagctccgagacctgggggactgagagcccagctctgaaaagtgcatcatgaattccggagttgccatgaaatatggaaacgactcctcggccgagctgagtgagctccattcagcagccctggcatcactaaagggagatatagtggaacttaataaacgtctccagcaaacagagagggaacgggaccttctggaaaagaaattggccaaggcacagtgcgagcagtcccacctcatgagagagcatgaggatgtccaggagcgaacgacgcttcgctatgaggaacgcatcacagagctccacagcgtcattgcggagctcaacaagaagatagaccgtctgcaaggcaccaccatcagggaggaagatgagtactcagaactgcgatcagaactcagccagagccaacacgaggtcaacgaggactctcgaagcatggaccaagaccagacctctgtctctatccccgaaaaccagtctaccatggttactgctgacatggacaactgcagtgacctgaactcagaactgcagagggtgctgacagggctggagaatgttgtctgcggcaggaagaagagcagctgcagcctctccgtggccgaggtggacaggcacattgagcagctcaccacagccagcgagcactgtgacctggctattaagacagtcgaggagattgagggggtgcttggccgggacctgtatcccaacctggctgaagagaggtctcggtgggagaaggagctggctgggctgagggaagagaatgagagcctgactgccatgctgtgcagcaaagaggaagaactgaaccggactaaggccaccatgaatgccatccgggaagagcgggaccggctccggaggcgggtcagagagcttcaaactcgactacagagcgtgcaggccacaggtccctccagccctggccgcctcacttccaccaaccgcccgattaaccccagcactggggagctgagcacaagcagcagcagcaatgacattcccatcgccaagattgctgagagggtgaagctatcaaagacaaggtccgaatcgtcatcatctgatcggccagtcctgggctcagaaatcagtagcataggggtatccagcagtgtggctgaacacctggcccactcacttcaggactgctccaatatccaagagattttccaaacactctactcacacggatctgccatctcagaaagcaagattagagagtttgaggtggaaacagaacggctgaatagccggattgagcacctcaaatcccaaaatgacctcctgaccataaccttggaggaatgtaaaagcaatgctgagaggatgagcatgctggtgggaaaatacgaatccaatgccacagcgctgaggctggccttgcagtacagcgagcagtgcatcgaagcctacgaactcctcctggcgctggcagagagtgagcagagcctcatcctggggcagttccgagcggcgggcgtggggtcctcccctggagaccagtcgggggatgaaaacatcactcagatgctcaagcgagctcatgactgccggaagacagctgagaacgctgccaaggccctgctcatgaagctggacggcagctgtgggggagcctttgccgtggccggctgcagcgtgcagccctgggagagcctttcctccaacagccacaccagcacaaccagctccacagccagtagttgcgacaccgagttcactaaagaagacgagcagaggctgaaggattatatccagcagctcaagaatgacagggctgcggtcaagctgaccatgctggagctggaaagcatccacatcgatcctctcagctatgacgtcaagcctcggggagacagccagaggctggatctggaaaacgcagtgcttatgcaggagctcatggccatgaaggaggagatggccgagttgaaggcccagctctacctactggagaaagagaagaaggccctggagctgaagctgagcacgcgggaggcccaggagcaggcctacctggtgcacattgagcacctgaagtccgaggtggaggagcagaaggagcagcggatgcgatccctcagctccaccagcagcggcagcaaagataaacctggcaaggagtgtgctgatgctgcctccccagctctgtccctagctgaactcaggacaacgtgcagcgagaatgagctggctgcggagttcaccaacgccattcgtcgagaaaagaagttgaaggccagagttcaagagctggtgagtgccttggagagactcaccaagagcagtgaaatccgacatcagcaatctgcagagttcgtgaatgatctaaagcgggccaacagcaacctggtggctgcctatgagaaagcaaagaaaaagcatcaaaacaaactgaagaagttagagtcgcagatgatggccatggtggagagacatgagacccaagtgaggatgctcaagcaaagaatagctctgctagaggaggagaactccaggccacacaccaatgaaacttcgctttaatcagcactcacgcaccggagttctgcccatgggaagtaaactgcagcaggccactggggacagaagggcccatgtacttgttgggaggaggaggaaagggaaggctggcaggtaggtcggcacttggacaatggagtgccccaactcaacccttggggtgactggccatggtgacattgtggactgtatccagaggtgcccgctcttccctcctgggcccacaacagcgtgtaaacacatgttctgtgcctgctcagcagagcctcgtttctgctttcagcactcactctccccctcctcttctggtctggcggctgtgcatcagtgggatcccagacatttgtttctgtaagattttccattgtatcctctttttggtagatgctgggctcatcttctagaatctcgtttctcctctttcctcctgcttcatgggaaaacagacctgtgtgtgcctccagcatttaaaaggactgctgatttgtttactacagcaaggctttggtttccaagtcccgggtctcaactttaagatagaggcggccataagaggtgatctctgggagttataggtcatgggaagagcgtagacaggtgttacttacagtcccagatacactaaagttacaaacagaccaccaccaggactgtgcctgaacaattttgtattgagagaataaaaacttccttcaatcttcattttggaggcagggctgggaagggagcgctctcttgattctgggatttctccctctcagtggagccttattaatatccaagacttagagctgggaatctttttgatacctgtagtggaactaaaattctgtcaggggtttcttcaagagctgagaaacattattagcacttcccgccccagggcactacataattgctgttctgctgaatcaaatctcttccacatgggtgcatttgtagctctggacctgtctctacctaaggacaagacactgaggagatactgaacattttgcaaaacttatcacgcctacttaagagtgctgtgtaacccccagttcaagacttagctcctgttgtcatgacggggacagagtgagggaatggtagttaaggcttcttttttgcccccagatacatggtgatggttagcatatggtgcttaaaaggttaaatttcaagcaaaatgcttacagggctaggcagtaccaaagtaactgaattatttcaggaaggtcttcaatcttaaaacaaattcattattctttttcagttttacctcttctctctcagttctacactgatacacttgaaggaccatttactgtttttttctgtagcaccagagaatccatccaaagttccctatgaaaaatgtgttccattgccatagctgactacaaattaaagttgaggaggtttctgcatagagtctttatgtccataagctacgggtaggtctattttcagagcatgatacaaattccacagccttctgttcgctggaggatactccagccaccagttcggagggcagacagctgtatcctaaaagcaaccactgagaggccagcagtgaggctgcccatctccaaaacgaaacaacagatcaactggtatcagtctagaaggaccagctttggggtgctttgatcactatgaaaatgttcactggtttctgtcaatcacttggtcaaagttagttcctgtgattttttttttttttttttgagatggagttttgctcttgtcaccaggctgaagtgcagtggcgtgatcttggctcactgcaacctctgcctcctgagtagctggaattacaggtgcccgccaccatacccagctagtttttttgtatttttagtagagacagggtttcaccatgttggccaggctggtctcgaactcctgaccactgatccacccacctcggcctcccaaagtgctgggattacaggcatgagccaatgtgcctggccattcctgtgattttttagaatttttcacttttcatataaagttgcattttatcatgaggaaaatgttttggctgaaaaacatatgccccaaaaaaaaaaaaatcagttttcactatttttccagcttgcctagggaaacgtcctcccctgagcaaagtgggatgtgcatggctcttttttgtgattaagcaggcatcaaatgggcagttttcattttcactgacacagaaacatgtggctgaagcaggaataaaatcctgcctactgacttctgtctccattcttgctccaggtaaaatcagagaacctccccttcttggccctttaattcccccaggcagaggcggctccagctcctgttaagggccccagttttactcatgctacctgaccttagttttagtactttcaaatgtgatttgggtaaaaactattttgcaggcaaaagtgttaattttttataaatatgtataataaaaaagctataaaagtttttccttttcttgtatttttcaaatactccccaagacacaatccttgaaggtgaactaggtggcacttgattatgctaattgtgggagctactgaactatactgattaaattaaatgcttgcaggttcctgggtaattttcctttgtgaataacctggcgctacctgaatttttctctaacaaacatctccaatgagggtaaacaatgatcttgattctaatttatatgaggttaaaaaccttcagatttcgtattttgaattgttctccctagtttcctcagtggttacccccttttagtcagtaaccatctctgttcagaattcagtcttggcttttgaagaaatgggcacagagccaaaggacccatttcacagttcccttggaatatatttcccattgttggactgaggcaaacaaaaccaactgtgcaaatcacaagcaaaagagacttctgtccgtagttgcgagtgccatcagtgtgagcttaccagctacaaaaatctgtcatggactggggaacagtatgattccttattgaaactttcatcctcatcggctggcttgtcagcgttctgaagttaatatccatgctgcctgaaacaaatgttatgtttaactagcacttaacttttaaaattgcttaattctcctttcagatgcatgcactaagtcttctctgagcctgcagcaatattttagagggacctcttctaagtcagagccttgacattctactccaaaaggaagtccaaattagagcccataggctttttcttaaaagctgttaaggagtagtaagaaagttaccactctaaggaaaacatgaaactatctgaaagtcttctggttcctaactggatacagattagattattttaaatgagaaaaaagtgcaccgtagttacccgatcaagattggactgcctgtgtccctggcatgaattaaagaacctccatagttgcttgttcccttctgaaggtgtttcctatggcccacgagaattataaagcaatcactttttaagtctatcagtcaaccttaatagctctcaagagtttcgattatcaagctttaaagtgataacatatcaagatgactattaaaaaataaacatctctgaaagtgtcctttcctccataaggctttaaacaatttgcaaattcttaattgggagtatgtcccaatcattctattaaactatttacagctctacctaattaaggtcagtgcagaaatctcaaccattacagaagtctcttactattttggctctcaaaatactctaactagtagctctgtttgctgaatctagaagtaggtcgacgcgg

SEQ ID NO: 61855 - DNA, 7846 bp, Homo sapiens
  misc_feature (1)..(1): n is a, c, g, or t
  misc_feature (4)..(4): n is a, c, g, or t
nganggggaaacttcggcgtgaagtgcagctccgctccggctccctctagctttctttccttctctggaatccgaggcgcggatcttcctcgccccaccgccctagttttttcgggagctcgccggtgccctctagggtgtcggctcgtgctgggaagtgccctccatcctggtaatggggggcggcgaggcaccgtaggagtggcgaggcggcgcccagggtggcactgccccggaacggggcgctgggtgcgcgcgggagggtccccgcgcgggctccgccgctgccgcagctgcgagcgcgccgcgccaccgagcctcctgcagcaatggctcgtccgtgaaacgcgagccacggctgctctttttaagagtgcctgcatcctccgtttgcgcttcgcaactgtcctgggtgaaaatggctgtctagactaaaatgtggcagaagggaccaagcagtggatattgagcctgtgaagtccaactcttaagctccgagacctgggggactgagagcccagctctgaaaagtgcatcatgaattccggagttgccatgaaatatggaaacgactcctcggccgagctgagtgagctccattcagcagccctggcatcactaaagggagatatagtggaacttaataaacgtctccagcaaacagagagggaacgggaccttctggaaaagaaattggccaaggcacagtgcgagcagtcccacctcatgagagagcatgaggatgtccaggagcgaacgacgcttcgctatgaggaacgcatcacagagctccacagcgtcattgcggagctcaacaagaagatagaccgtctgcaaggcaccaccatcagggaggaagatgagtactcagaactgcgatcagaactcagccagagccaacacgaggtcaacgaggactctcgaagcatggaccaagaccagacctctgtctctatccccgaaaaccagtctaccatggttactgctgacatggacaactgcagtgacctgaactcagaactgcagagggtgctgacagggctggagaatgttgtctgcggcaggaagaagagcagctgcagcctctccgtggccgaggtggacaggcacattgagcagctcaccacagccagcgagcactgtgacctggctattaagacagtcgaggagattgagggggtgcttggccgggacctgtatcccaacctggctgaagagaggtctcggtgggagaaggagctggctgggctgagggaagagaatgagagcctgactgccatgctgtgcagcaaagaggaagaactgaaccggactaaggccaccatgaatgccatccgggaagagcgggaccggctccggaggcgggtcagagagcttcaaactcgactacagagcgtgcaggccacaggtccctccagccctggccgcctcacttccaccaaccgcccgattaaccccagcactggggagctgagcacaagcagcagcagcaatgacattcccatcgccaagattgctgagagggtgaagctatcaaagacaaggtccgaatcgtcatcatctgatcggccagtcctgggctcagaaatcagtagcataggggtatccagcagtgtggctgaacacctggcccactcacttcaggactgctccaatatccaagagattttccaaacactctactcacacggatctgccatctcagaaagcaagattagagagtttgaggtggaaacagaacggctgaatagccggattgagcacctcaaatcccaaaatgacctcctgaccataaccttggaggaatgtaaaagcaatgctgagaggatgagcatgctggtgggaaaatacgaatccaatgccacagcgctgaggctggccttgcagtacagcgagcagtgcatcgaagcctacgaactcctcctggcgctggcagagagtgagcagagcctcatcctggggcagttccgagcggcgggcgtggggtcctcccctggagaccagtcgggggatgaaaacatcactcagatgctcaagcgagctcatgactgccggaagacagctgagaacgctgccaaggccctgctcatgaagctggacggcagctgtgggggagcctttgccgtggccggctgcagcgtgcagccctgggagagcctttcctccaacagccacaccagcacaaccagctccacagccagtagttgcgacaccgagttcactaaagaagacgagcagaggctgaaggattatatccagcagctcaagaatgacagggctgcggtcaagctgaccatgctggagctggaaagcatccacatcgatcctctcagctatgacgtcaagcctcggggagacagccagaggctggatctggaaaacgcagtgcttatgcaggagctcatggccatgaaggaggagatggccgagttgaaggcccagctctacctactggagaaagagaagaaggccctggagctgaagctgagcacgcgggaggcccaggagcaggcctacctggtgcacattgagcacctgaagtccgaggtggaggagcagaaggagcagcggatgcgatccctcagctccaccagcagcggcagcaaagataaacctggcaaggagtgtgctgatgctgcctccccagctctgtccctagctgaactcaggacaacgtgcagcgagaatgagctggctgcggagttcaccaacgccattcgtcgagaaaagaagttgaaggccagagttcaagagctggtgagtgccttggagagactcaccaagagcagtgaaatccgacatcagcaattgctgatttgtttactacagcaaggctttggtttccaagtcccgggtctcaactttaagatagaggcggccataagaggtgatctctgggagttataggtcatgggaagagcgtagacaggtgttacttacagtcccagatacactaaagttacaaacagaccaccaccaggactgtgcctgaacaattttgtattgagagaataaaaacttccttcaatcttcattttggaggcagggctgggaagggagcgctctcttgattctgggatttctccctctcagtggagccttattaatatccaagacttagagctgggaatctttttgatacctgtagtggaactaaaattctgtcaggggtttcttcaagagctgagaaacattattagcacttcccgccccagggcactacataattgctgttctgctgaatcaaatctcttccacatgggtgcatttgtagctctggacctgtctctacctaaggacaagacactgaggagatactgaacattttgcaaaacttatcacgcctacttaagagtgctgtgtaacccccagttcaagacttagctcctgttgtcatgacggggacagagtgagggaatggtagttaaggcttcttttttgcccccagatacatggtgatggttagcatatggtgcttaaaaggttaaatttcaagcaaaatgcttacagggctaggcagtaccaaagtaactgaattatttcaggaaggtcttcaatcttaaaacaaattcattattctttttcagttttacctcttctctctcagttctacactgatacacttgaaggaccatttactgtttttttctgtagcaccagagaatccatccaaagttccctatgaaaaatgtgttccattgccatagctgactacaaattaaagttgaggaggtttctgcatagagtctttatgtccataagctacgggtaggtctattttcagagcatgatacaaattccacagccttctgttcgctggaggatactccagccaccagttcggagggcagacagctgtatcctaaaagcaaccactgagaggccagcagtgaggctgcccatctccaaaacgaaacaacagatcaactggtatcagtctagaaggaccagctttggggtgctttgatcactatgaaaatgttcactggtttctgtcaatcacttggtcaaagttagttcctgtgattttttttttttttttttgagatggagttttgctcttgtcaccaggctgaagtgcagtggcgtgatcttggctcactgcaacctctgcctcctgagtagctggaattacaggtgcccgccaccatacccagctagtttttttgtatttttagtagagacagggtttcaccatgttggccaggctggtctcgaactcctgaccactgatccacccacctcggcctcccaaagtgctgggattacaggcatgagccaatgtgcctggccattcctgtgattttttagaatttttcacttttcatataaagttgcattttatcatgaggaaaatgttttggctgaaaaacatatgccccaaaaaaaaaaaaatcagttttcactatttttccagcttgcctagggaaacgtcctcccctgagcaaagtgggatgtgcatggctcttttttgtgattaagcaggcatcaaatgggcagttttcattttcactgacacagaaacatgtggctgaagcaggaataaaatcctgcctactgacttctgtctccattcttgctccaggtaaaatcagagaacctccccttcttggccctttaattcccccaggcagaggcggctccagctcctgttaagggccccagttttactcatgctacctgaccttagttttagtactttcaaatgtgatttgggtaaaaactattttgcaggcaaaagtgttaattttttataaatatgtataataaaaaagctataaaagtttttccttttcttgtatttttcaaatactccccaagacacaatccttgaaggtgaactaggtggcacttgattatgctaattgtgggagctactgaactatactgattaaattaaatgcttgcaggttcctgggtaattttcctttgtgaataacctggcgctacctgaatttttctctaacaaacatctccaatgagggtaaacaatgatcttgattctaatttatatgaggttaaaaaccttcagatttcgtattttgaattgttctccctagtttcctcagtggttacccccttttagtcagtaaccatctctgttcagaattcagtcttggcttttgaagaaatgggcacagagccaaaggacccatttcacagttcccttggaatatatttcccattgttggactgaggcaaacaaaaccaactgtgcaaatcacaagcaaaagagacttctgtccgtagttgcgagtgccatcagtgtgagcttaccagctacaaaaatctgtcatggactggggaacagtatgattccttattgaaactttcatcctcatcggctggcttgtcagcgttctgaagttaatatccatgctgcctgaaacaaatgttatgtttaactagcacttaacttttaaaattgcttaattctcctttcagatgcatgcactaagtcttctctgagcctgcagcaatattttagagggacctcttctaagtcagagccttgacattctactccaaaaggaagtccaaattagagcccataggctttttcttaaaagctgttaaggagtagtaagaaagttaccactctaaggaaaacatgaaactatctgaaagtcttctggttcctaactggatacagattagattattttaaatgagaaaaaagtgcaccgtagttacccgatcaagattggactgcctgtgtccctggcatgaattaaagaacctccatagttgcttgttcccttctgaaggtgtttcctatggcccacgagaattataaagcaatcactttttaagtctatcagtcaaccttaatagctctcaagagtttcgattatcaagctttaaagtgataacatatcaagatgactattaaaaaataaacatctctgaaagtgtcctttcctccataaggctttaaacaatttgcaaattcttaattgggagtatgtcccaatcattctattaaactatttacagctctacctacttctagattcagcaaacagagctactagttagagtattttgagagccaaaatagtaagagacttctgtaatggttgagatttctgcactgaccttaattagggtaccgccatagggctaccaaagtttttagtgagggctggggaggtggagcataagtaacattttttttctgcagaaggtgatggctttgtagaacactataaaatttttcaggaaaacatacagcaaattttcttatccagtgggaacagcctatttgacaaggaatgatatacaagtttgattcacctttgagcactcttatagagtttacagaagaggcgtaactggttacaaaacaaaagttacgccttcactatccagttcttaaagtttatccacatcctacaaatcttatgttcatgtaggtcaggttaaagtaagctccaaacttgtggccttcagaagcatctcctgtttaacacacctgaaattactctaacttaatacatttgtattctctaagaaataatgctgactgctgtcaccacagcatcactgatctctcagtggctgttaaaatataaacaagtggaaaaaaagtatacaagttgatagcagctgttcatgtattcttgttttgctaatacctgtgtagagaaagacagtttcacatgcagatcaccatacatttttgcttaaaggttacactgggtaaactgtttgtttatcacattacatctgggtgagattttgcatgtgaccaagaggaagaaatcattcagtcccggaaatagcaactgctatgtaaaaccacatccttgactagtacttcatctttccacagtcattcatctgctaatcaggtgaaatatcagctcagcagaacaaagcaagttatacacaaatttcccccacattcacactgatgccgtacttagtaattctggttctaccattcccttttgcactttttgcaagtcaaattcatgtggaaaaatgttctgtttgtagaactcatagtattcacttatagtgctcatgtcaggaatggcaagtgagtaagagcccctgataatctgcttttgttagaacgtaatgcaaagataataaaacatgtccacttcttttctagttctaatcagtttttagacatcaagatttatttactttgcatgagatttgtttcctattatttgaatatgtgctatacacttgaattagaaaaacctgcttgaatgtattgtcagttattaaagcacatgtgactaagtttgcatttgtcagtattgttctactgtttgtactgaaagtctcattttaaaattgctacttaacactgtactataccttgtaattttttagattctccacttgtattctttaaatgtttccagatgcctttagttttagctgctgtaagatagctactttgcgttatttgatatagaattgttttttaaaaactccatttatttatacagagacatttataatattttacaaacattcttatattctgaataaatatttctaattccacagtgtaccttaactgtgttatttaaagggtaaggctatccttctgtagaactgtgatatacatgcaggcaaatatcaaatccatgatgcttacatgaaatcaagagccctagtcaaagcaggggtctagaagtaagactattattagatcaaaatggccaaagaaccctcatttatagcccatttttagttggctttttaaaatttggcataaataggaagttatctattgaagagagtcttttcccctcttaaagaaagatcattaaaatggaatgtaatcaaggactggaaatgcaaggaagtcatataggac

SEQ ID NO: 61856 - DNA, 1786 bp, Homo sapiens
ctttgggctgtagtcagtattggattatgatcaatattatcaccatttattttgttgctccagttcttccagctgtggccaatccttcagttggattcttgtgccccatcaacattctccatcctggctttttgttttgagcacttccttccttcctagcaccaccaggctcttgtattatccctgtccctgccctggaatcgactcctcctccagagagccctggtttcttttgttagaggatggtatatagaatccaacatgcagacacttggtggacttattgttactggggttttgttatactagggtttcagtggtcagtgctagtatttatgtatgttaacccacgctgtgctttggattcaggctatttcaaattttagataatatggtacatatattattaataccactagttactacattggtacttttcagcaaaatatatctaagtgggatcaaatgagactgtaaatagctttacatcagttcaggtcagttatgttgctaaattacttttggcattaagtttagggaaaaaaaattgggtttgggattttttggtttcaacatttgtgattgagagactatggacctgtaataagtccaagaacagcagttgcagtgtaacaggactgttaatggaatcgggtcatttagaaacagtcaagacttcgctgttgtgcatgtggttaggagccagtgcacacgtcagttcttaggaaatgtacagtctgagcaatagcatttgaaatccaagactcttcccattgtgttgctgttgagtgtagaaaataaaatgtgtgaatttctttatcttgagtattgagattctccccttagaataaaacaagaatttttctctcagtgtaaaaatgtcaagttttattcttgaaatgaatagcaaagttaagcttaaaaacgtgaacagcttcagaactataaatgggtatgtatacctttctgctgtctaagggcagagaagggaaagaaagtgtggtgcttatcagaggagacagcagcaagacacattgtgacagaaaaccaagggtatcctgtgtcacagtgaaatgtaatgagggcacctctcctttcaagagacgaagattgaatacatgggaagcacactctccgctgtgtgttgtctaggagaggtgcaccctgtatggaaatatttgggaaggttaagattaagacagggtaaaataaagcaaaggcaaatcacaaagcaagggctaatgttaatatgaaaagtgcagaattcaaggaaaaagcatggggacaaagaagatttttcctctttttggttgctgttcatgtgtagcctacaacagaactataagacctatagacatttatatgaatatttatttgaaaacgtataatatcaaacaatgtaaaagccaatagaaatctcagataattgaatgtatagaaactagcagtttgaaagtgattagttcattatttgctgatcaagcagaaaaataagcatatgaaagatatttaaaatgggattaataaagttgatttaacagatcctattccatgtcctttgaatatttatagaaattaaatggaacaaattagggcatcaggaaaactatacaaaagtctttaccaaaaaaaaaaatatatatatatatgtgtagtactacctatatatatacataatatatagtactgcttatatatatatatgcctatatgtacacatatatatatacatgtataggcagtactatgttttctgatcataatatgttaaattagtaaaaattac

SEQ ID NO: 61857 - DNA, 1543 bp, Homo sapiens
ctttgggctgtagtcagtattggattatgatcaatattatcaccatttattttgttgctccagttcttccagctgtggccaatccttcagttggattcttgtgccccatcaacattctccatcctggctttttgttttgagcacttccttccttcctagcaccaccaggctcttgtattatccctgtccctgccctggaatcgactcctcctccagagagccctggtttcttttgttagaggatggtatatagaatccaacatgcagacacttggtggacttattgttactggggttttgttatactagggtttcagtggtcagtgctagtatttatgtatgttaacccacgctgtgctttggattcaggctatttcaaattttagataatatggtacatatattattaataccactagttactacattggtacttttcagcaaaatatatctaagtgggatcaaatgagactgtaaatagctttacatcagttcaggtcagttatgttgctaaattacttttggcattaagtttagggaaaaaaaattgggtttgggattttttggtttcaacatttgtgattgagagactatggacctgtaataagtccaagaacagcagttgcagtgtaacaggactgttaatggaatcgggtcatttagaaacagtcaagacttcgctgttgtgcatgtggttaggagccagtgcacacgtcagttcttaggaaatgtacagtctgagcaatagcatttgaaatccaagactcttcccattgtgttgctgttgagtgtagaaaataaaatgtgtgaatttctttatcttgagtattgagattctccccttagaataaaacaagaatttttctctcagtgtaaaaatgtcaagttttattcttgaaatgaatagcaaagttaagcttaaaaacgtgaacagcttcagaactataaatgggtatgtatacctttctgctgtctaagggcagagaagggaaagaaagtgtggtgcttatcagaggagacagcagcaagacacattgtgacagaaaaccaagggtatcctgtgtcacagtgaaatgtaatgagggcacctctcctttcaagagacgaagattgaatacatgggaagcacactctccgctgtgtgttgtctaggagaggtgcaccctgtatggaaatatttgggaaggttaagattaagacagggtaaaataaagcaaaggcaaatcacaaagcaagggctaatgttaatatgaaaagtgcagaattcaaggaaaaagcatggggacaaagaagatttttcctctttttggttgctgttcatgtgtagcctacaacagaactataagacctatagacatttatatgaatatttatttgaaaacgtataatatcaaacaatgtaaaagccaatagaaatctcagataattgaatgtatagaaactagcagtttgaaagtgattagttcattatttgctgatcaagcagaaaaataagcatatgaaagatatttaaaatgggattaataaagttgatttaacagat

SEQ ID NO: 61858 - DNA, 848 bp, Homo sapiens
  misc_feature (4)..(4): n is a, c, g, or t
gacnctgaggatcccctgatcttccgtgcccctgtctaagggcagagaagggaaagaaagtgtggtgcttatcagaggagacagcagcaagacacattgtgacagaaaaccaagggtatcctgtgtcacagtgaaatgtaatgagggcacctctcctttcaagagacgaagattgaatacatgggaagcacactctccgctgtgtgttgtctaggagaggtgcaccctgtatggaaatatttgggaaggttaagattaagacagggtaaaataaagcaaaggcaaatcacaaagcaagggctaatgttaatatgaaaagtgcagaattcaaggaaaaagcatggggacaaagaagatttttcctctttttggttgctgttcatgtgtagcctacaacagaactataagacctatagacatttatatgaatatttatttgaaaacgtataatatcaaacaatgtaaaagccaatagaaatctcagataattgaatgtatagaaactagcagtttgaaagtgattagttcattatttgctgatcaagcagaaaaataagcatatgaaagatatttaaaatgggattaataaagttgatttaacagatcctattccatgtcctttgaatatttatagaaattaaatggaacaaattagggcatcaggaaaactatacaaaagtctttaccaaaaaaaaaaatatatatatatatgtgtagtactacctatatatatacataatatatagtactgcttatatatatatatgcctatatgtacacatatatatatacatgtataggcagtactatgttttctgatcataatatgttaaattagtaaaaattac

SEQ ID NO: 61859 - DNA, 274 bp, Homo sapiens
accgttgcactccagcctgggtgacaagagtgaaactccatcttaaaaaaaatgtgtaaaatgaagattatcatactacctacatcatagaattgtttttagtgtaaaatgtgtgtgtgtacatttatgtaatagttaacatttaaagagcacctactttgtgtaaacatactttgtatgagatactgttcaaatatatattctaatatatgcaacatattaaatatgttagaataggatcttatatatcttagaagtagagcgttggggctga

SEQ ID NO: 61860 - DNA, 2917 bp, Homo sapiens
tgtttttttgttttggccaaactctcatggcttttttctccttccctcatgttttctccttccctcttaagacttggcacttctccagaaggaggaggacaaaatgacgaagtctaaggaggcagtgacattcaaggacgtggctgtggtcttctctgaggaggagctgcaactgctggaccttgcccagaggaagctgtaccgagatgtgatgctggagaacttcaggaatgtggtctcagtggggcatcagtccacaccagatggcctaccacagttagagagagaagaaaagctgtggatgatgaagatggcaacccagagagataactcctcaggagccaagaatctaaaagagatggagactcttcaagaagtaggattaaggtacctgcctcatgaagagcttttctgctcccagatctggcaacagattacaagagagttaatcaagtatcaagattctgtggtaaatattcaaagaacaggctgccagttggaaaaacgagatgatttgcactataaagatgagggattcagtaatcagagttcccatcttcaagttcacagagtccacactggtgaaaaaccctacaaaggagaacattgtgtgaaaagtttcagctggagctctcatcttcaaattaaccaaagggctcacgcaggagagaagccctacaaatgtgaaaaatgtgataatgccttccgtcggttttcaagtcttcaagcccatcagagagtccacagtagagcaaaatcatacacaaatgatgcaagttacaggagttttagtcagaggtcacatcttccccatcatcagagagttcccactggagagaatccatacaaatatgaagagtgtgggaggaatgttgggaaaagctcacattgtcaagctcctctgatagttcatacgggagagaaaccctataaatgtgaggagtgtggggtgggcttcagtcagagatcatatcttcaagttcatctgaaagttcacactggaaagaaaccatataagtgtgaagagtgtgggaagagcttcagttggcgttcacgactgcaggctcatgagcgaatccacactggcgagaaaccatacaaatgcaatgcatgtggcaagagctttagttacagctcacaccttaatattcattgtagaatccacacaggagagaaaccctataagtgtgaggagtgtgggaaaggtttcagtgtgggttcacaccttcaggcccatcagataagccacactggagagaagccatacaaatgtgaggagtgtgggaaaggcttctgccgggcctcaaatctgctggaccatcaaagaggccatactggagagaaaccgtatcagtgtgatgcatgtggtaagggcttcagtcgtagctcagattttaacattcattttagagtccatacaggggaaaaaccctataaatgtgaggagtgtggcaagggcttcagccaggcctcaaatcttctggcccatcaaagaggccacactggagagaaaccctacaaatgtggtacatgtgggaagggcttcagtcggagctcagatcttaatgtacactgtagaatccacacaggagagaaaccctataaatgcgagaggtgtggtaaggccttcagtcagttctccagccttcaggtgcatcagagagttcacactggagagaaaccatatcagtgtgcagagtgtgggaagggcttcagtgtaggttcacagcttcaagcccatcagaggtgccacactggagagaaaccctatcaatgtgaggagtgtgggaagggcttctgtcgggcctccaattttctggcacatcgtggagtccacacaggagaaaaaccataccgatgtgatgtgtgtggtaagcgcttcagacagagatcctaccttcaagcccaccagagggtccacacaggagagagaccatacaaatgtgaggaatgtgggaaagtcttcagctggagctcataccttcaagcccatcaaagagttcacaccggagaaaaaccatacaaatgtgaggagtgtgggaagggcttcagttggagctcaagtcttatcattcatcagcgagtccatgctgatgatgagggtgacaaggactttccttcatcagaggattcacacaggaaaactcgataaaatatgttttactatctcagatgggtgctgaaatattttaataatcagagctatcatagacaaaacatttgttttatagagtcagtagttcagccaagtgattgggagaccacacagcagagaagcctcacaagagtggagacatatggactgcattcagaacattgaccattagctgatacatgcagacaagaggatcaggaaggatgagtctgatctggagtaaatcagaagtactaagatagaaatgctgaattctgttccactagaatataagatccaagagggcagggactttgttgactgccaaatctactctgccttttcagtgcctaatacgttgtaatttttcagtagtatttgaaattactgtcatatttgaaattcagtaatatttgacatttttatttatctctagaagtttctctaaaattgtactcagaagaattctgcaaggcttggaggatatataagttagtcatatggcctgattttcccatttttgcagatctcgtggacaagtgtttatcaaactgaaggttgcagcttgttagtgggttcagaaatcagtttctggctagcaactagaagttttgtatgttaacagtactttattgaggtgtaatctgcatgcagtaacatgcacaagtctcaagttcatggctttctgaattttgacaaatgtaatcatcaccaagatcaatgtatacaatatgtctattaaaccaaaaagttttcttgtgcccatttccagtcaatcccacc

SEQ ID NO: 61861 - DNA, 6843 bp, Homo sapiens
  misc_feature (22)..(22): n is a, c, g, or t
  misc_feature (47)..(47): n is a, c, g, or t
  misc_feature (62)..(62): n is a, c, g, or t
  misc_feature (163)..(164): n is a, c, g, or t
  misc_feature (168)..(168): n is a, c, g, or t
  misc_feature (224)..(225): n is a, c, g, or t
  misc_feature (238)..(238): n is a, c, g, or t
  misc_feature (244)..(244): n is a, c, g, or t
  misc_feature (262)..(262): n is a, c, g, or t
  misc_feature (274)..(274): n is a, c, g, or t
  misc_feature (294)..(294): n is a, c, g, or t
  misc_feature (334)..(334): n is a, c, g, or t
  misc_feature (342)..(342): n is a, c, g, or t
  misc_feature (396)..(396): n is a, c, g, or t
  misc_feature (418)..(418): n is a, c, g, or t
  misc_feature (973)..(973): n is a, c, g, or t
gttgcagtgagccgagatcgcnccactgcactccagcctgggcgacngagcgagactttgtntcaagattactctaaacagaaacaagagtgaaataaatttgtggagttaataataaaaatgttattctctgtggtatgttttcttttcttttgtttttttnngacngggtcttgctctgttgcccaggctggagtgcagtggcgccatcttggctcactgcnncctctgcctcccnggttcnagcgattctcctgcctcnggcccctgagtngctgggattacaggcacgtnccaccacgcctagctaatttttatatttttagtagagacngggtttcnccatgttggtcatgttggtctcgaactcctgacctcatgatctgccccctgccngcctcccacagtgctgggattncaggcgtgagccaccgcgcccggcctgtattttttcatttcatagaatttccagataaaagtcagagtcaactagttttataatactgaaaagttttgcaaatacaagcatgtcacttaatgatggggatgtgttctgagaaatgtgtcattaggtgattccgtcattgtgcaaatgtcatagagtatacttacataaacctaggtggtatgtagcctatatgatatatgtggcttatatgatataccctattgctcctaggctgcaaacctgtatagcatgttactatcctgaagtcaatgggcaattgtaacacaatggcaagtatttgtgtattgaaacataagggtatagtaaaaatatggtactattaatacaactgtatgggactaccattgtatatgcggtccatcattggccaaactttctttatggtggcacaagactacataataaatggtaaagtaaccagacttggagatggggaggagggagaagaatgccaaatgtatgtttcctcccacagactagcaggcatctagtatcaggcaacanacttatacaatcatttcctactcctgtctcacacttgccagaatctggatttaattttttttttttattgttagaccagtaatgcagttttcatattttgtataacaaaaaagttgtaggacttttccttcttactgtgaaaatatgactcattaaatacataacttttagtattggccatttgtattcttatactcttagtcacaaagataactacgttttacaaagtcgaaaggttaataatagcagctagcatgaattcagagcttgctatgtattgagcactgggtttaaacacatatgctctattttattaagtccttatagtaggaaagtgaagaatacactagtcactgaagttccttcagtgctcaagactcaagtgcactatagcaagacaaacaccaggaaacatgtaactctgcttcgaatactttagcaagtgaatggcccagtttgggaaagcaagacaaacactggatccataatggctttttacacctgattggaatgcagaaaaaatggaaccactaactactaatattatctttgccagcaggtgagcagtacatacctgacttcagaggattttattgaaactcaatagatgatggttaataaaaacaaatatcctcagctttccttcttttacttgtcatctgacaaccactatttagctaaaactaaaatggattagagatacaagatgatgaataacaattattaacttttgtgagcatataatgtgagtcagctactacactaagaactttacatagattcccttaattttctcaataatcctatgagaactgtccttgtatgagcaaccccattttatagctgaagatacttgaggcttcaagaggttatataaacatgttcatggtcaacagttattaagcagtgagtgacattctcacgagattaatgagatcatctgtgtgagatacaaatacatctattgtgtatgtttgtgtttttaatggagaccaatggtatgacagaatgaagtccttttatcagtcagtcaagatctgatgtggctattcaaatataggcaaaactgatgttttccttttttagttaagttaaatgtactatttaaataactgtgaatatttagaatattcacagaattgtgcaaccatcaccacaatctttagaatattttcatcatctcaaaaagatactttgtagcctttagcacccttcccactgtacccccccccatacccctggccataggcaactactaaattactttctgtccctgcaggttgtcctattctggatactttgtatatgtggaatcataaaataggtgatcttttatgactggcatctttcaagcatgtttttgatattttcatccatgttgtaggatattaaattaactttttgcataggaataactgagctagaaaagcatgggctgaatatgtctgcagaatgtagcatttagaaaagaaagacttccaggagacaaatgaggtagtaactaaaatgtaaataactaaaaattagctttgagtctttaataaactacctttcatgttttgctttcactaggaatgaacttttaattttttggagctataaatacatgtagtttctaaagacatctttgtttttaaagaaaagacatctgcaggctttttcttagtgttcctattaagtatgtatgagtgtgtgcatttgtgtgtgtgtgtgtgcatgtttagtgactttacatgtgtatacatacaaatgtacacagtcatatatgactagtggtacatggaatctcaatttaattgtaaaagtgaaggagttctaaaactagttttagtatagtaagtgggatatagtaagaatgtcctacaatttaaaagcttatttggttatcttcaatggattttgaatgtattcaatactagatttgcgagtgactatgcctttttagtaaacaaaagaaaggctataatgtagaaagtatatggaataagcataacatctgtcctaatctaattttcaggcacatctccagacttcaatttggctgaaataattcatgccacggacctgtgcacatgcctggaattgagagacacagttaaaagactccaagttgctttctgccttttgaaaactcctgaaaaccatccctctggactctggaattctacacagctcaaccaagactttgcttgaatgtttacattttctgctcgctgtcctacatatcacaatatagtgttcacgttttgttaaaactttggggtgtcaggagttgagcttgctcagcaagccagcatggctaggatgagctttgttatagcagcttgccaattggtgctgggcctactaatgacttcattaaccgagtcttccatacagaatagtgagtgtccacaactttgcgtatgtgaaattcgtccctggtttaccccacagtcaacttacagagaagccaccactgttgattgcaatgacctccgcttaacaaggattcccagtaacctctctagtgacacacaagtgcttctcttacagagcaataacatcgcgaagactgtggatgagctgcagcagcttttcaacttgactgaactagatttctcccaaaacaactttactaacattaaggaggtcgggctggcaaacctaacccagctcacaacgctgcatttggaggaaaatcagattaccgagatgactgattactgtctacaagacctcagcaaccttcaagaactctacatcaaccacaaccaaattagcactatttctgctcatgcttttgcaggcttaaaaaatctattaaggctccacctgaactccaacaaattgaaagttattgatagtcgctggtttgattctacacccaacctggaaattctcatgatcggagaaaaccctgtgattggaattctggatatgaacttcaaacccctcgcaaatttgagaagcttagttttggcaggaatgtatctcactgatattcctggaaatgctttggtgggtctggatagccttgagagcctgtctttttatgataacaaactggttaaagtccctcaacttgccctgcaaaaagttccaaatttgaaattcttagacctcaacaaaaaccccattcacaaaatccaagaaggggacttcaaaaatatgcttcggttaaaagaactgggaatcaacaatatgggcgagctcgtttctgtcgaccgctatgccctggataacttgcctgaactcacaaagctggaagccaccaataaccctaaactctcttacatccaccgcttggctttccgaagtgtccctgctctggaaagcttgatgctgaacaacaatgccttgaatgccatttaccaaaagacagtcgaatccctccccaatctgcgtgagatcagtatccatagcaatcccctcaggtgtgactgtgtgatccactggattaactccaacaaaaccaacatccgcttcatggagcccctgtccatgttctgtgccatgccgcccgaatataaagggcaccaggtgaaggaagttttaatccaggattcgagtgaacagtgcctcccaatgatatctcacgacagcttcccaaatcgtttaaacgtggatatcggcacgacggttttcctagactgtcgagccatggctgagccagaacctgaaatttactgggtcactcccattggaaataagataactgtggaaaccctttcagataaatacaagctaagtagcgaaggtaccttggaaatatctaacatacaaattgaagactcaggaagatacacatgtgttgcccagaatgtccaaggggcagacactcgggtggcaacaattaaggttaacgggacccttctggatggtacccaggtgctaaaaatatacgtcaagcagacagaatcccattccatcttagtgtcctggaaagttaattccaatgtcatgacgtcaaacttaaaatggtcgtctgccaccatgaagattgataaccctcacataacatatactgccagggtcccagtcgatgtccatgaatacaacctaacgcatctgcagccttccacagattatgaagtgtgtctcacagtgtccaatattcatcagcagactcaaaagtcatgcgtaaatgtcacaaccaaaaatgccgccttcgcagtggacatctctgatcaagaaaccagtacagcccttgctgcagtaatggggtctatgtttgccgtcattagccttgcgtccattgctgtgtactttgccaaaagatttaagagaaaaaactaccaccactcattaaaaaagtatatgcaaaaaacctcttcaatcccactaaatgagctgtacccaccactcattaacctctgggaaggtgacagcgagaaagacaaagatggttctgcagacaccaagccaacccaggtcgacacatccagaagctattacatgtggtaactcagaggatattttgcttctggtagtaaggagcacaaagacgtttttgctttattctgcaaaagtgaacaagttgaagacttttgtatttttgactttgctagtttgtggcagagtggagaggacgggtggatatttcaaatttttttagtatagcgtatcgcaagggtttgacacggctgccagcgactctaggcttccagtctgtgtttggtttttattcttatcattattatgattgttattatattattattttattttagttgttgtgctaaactcaataatgctgttctaactacagtgctcaataaaatgattaatgacaggatggggttcccctgtgcttttaccagtagcatgaccccttctgaagccatccgtagaaagtactttgtcctccaaaaagctaacatacggttttgaagcagcattgaaacttttgtagcaatctggtctatagacttttaactcaagaagctaaggctagacttgttaccttcgttgaatgatgttagttgactgtactgtaatgttgtatcaactgaattgaatgtttgcctttaaacaatgaattttctttttctttcctttttttttttttgttgtaatagttaaagaggcttagaacaagctaacaggcaatagaaatatgtatatcagattttttaatgtaacaaactacatgttaattgttatcttattctttttatctttagtagacacttttaaaagaaaagacaattttgttgtgtttaactcaccaacacgtggtgtataatgaagacagaactataataaattagttttgttctgattttttagaacacttgcaataatgtatcatttatagttcttgctagttgcagtggtaatatttttcacatccataaaaacaactaccaaaataaatcagctgtagcatgttgctttttaaagctaggccctaaaaggttttaattctttttctaagggaagaaatgtctattttaattaagatattttaatgaacaggatttctgtattttaaatagtactgactagcacctaatgggcagtgggagggtggttcatatgaagaaaaaaaaggtgtattgttgtatcccatgcataaataaaggtaaatatatatatacaccaatatattcatatatactcacacacatcccaacctgtcacacacaatgcgtgtgtatatatatatgaatatattggatatgtcatttctgtaagagttttgttaaaacctgattttcttttgtagtatccacattcttcatcaaagtacaaaaacgtctgtggagtgtcacaaactgtatgacatgttatttctttttaacagttgtctatatgcttagacccgtgttagtctctatatctgtgtggcaatatctgctgagacaagtaaatgattaatagaaaac

SEQ ID NO: 61862 - DNA, 6243 bp, Homo sapiens
  misc_feature (22)..(22): n is a, c, g, or t
  misc_feature (47)..(47): n is a, c, g, or t
  misc_feature (62)..(62): n is a, c, g, or t
  misc_feature (163)..(164): n is a, c, g, or t
  misc_feature (168)..(168): n is a, c, g, or t
  misc_feature (224)..(225): n is a, c, g, or t
  misc_feature (238)..(238): n is a, c, g, or t
  misc_feature (244)..(244): n is a, c, g, or t
  misc_feature (262)..(262): n is a, c, g, or t
  misc_feature (274)..(274): n is a, c, g, or t
  misc_feature (294)..(294): n is a, c, g, or t
  misc_feature (334)..(334): n is a, c, g, or t
  misc_feature (342)..(342): n is a, c, g, or t
  misc_feature (396)..(396): n is a, c, g, or t
  misc_feature (418)..(418): n is a, c, g, or t
  misc_feature (973)..(973): n is a, c, g, or t
gttgcagtgagccgagatcgcnccactgcactccagcctgggcgacngagcgagactttgtntcaagattactctaaacagaaacaagagtgaaataaatttgtggagttaataataaaaatgttattctctgtggtatgttttcttttcttttgtttttttnngacngggtcttgctctgttgcccaggctggagtgcagtggcgccatcttggctcactgcnncctctgcctcccnggttcnagcgattctcctgcctcnggcccctgagtngctgggattacaggcacgtnccaccacgcctagctaatttttatatttttagtagagacngggtttcnccatgttggtcatgttggtctcgaactcctgacctcatgatctgccccctgccngcctcccacagtgctgggattncaggcgtgagccaccgcgcccggcctgtattttttcatttcatagaatttccagataaaagtcagagtcaactagttttataatactgaaaagttttgcaaatacaagcatgtcacttaatgatggggatgtgttctgagaaatgtgtcattaggtgattccgtcattgtgcaaatgtcatagagtatacttacataaacctaggtggtatgtagcctatatgatatatgtggcttatatgatataccctattgctcctaggctgcaaacctgtatagcatgttactatcctgaagtcaatgggcaattgtaacacaatggcaagtatttgtgtattgaaacataagggtatagtaaaaatatggtactattaatacaactgtatgggactaccattgtatatgcggtccatcattggccaaactttctttatggtggcacaagactacataataaatggtaaagtaaccagacttggagatggggaggagggagaagaatgccaaatgtatgtttcctcccacagactagcaggcatctagtatcaggcaacanacttatacaatcatttcctactcctgtctcacacttgccagaatctggatttaattttttttttttattgttagaccagtaatgcagttttcatattttgtataacaaaaaagttgtaggacttttccttcttactgtgaaaatatgactcattaaatacataacttttagtattggccatttgtattcttatactcttagtcacaaagataactacgttttacaaagtcgaaaggttaataatagcagctagcatgaattcagagcttgctatgtattgagcactgggtttaaacacatatgctctattttattaagtccttatagtaggaaagtgaagaatacactagtcactgaagttccttcagtgctcaagactcaagtgcactatagcaagacaaacaccaggaaacatgtaactctgcttcgaatactttagcaagtgaatggcccagtttgggaaagcaagacaaacactggatccataatggctttttacacctgattggaatgcagaaaaaatggaaccactaactactaatattatctttgccagcaggtgagcagtacatacctgacttcagaggattttattgaaactcaatagatgatggttaataaaaacaaatatcctcagctttccttcttttacttgtcatctgacaaccactatttagctaaaactaaaatggattagagatacaagatgatgaataacaattattaacttttgtgagcatataatgtgagtcagctactacactaagaactttacatagattcccttaattttctcaataatcctatgagaactgtccttgtatgagcaaccccattttatagctgaagatacttgaggcttcaagaggttatataaacatgttcatggtcaacagttattaagcagtgagtgacattctcacgagattaatgagatcatctgtgtgagatacaaatacatctattgtgtatgtttgtgtttttaatggagaccaatggtatgacagaatgaagtccttttatcagtcagtcaagatctgatgtggctattcaaatataggcaaaactgatgttttccttttttagttaagttaaatgtactatttaaataactgtgaatatttagaatattcacagaattgtgcaaccatcaccacaatctttagaatattttcatcatctcaaaaagatactttgtagcctttagcacccttcccactgtacccccccccatacccctggccataggcaactactaaattactttctgtccctgcaggttgtcctattctggatactttgtatatgtggaatcataaaataggtgatcttttatgactggcatctttcaagcatgtttttgatattttcatccatgttgtaggatattaaattaactttttgcataggaataactgagctagaaaagcatgggctgaatatgtctgcagaatgtagcatttagaaaagaaagacttccaggagacaaatgaggtagtaactaaaatgtaaataactaaaaattagctttgagtctttaataaactacctttcatgttttgctttcactaggaatgaacttttaattttttggagctataaatacatgtagtttctaaagacatctttgtttttaaagaaaagacatctgcaggctttttcttagtgttcctattaagtatgtatgagtgtgtgcatttgtgtgtgtgtgtgtgcatgtttagtgactttacatgtgtatacatacaaatgtacacagtcatatatgactagtggtacatggaatctcaatttaattgtaaaagtgaaggagttctaaaactagttttagtatagtaagtgggatatagtaagaatgtcctacaatttaaaagcttatttggttatcttcaatggattttgaatgtattcaatactagatttgcgagtgactatgcctttttagtaaacaaaagaaaggctataatgtagaaagtatatggaataagcataacatctgtcctaatctaattttcaggcacatctccagacttcaatttggctgaaataattcatgccacggacctgtgcacatgcctggaattgagagacacagttaaaagactccaagttgctttctgccttttgaaaactcctgaaaaccatccctctggactctggaattctacacagctcaaccaagactttgcttgaatgtttacattttctgctcgctgtcctacatatcacaatatagtgttcacgttttgttaaaactttggggtgtcaggagttgagcttgctcagcaagccagcatggctaggatgagctttgttatagcagcttgccaattggtgctgggcctactaatgacttcattaaccgagtcttccatacagaatagtgagtgtccacaactttgcgtatgtgaaattcgtccctggtttaccccacagtcaacttacagagaagccaccactgttgattgcaatgacctccgcttaacaaggattcccagtaacctctctagtgacacacaagtgcttctcttacagagcaataacatcgcgaagactgtggatgagctgcagcagcttttcaacttgactgaactagatttctcccaaaacaactttactaacattaaggaggtcgggctggcaaacctaacccagctcacaacgctgcatttggaggaaaatcagattaccgagatgactgattactgtctacaagacctcagcaaccttcaagaactctacatcaaccacaaccaaattagcactatttctgctcatgcttttgcaggcttaaaaaatctattaaggctccacctgaactccaacaaattgaaagttattgatagtcgctggtttgattctacacccaacctggaaattctcatgatcggagaaaaccctgtgattggaattctggatatgaacttcaaacccctcgcaaatttgagaagcttagttttggcaggaatgtatctcactgatattcctggaaatgctttggtgggtctggatagccttgagagcctgtctttttatgataacaaactggttaaagtccctcaacttgccctgcaaaaagttccaaatttgaaattcttagacctcaacaaaaaccccattcacaaaatccaagaaggggacttcaaaaatatgcttcggttaaaagaactgggaatcaacaatatgggcgagctcgtttctgtcgaccgctatgccctggataacttgcctgaactcacaaagctggaagccaccaataaccctaaactctcttacatccaccgcttggctttccgaagtgtccctgctctggaaagcttgatgctgaacaacaatgccttgaatgccatttaccaaaagacagtcgaatccctccccaatctgcgtgagatcagtatccatagcaatcccctcaggtgtgactgtgtgatccactggattaactccaacaaaaccaacatccgcttcatggagcccctgtccatgttctgtgccatgccgcccgaatataaagggcaccaggtgaaggaagttttaatccaggattcgagtgaacagtgcctcccaatgatatctcacgacagcttcccaaatcgtttaaacgtggatatcggcacgacggttttcctagactgtcgagccatggctgagccagaacctgaaatttactgggtcactcccattggaaataagataactgtggaaaccctttcagataaatacaagctaagtagcgaaggtaccttggaaatatctaacatacaaattgaagactcaggaagatacacatgtgttgcccagaatgtccaaggggcagacactcgggtggcaacaattaaggttaacgggacccttctggatggtacccaggtgctaaaaatatacgtcaagcagacagaatcccattccatcttagtgtcctggaaagttaattccaatgtcatgacgtcaaacttaaaatggtcgtctgccaccatgaagattgataaccctcacataacatatactgccagggtcccagtcgatgtccatgaatacaacctaacgcatctgcagccttccacagattatgaagtgtgtctcacagtgtccaatattcatcagcagactcaaaagtcatgcgtaaatgtcacaaccaaaaatgccgccttcgcagtggacatctctgatcaagaaaccagtacagcccttgctgcagtaatggggtctatgtttgccgtcattagccttgcgtccattgctgtgtactttgccaaaagatttaagagaaaaaactaccaccactcattaaaaaagtatatgcaaaaaacctcttcaatcccactaaatgagctgtacccaccactcattaacctctgggaaggtgacagcgagaaagacaaagatggttctgcagacaccaagccaacccaggtcgacacatccagaagctattacatgtggtaactcagaggatattttgcttctggtagtaaggagcacaaagacgtttttgctttattctgcaaaagtgaacaagttgaagacttttgtatttttgactttgctagtttgtggcagagtggagaggacgggtggatatttcaaatttttttagtatagcgtatcgcaagggtttgacacggctgccagcgactctaggcttccagtctgtgtttggtttttattcttatcattattatgattgttattatattattattttattttagttgttgtgctaaactcaataatgctgttctaactacagtgctcaataaaatgattaatgacaggatggggttcccctgtgcttttaccagtagcatgaccccttctgaagccatccgtagaaagtactttgtcctccaaaaagctaacatacggttttgaagcagcattgaaacttttgtagcaatctggtctatagacttttaactcaagaagctaaggctagacttgttaccttcgttgaatgatgttagttgactgtactgtaatgttgtatcaactgaattgaatgtttgcctttaaacaatgaattttctttttctttcctttttttttttttgttgtaatagttaaagaggcttagaacaagctaacaggcaatagaaatatgtatatcagattttttaatgtaacaaactacatgttaattgttatcttattctttttatctttagtagacacttttaaaagaaaagacaattttgttgtgtttaactcaccaacacgtggtgtataatgaagacagaactataataaattagttttgttctgatttttta

SEQ ID NO: 61863 - DNA, 4173 bp, Homo sapiens
gcggccgccgactcggcgcttccccgccgcccgcccagggagtccctgcctggcaagctggggctcggggaaaagtccagcagcgagagggccgcgtgtcccgggacggttccaggggagcccgcgcggaaacgcggaccaggcgcttcggcccggatgccggatccaggagaaggggacctcgcttgccgtgtccaccgccgcggccccggcgccaagaacagagcctggccgtgagtgaacgactggccggggtacaaatggttctgaagcacttgaagctcacaggcaaaggctaagagtctaaatcccatcccgccgcacatctccagacttcaatttggctgaaataattcatgccacggacctgtgcacatgcctggaattgagagacacagttaaaagactccaagttgctttctgccttttgaaaactcctgaaaaccatccctctggactctggaattctacacagctcaaccaagactttgcttgaatgtttacattttctgctcgctgtcctacatatcacaatatagtgttcacgttttgttaaaactttggggtgtcaggagttgagcttgctcagcaagccagcatggctaggatgagctttgttatagcagcttgccaattggtgctgggcctactaatgacttcattaaccgagtcttccatacagaatagtgagtgtccacaactttgcgtatgtgaaattcgtccctggtttaccccacagtcaacttacagagaagccaccactgttgattgcaatgacctccgcttaacaaggattcccagtaacctctctagtgacacacaagtgcttctcttacagagcaataacatcgcgaagactgtggatgagctgcagcagcttttcaacttgactgaactagatttctcccaaaacaactttactaacattaaggaggtcgggctggcaaacctaacccagctcacaacgctgcatttggaggaaaatcagattaccgagatgactgattactgtctacaagacctcagcaaccttcaagaactctacatcaaccacaaccaaattagcactatttctgctcatgcttttgcaggcttaaaaaatctattaaggctccacctgaactccaacaaattgaaagttattgatagtcgctggtttgattctacacccaacctggaaattctcatgatcggagaaaaccctgtgattggaattctggatatgaacttcaaacccctcgcaaatttgagaagcttagttttggcaggaatgtatctcactgatattcctggaaatgctttggtgggtctggatagccttgagagcctgtctttttatgataacaaactggttaaagtccctcaacttgccctgcaaaaagttccaaatttgaaattcttagacctcaacaaaaaccccattcacaaaatccaagaaggggacttcaaaaatatgcttcggttaaaagaactgggaatcaacaatatgggcgagctcgtttctgtcgaccgctatgccctggataacttgcctgaactcacaaagctggaagccaccaataaccctaaactctcttacatccaccgcttggctttccgaagtgtccctgctctggaaagcttgatgctgaacaacaatgccttgaatgccatttaccaaaagacagtcgaatccctccccaatctgcgtgagatcagtatccatagcaatcccctcaggtgtgactgtgtgatccactggattaactccaacaaaaccaacatccgcttcatggagcccctgtccatgttctgtgccatgccgcccgaatataaagggcaccaggtgaaggaagttttaatccaggattcgagtgaacagtgcctcccaatgatatctcacgacagcttcccaaatcgtttaaacgtggatatcggcacgacggttttcctagactgtcgagccatggctgagccagaacctgaaatttactgggtcactcccattggaaataagataactgtggaaaccctttcagataaatacaagctaagtagcgaaggtaccttggaaatatctaacatacaaattgaagactcaggaagatacacatgtgttgcccagaatgtccaaggggcagacactcgggtggcaacaattaaggttaacgggacccttctggatggtacccaggtgctaaaaatatacgtcaagcagacagaatcccattccatcttagtgtcctggaaagttaattccaatgtcatgacgtcaaacttaaaatggtcgtctgccaccatgaagattgataaccctcacataacatatactgccagggtcccagtcgatgtccatgaatacaacctaacgcatctgcagccttccacagattatgaagtgtgtctcacagtgtccaatattcatcagcagactcaaaagtcatgcgtaaatgtcacaaccaaaaatgccgccttcgcagtggacatctctgatcaagaaaccagtacagcccttgctgcagtaatggggtctatgtttgccgtcattagccttgcgtccattgctgtgtactttgccaaaagatttaagagaaaaaactaccaccactcattaaaaaagtatatgcaaaaaacctcttcaatcccactaaatgagctgtacccaccactcattaacctctgggaaggtgacagcgagaaagacaaagatggttctgcagacaccaagccaacccaggtcgacacatccagaagctattacatgtggtaactcagaggatattttgcttctggtagtaaggagcacaaagacgtttttgctttattctgcaaaagtgaacaagttgaagacttttgtatttttgactttgctagtttgtggcagagtggagaggacgggtggatatttcaaatttttttagtatagcgtatcgcaagggtttgacacggctgccagcgactctaggcttccagtctgtgtttggtttttattcttatcattattatgattgttattatattattattttattttagttgttgtgctaaactcaataatgctgttctaactacagtgctcaataaaatgattaatgacaggatggggttcccctgtgcttttaccagtagcatgaccccttctgaagccatccgtagaaagtactttgtcctccaaaaagctaacatacggttttgaagcagcattgaaacttttgtagcaatctggtctatagacttttaactcaagaagctaaggctagacttgttaccttcgttgaatgatgttagttgactgtactgtaatgttgtatcaactgaattgaatgtttgcctttaaacaatgaattttctttttctttcctttttttttttttgttgtaatagttaaagaggcttagaacaagctaacaggcaatagaaatatgtatatcagattttttaatgtaacaaactacatgttaattgttatcttattctttttatctttagtagacacttttaaaagaaaagacaattttgttgtgtttaactcaccaacacgtggtgtataatgaagacagaactataataaattagttttgttctgattttttagaacacttgcaataatgtatcatttatagttcttgctagttgcagtggtaatatttttcacatccataaaaacaactaccaaaataaatcagctgtagcatgttgctttttaaagctaggccctaaaaggttttaattctttttctaagggaagaaatgtctattttaattaagatattttaatgaacaggatttctgtattttaaatagtactgactagcacctaatgggcagtgggagggtggttcatatgaagaaaaaaaaggtgtattgttgtatcccatgcataaataaaggtaaatatatatatacaccaatatattcatatatactcacacacatcccaacctgtcacacacaatgcgtgtgtatatatatatgaatatattggatatgtcatttctgtaagagttttgttaaaacctgattttcttttgtagtatccacattcttcatcaaagtacaaaaacgtctgtggagtgtcacaaactgtatgacatgttatttctttttaacagttgtctatatgcttagacccgtgttagtctctatatctgtgtggcaatatctgctgagacaagtaaatgattaatagaaaac
